United States Patent Application Publication US 2008/0114160 A1 - sequence listing, part 63

SEQ ID NO: 22596 - DNA, 19239 bp, Oryza sativa
  unsure (1)..(19239): unsure at all n locations
gccaccaccgtctccgagtgcctccacacctgtcagttcctcctcctcctccctcctaccttcctcccaccacgccgtccgtgttgaattcaattcaattgagctaggatccggtttctcccacgtccccgattcggcgccgtacgtggggatttcgccgtcgccgtggctcccgcgcgttgacgtgtcgcggccggccggggatttcgccttcatgggaggatatgccctcatgtcatgcctctgtgccttgctaggcgtgacccgatttccaacgtttcccgtgtgctagctacctgctccacttttctagtaacaccgtaacacgcactccaggaggggaatgccgtgttgtttcacgtaaatcattcacccgtctcatggatcgctgatagctctgccatttttcctttttttgattgagatagttaagcagctcagattcactaactgtcttactgaaagctcgggtgctccagcatggtaatctaccaagactgggatgagctcactattcatcttcgggagacaaggctggcctaaatatgctacttttatgtggccccaagcaaatgctagcgtctgtttaagattcgggagaatgctgcatgcatttccgggttgtcgatttggaaacattttgctcaagtaattaatgttaggctgtccattgtataaagcagagtgaaatgctacagtagcaacttaacaaccaacgtcattcaccaacgacacaagtagatcctgggttgaatgttgttagtaactagtagtaattcaaaatccagttgtgctgctacttgcattctttatgagataatttcggctctcaaatttatactttatcctcctaatctacatatgacatgccccaatatctttggtaaccgatagtatattttcagttggagttgaattcaggcagatgttacatatccgctattacgctattgccaacttattcgttccacttttaatcaattggaacagtgctgctagtgcacatctggtcagcatagaattcgccttttgatattttcagagttcatttggaagaactttcattgtttggcctctttttgggataactgtagttttattagtggttcttcggtcttatgtgctaccttttctatggattcttgaccctatcactaatttcacagttaagtttacaacacaatagtacaagtagtgagaaaaccagttatgcgtcttgacttaatttgataaaaaaaaggtaaaaaaacacaatatttgattgctcatagattccacagctctaattttttcaccctgatgcagtttgcagaaagtgtatatatgagaagttgaatgatgaggaggtagaatcctgcccagtatgtaaaattgatcttggctgcactccagttgaaaagcttaggtatgcttatcatcatgtatatgcactcaaattttattgagattgcttgtccctgtagcttgtaaggtcaaaataactgtgtatttgcacttcaattttgactgtactgttaaatttcctgcatcttctatttattactcctatatgatatgactaccaagtggggcatagtatgaatagagcatgtcaacttggtactttgattgagatttccttaataaacaaaacactaggaagtaatacagtgggaaaaaagtagaaatgttacatcctgaatgccttggtgactgtttgtttaactccaagtagctccccactatttgagtaaaatatgtacctcagggtttaaacagtatcacctgggatattatggaatcttagacactttttagttaagctctacgtaatacagtaagcaatcatacaggactattttgtacagtgttgattctgttgacttcagtttcatgctttttgttctgcagaatgtaatctggaacagatattctgcctcttgtaaattcatatgctctaaagaagaattttgttttcctgctcttatttctgtagttccttgttgagtgtactgatcccaaaggtttgctctcattttactgtatgggtactttgtagcctgtgaagccattggtacttgtttgatgatttatattgcatcctgtgaaattgcattattaaagtatttatcattgaaaatgcatctgatttattttttgcatatgtcctttagttggaaaataaatttgacgtacttctattcatgtgattctgcactggtgtttgtggcctacacctacttatactcatttctttatgttccaacttcagggctgatcacaatctacaagatgtaaggtcaaaaatatttccattcaaaagaaagaagattagtgctgacgaagtagcagctcctgttttacttcccagtaaaaggaaagagagatctatctcttctctggtagttgatacgcctacagtaacaccgacaggcttgacagggcgacggacaagagcagttaccaggaaagctgctgccttgcgtggccttggtcctggtattgatgatcctgtgaaaaaggaaattgataatggtgaaaagcatgctcagaattcaagcttgcccactaatttgggcaaagtgccacaaacaagaagacaggtaaacagaccacaccttatggggtacccatctctcatgcactttaatgaaagttacattggacttggctgtgaaatagtgatactaattactaagttttcaaactacaatagctagaagaatgcacatgccagcaaaaattgatcctgttgtatgcagatgtcatcaaacgcagaggcatcgaaccattcctccaataaagataccgaaggtgatcgcaaggacctggccgataagactgatgagctctggagacctttaaattgtttggtagaagctgcaaacaggacaaagtcctcccgatcaagttcacagagtccatttgttaagagagagcaacttagtgactctcctgggagcacatctgttaacaaaacaaagtctagggaatatatgcagaaatccaaaatagaggatgataagaaagatgtacctttgctaaaaaggaaaaaccaaaggactggacggaggagagaacttcatgcccaatctgatagtaagcctgaagctgcagctacacaaaacgaaaagaaattcagttctatatggttttcacttgttgcatcatttgaacagtaagaattggcgattcatcgtaatataactttggtttaatatttagggaaaaaaagaattgctgccatgaacttttatctgatcctgttccttttttttcctgattattttcagggaaggagacccacctttaccacagataccttcccattatttgcgaataaagtgagctcccatctttcccagcgtttccttaaggtttatgaaaattatagtttaatctgtacatggccttcatatagatcttgtttggatttatcacactggactgtcagtagatatgttatgataacaacaccaatatccaagaaagaaaatgcattagggaggaacaaaagaaagagatacttacatgatttgtaatgactaggtgcaagctgataatataaaagaaaattctttgcatacttgagctgattggagatagaagtcacttggttagtttcagtgtaaattattgtgaatgaggactttgatcttccactgatacttgaccctgattcaagaggcagcagagccgaggtctgacatttggcaacatgtgtgtttccagcttctgcacttctctgctagtctgttagctacaatcttggtgttgataaactgtttctttaactacaaatatcgtgctaaaattcgagtctaattaatttttagttggaaaatatattttgctcgcaaacttctgctaggtgctagacagtgtggctgcattcaagagttggaagatatgctggtctatagtagtgttgtatgatgcagattcagttgtataacatctaggtcattatattattttgcgacttgatattagctggcagatctgattatggctattccacactgtgttttacaatagagatggaaacatacctgcctcgtcaatccagaagtacctcatgcagaagcttggccttcctaacgaggcagaggtaagagctatatctgcctcgcatttttttttagattactatcatgtgtgactggtattgaagtagatcttttggacactcttgtgctcatctggacacggcaggctgcagatttgcttcatttctgctctagtttctgttatgggcctcttttcgcaatttgagctacaaattatgcttatcagaatccatgtcatgttgatgatgggtcaatttaattcataagaccataacttccagtttgctgtgtatttgtttttccaaaactgtcattttcctattttctttaatcgtccccagactgtatatcattttttagataatggaaacttttattgaactcagtcaattacatcaaggtgatacaattatcttgagaacacttccggcctctgcataactaagatgcacacagctaaacatacaaaaccacactcaaaaggaaaaaagaatgacatggagtattgaggaccatcaatccaaagactaaattgccacccatgaacaactccttggccatttcctccaaaagcataagagccaccaatcctaagactagatcgccatccatatccttgggtaaaaaactccttgaccaccttctccaaatgtagacatgccgcaaccaccattcccacgaaccatatccagactgcatatcatgatactaattgttactccctccgtttcatactgtaagactttctaacattgcccatattcatataaatgttaatgaatctagatatatatgtctagattcattaacatttatatgaatatgggcaatgctagaaagtcttatattgggaaacggagaaagtactatatattttcctctccccatagtagaatacctcggagcatttttaacttcctgaaaagattcacacctataaacatcgctgtacttgtcgcaacattttctttatcatggaacttgttttacttagtagtgaagatccactgtaaggtcatctgaaaatatcgacttgtctggatttacaggtcgaaataaattgctgcgggcagccagtgaaccctacacaacccctgtgcaatttagtagaggtgtggttgagggggcgatcaacacagacaacacagaccatgataggctcccctgccaaggagtttgtaatggtgctaacttatgggcggccaaaggccatcacgccatgaatggcaccacaaacacaaggctcaagccatttttcgcctagaggcgggtcccgtttcctgccattttattgggcccatggaagaagaggtgatccgagataaacctccttgatacatacatagcctcacaagtcacaatgcggttggctcacttggcagccagcccttggcgtcacattcatatgcattcattgatgttattcgattccattaagattgtctttttcttcattatttatattatacaaaaaggtgtgtaaagattagcagaaaaaaggctgttgtgaattatctgtatacctgtagtcattattgctgtttaggttggttataaagagtctatatgtatgagatgactagataaagtggatgtggatcgcaaaatttgtcttccagccgtttcatggactgctgtaacagttactagatcgttattctttttggagagcccagctttcattcaaagcataagagtacgttacagagcagagaaagagaagaaagacagataaaagtaaaaaggggcaaaaacctggggattccagcttaacatgaacagagcactatagctgctggcacagctcaaaaacaagccaggaaacacaccaaagacacttaagtattactcaattcatcagatacttaagcctgctatctttcggatactggcaagcagtaagtcccttgaagcgtccagagtactcttcttcgttggcgctagttttctccactgtaaatgtaaagaaacaaccttgtaaggtaaatgagaagcatcatcgatcattttgttgttgaaaacccagtcattttgcaaaagccaatggcccaagagccagcagcaaacaatgaaagggaagtaatgtttgaatcacaactttgcattttcagtttatccatcaactccccccttgatctaggaatgccactccatccaaaagcatctctaacgcagcaccacatgattttggatattgcacagttaaacatcagatggtctacatcttccacttcacacaatttgcaattagggctggcattccatttcatcttctccacacaatttgcaattaaacccttcgcataaccctccctaaccaatcacaccgcacctcaggtttcgcccccattcctcaacaggcagcgggcagccccctcttgtacctagataaacccggaagaagcatagactgtcgcagggcccatccatactccatcacgcccactcttgctcggatacgttagctaggtcaagccacactacagatccagccgttgccatgttggcttgtggtaagtacgggtaattcttccaggatttcccaagaacttccccttaattgtcatgggtgcgactagcaaaaccaagcacccataacccaccatttaagcatattttagttcaattattaccatggtggtaatccatcattaaattaaggactaataatttatgtgaaacccataatgtgctaattgatctaagcatggctaagcatcatctaaaccaatcatctaatcatttcatatcccagctatcaaagatataggttaaaaatggctgagtacaataggtatccatcccacataacatataaaataatacaattttaagaagaaagcgggaatttataaaataggtacaatatgatcaatatgtatgtatgacttgccttgctcctgagctggagagacatatgcaaccacttcgaaatacatgggagcttcggaactgccaaattctacacgacaaacaaagcacaagcaatacatgctataagtctactgaaataggaaaataaaccatttttaatggattctagatatttttatgaatttattgagacttaaatggattaaatcgaagctcagatgaattagatataaattttagaatattcattgtgtatttactataaaccagaaaatccttattccattattacgtgttgacgcctgtgggcggacaaaacaaggggatacgacaacagcaagcgggcctcatgggtcagcggctcattgagccgacctaccgtggtccagggccatgcgggcggtctactgctggtccacgataccggcggcctgggtcggtcacgaaactgactgagtgacgcaactcggcacggccgagccaggaaaacacgggaaacacgatgtgcgacaagcgaccggcaaacgacatggcaggaaatggccagggcgacatgacgctagggcggcgggcagttggcggcaacacggcacgagccgacacggcggcaacaacggcacgtggccagtaggtggtggcagacgcaggcaagcgccggcaacgcgcgacaggcgcggcggcgggtaggcaacggctggtgcgacaaggcgggcgctcggcggcggcatgcggcagcggctggcgcccgacagtggctagggcagcgcagcgcggcacggcaaggtgtgggtcacattgattcagcttgccacgtgagctaaagccgagcgtttaagtccgtttttgtaaattgaggtaccgattatatatttgactttttagttaagggacgaatttcatactcagcaaaaaaaaaaaattgagggaactagaatgaacttattccgggtgctgctgttccctgggtgctgctgttccctgacggcggagggtgtccgaccagcccaactgtgttccacgtgactgtcctcggccttgttgggtcgaaactgtgcgattcaagactccaagacccatcatggcagatatcctaaggtttctttaggggaaaaagttcacttgaggtccctcatcttgtcgtcgagtttcaaaatcgtcactgaatcggaataccagatataatgtatccctaatcttacaaagccggatcgtattgggtcccaaggcagtattaagagcggttttgaatgatgtggcgttgacatgacgcttaattttttttaaacaataatcatatggggatccacgtgtcagtgaaacaatatattcttccttcctctctcttaccatcacgtgttcgaaggttgtaaagcgaggtcgcgaggcggcgagggagctgggacttgggccgtgctttctcgagccggcccaaggcacgatggctcagtacgaaggaaagcacggcccagcacgatacggctatgggccgtgcctgggccgtaagttgaggcacgttgggcggcacggcacagcacggccattgggtcatgcttgggccagcccagcacgaaaaaggcccgaaggctggcccgagctctagcctagccgaacgcacgaggagtcgtaagtcgccacgaggagatcaggaggcaggatgatgcaaccacaaacaaagctgttgccggctacgagcgcgtacgcttggccacggagagtttgggtcacatgacgacgccattgccggctacgagcgggtcgcggagagtttgggtcacacgacgacgccattgccggctacgagcgcgtacgcttggccacggacgaagccgtgcttcgtcggcccctcgcgacctcgccgcctaaccgtcggcttggatggtgagagatgaacaagctaggaagattatatctttttcactgacatactggtcccacgtcggtttttattcgttatttttctttgccatgtcagcgccacatcattcaaaaccgttattaatacttctttgggacctaatataaccctgttttgtaatattagggatgtgttatatttcggtttaggaatgattttaaaactcgtcgacaagatgagggatttgaagtgaacttttttcgttccttagggcgtttttatccaccaatctctccgtctcgtcccacaccttcgtctcagccgcggcttgaggtgcgtacatgcgatttcctttgctctattccttgcccccgatttggattcgaatttgaagatttgtcgactcaagttcctgttgtttgggatgtatcgattgttattttatatcggatcttgagatttgtcgatttaaatcgtaagtagtaggattacggtggattgattcatattttgcaatggattcatagtatcatgatttgtcttttcgatttgtaatagtagtagtagtattggggatggattgattattattttgccatggattattcgtatcctggaattagtcgatttaaatcttagggcatgtttaaatcccctagtaaaatttttcaccctgtcacatcgaatatttagacaaatgtatggagtattaaatataagcgaaaaaataattatgtagattgcgtgtaaattacgagacgaatcttttaaacctaattactctatgatctgacaatgtggtgttacattaaacatgttgctaataacggattaattaggtttaataaattcgtctagcagtttacaggaggaatctgtaatttgttttattattagtctacgtttaatacttcaaatgtttatccgtatatccgatgtgaaacgccaaaacttttcatccctagaagtaaacacagccttagtaggaatttgtcgatttgagtcctagtaggaatgatcgatttaagtcctagtaggaatttatcgattgtgatgggtggtgaactgattcatattttgcgatggattcatcggatcttgggctttgttcatcaaagcgcttgaggtaggatttgggatggattgattaagttggagtaggatttgttcagcgtggtagtgagttcatcagatcttatgacttgtcgatttaaggttgattaggatggattgattctgatttaactcgagttcgaattgcagaaggaatacgtcaagtaggcgatttggacgcagtaagtacgtccatgctttatctcatcttggacgactggatcttccgcaagattgatttgtcgtctaaccaacctgatgggcggcaggtacctggaggcatcgcgagggaagccgcctcctccctgccaccccccttcttccgctggaatgcacaacgtgggatgcccctgcacttcgtcgccatcggctccaagatcttggccatgcctcccatggaagaaaaaagggatactgatcacctcgacgttggcggcgcctgcttcgacgtccgcaccgggtgcgtcgtcttcgtccctcggcacggcggcgatcagcacggcgacccagtatacttccagatcggcagtaggctcttcacgctagggtgctcccgcttccagctccttgacctactgccgctggcgctggatggcgaccctagaagtacaaggcggcagcaatggtcatggcgcgatctcccgatgccgcccttcctccactccatgcgtgctctctctcacgtgcttctccctcaagaagaccagaccatcctcgtcggcgttgggttcctctccccaagttcttcctccacctacagctttcgcattgcggaggacgggagctcagcctggaaatgccttggtaactgggggctgcctttccatggccgcggttactttgaccctaagctgaatgccatgatcgggctctcgatggatggacgcatctgctccggccaattggtgtctgatcactgcccggacgtgaagtattgcagggagaatctgttcagccgagacgcgcgtaggcgccaccctcgtctacatgggacagagaagcagattttgcctggttgagtctgttgctgtcaactacttatgtcaggagggggttttcagcttcaagcttgagggtccgttttttcgctacatgtttcggctgacgacttttcgtctgaagtttgatgatgatgatggacacctaaccactggtcgcagccgacgggtgcgatactattatgcccctgcaaatgatgttagttattttgcctgtcggtttcccgtagctttctacatatgaacgttttgtggtcggtgtaaacccgagattgattaaaatcgggcgatcgggggaggtgggaaaaatcggtcgctccctcttcccgcatgcgcgcgctcccctctcctcatctggacccacccacttatccctccccttgttccacaaaaatgtttcaccaagtgtacttataatggaatttggtttattttttgttccactggaaaatgtttcacctagtatactcacaatgtttcactatgtatagatctaatgttgcagtgaacgaaacattccattgcaacaaaaaaacccacatattttggaaaccccctattaagagaatttggtttattttttgttccaccgaaaaatgtttcacctagtgtactcacaatgtttcactatgtatagatctaatgttgcagtaaactgaaacattctttcactatttgttgaaacattgtttttatataaggtaaaacaacacccaatttaaacaagtgaaacattttcgatctacttagtgaaataattccgatatacctggtggaacatcgtgcaacatttaaaaataattcaataataagctttttttcgtcggaatatatccatgtgtggtcttgttttgaagatttaattgcaacgaatttaatggtgcaatcggatcatgatttggataagtagtttagaagaaaaatcagtttagtagttttgcatgtaaatcggacgcgatttttcttgaaatcgtcgggcgcccgagccgtaggcagccgtgtaaacctgcagttggaccatgtatccgtgtttggtgtaaaccagtagttttatctgtggtttgttgtgggtggatgactgttacattttctggtgattgttcctactatttctaaggcctggtttagttctccaaatttttttcctaaaaacattacatcaaatctttggacacatgtattaaatatagataaaaacaaaaactaattgcctagttagggggaaatggcgagacgaatcttttgagcctaattagtccatgattagccatagctataagtgctacagtaacccacatgtgctaatgatggattaattaggctcaaatatccgatgtgacatctaaaaattttcttttctgtaactaaacaagcctaaaaaatgtttggttgtacctattgtactaattaatgttctgaaccagtatctaggtagatcgcatatgaattgtaccaatgtattgacttttttgaaacgctttcacaatattgaaacttaattgttttttttaacattaatcacaatattgaaacttaatggttcttttacattaatcttagagctttttgaaggtatgcgtaagctactgctacttctaaatttgtgttgaaattcagatataggatgaggactccgactttgcttgaattatgagcgataagctggtagggtttgaattcttgcggtttttttacctgcctcaggctagccaacttattgtgtttgaagctcgttaaatcccaattttttggggtaactttcttcatatacaggatgaggacacatatccttctttgaaggttcaatcccaatatttttgggttgagtgattgaactttctccagactagttaggtgcccgtgctttgctacggggtaaaatatgtatccgcttaaagttatactaagtaaaataatgtcaaataatcattaaatgtaaatttattataataaaaccttaatatagcccccacattcaaagagaccactcaatctccacacgcttaacctagaaaattcaggtttctctgccattgcaaaatggcaagtgcgttcttaccccccttctttatgttttaattatgattttacacctttttatggtttatgtttttacccttgttttttttcaaatgcaccttcactctacccctattatgttaagataacttaacggtgtcaattcagccataaaaggacaattatacccttgggcattttcctaactttttgtataatttgcatgcatttcaaatgtgactaaacactgacaaaatttgacaacattttaacacaaattgtacggttgcaaaacttcactacaaagattcatcacaaattccaaccaaatagcaaatactgtgagatggcaaaaaagaaaaagaagatcaaacggcaacgacatcgctcgtctttgtggacgagccgcccgcagtgtgtcgttgttgccggcttgcggcgccaagctgctcgctgctcgccaccattgaggggaacggccgtccctgctgcgggtaaccgagacaccctgccctttcccttttcgcatcgtcagattcgctgcctgcccatgcgctgcgtcggagctaccgcggcctccccatagcatctgctatggccttcccacacgctggtcccggatgtgacgtaataggaattactatacaagcaccatcaccgatttttgttgagttgtgatctaaattttttttagaattacacagtacaacacagacacttacaacgcacgcgcactcacccatataaacacatgcacgcaaaccctacccctatgagcatcttcgaagactgggccagtaaattctgaaaagattgacgaagtcaccacaggtgcctcgctgtcgacgggtacgtcgcctaccactgaaatttgtgatccaaatttatttacatttaataaaggccagcttttgccggagtgaagcggatgcccaggggtgcggggacggagcccccgcggtacggatcgtcatcccttttagggttccaccatatatatacacctcttgtaagccgctgtacggtgttgtaatctcaccccgatatattgaagatattttacatgtgtagattggagataattatacggatgaaacacatcagatgatggtcaacgacgtaaatgactagaacaaacaacatatcaaaatagggaaaagataaagtactctcaaaacatacatgtatactctgaaaacatagcaatccacatgacatactacctccattttttaaatgtataacactgttgatattttaatcaacacttgactattcatcttattcaattttctttttgtaaatataaaaatatttaaatcatacttaaagaacatttaatgataaaccaagtcacattaaaataagggtatgtttagttctcaaacaaaatttttcacactgttacatcgaatgtttggacacctgaatagagtattaaatgtagaaaaaaaaccaattgcataattcgccaggaaattgcgagaccaatcttttaagcctgattatgacatgatttgacaatgtggtgctacagcaaacatttgctaatgacggattaattagacataataaattcgtctagcaggttcctgggggaatatgtaatttgttttattattagactacgtttaatacctcaaatgtgtgtccgtatatccgatgtgacatgcaagggtaatttttttccaactaaacaagcctaaaataataataatatatttttttaatatgacgaatggtcaaacgtataaaaaaagtaaacagcggcatatatcggaaatgctcttcgccggtcgcccggcttggggggagccggattggggcgcttccccccgcgccccctccccccacgtgcctacttgggcccaaccatttctgctccccttttttctagaaaagatgtttcacctagtgtatttacaatgtttcactatttataaatctaatattgcagtgaattaaaatactcttttgcaacaaaaaaaaacccacatattttggaaactctctattagggaattggtttattttttgttccacccaaaatgtttcacctagtgtactcacaatgtttcactatgtatagatttaatgttgcactgaacgaaacattctattgcaacaaaaaaaacccacatatcttggaaacccctattaagggaatttggtttagtttttgttccaccgaaaaatgcttcacatagtgtactcataatgtttcactatgtatagatctaatgttgcagtgaactgaaatattctttcgctatttgctgaaacattgtttttatataaggtgaaacaacacccgatttaaacgagtgaaccatttttgatatacttagtgaaacaattccgatatatctggtggaacatcgtgcaacatttaaaaataattcaataataagctaaaaaattttttcgtcggaatatattcatgtgtggtcttgttttgaagatttaattacaacgaatttaatggtgcaatcggatcatgatttggataagtaatttaagagataaaaccgtttaaagtaattttgcacgtaaatcggacgctgacgtcagcgcccgattttacccctcccgatcgggcgctcgaccgggagtcatccccgacatatatacataaaaaaatagagggagaactaattaaaaatagtgaaagtaaaagaataggatccgacacgggtttttgagttgctacatgtgcatactccccagctcagtaaggccattcacagtgcgtcaccaagttttggtgtttcttacatgccacgtagaccaagaactgtattagccacacatctcacagtgcaaactccacaaggccacatacatgtactagcttgtagtgggtcccaccactactacttttacagtttcaccttttactttcccctctctctcccccaactctttctttccccaccacagagccgggcggagacaggtcgccggaacttgggcggagcggcggctcaagcgcaggtcacaaagggggtcaggtggcgtcggctcgtcggggcgcggcggcggcggcgccgtggccttccacggcggggcgggggcggggcgggccggccgggcggcggatcgagggatcgacctcgaacggcggcggtatgtcggcggcggacgcccgacttggagcacgggacagcgaccaagcggactgagnccggggcgggttttcccccagcctccacgcctccgccttcctcctctggcccgagcggcgacggcgttgggcggctgcgtcggttggcgccctccttcgcgaatccatctccatccccgccgacggacggtgcggcgggagcttggcggcgcgcctacgggggacgatgcggcgggagctctggcggcacgacccaagcggcgccggcgccgggggctccacctctcctctcctcgccgggccgcgctgggcggcggacggcggggtgtcacgagcggcatcggcaccggctacgggtcgacgatgaggtcctccatgcggctggctgcggatcgacgacgagctcctccgtgcggccggccgcttctcttctcctccattgccgtcccctctcttctcctctgccggccagatccggctcggcggctaatccgtcctcgtcttcctcgcgctctccactcccttggccggcgcgccgaagagatcggcggcgtggagcgtgactcggcgacacggcgaggtcggcggcacgggagggggaaatggccggagctcgggagacaaggcaagcgggcctcttctcacaacctgatctgcacccaatcgccgccgccgctctcggttctcctttgctgccgccgccgctctccgttctcacggcgaagccaggcctcccgcacggcaccgcgacctcgtttcccacgccaccagtctcgattgcgccgaagaacgggtgaccaactttggtcacccgcgcttgagttttgtgggcccatgctgtaacgtggcggtgaatctgggctactcgccaacgtggaagctcaggccgaatgccagctcgttgcactgtaaatggcctaagagttccccgtaagtgccttcagtttggcacggatccgacacgggtttatgccatcaacaaacattatatatattgttggagtttttttgtttaggtgggtatgaacttgtaacaaatttttgtgttactaattaactgatcatgaaagcttttaaacataatcgtattgattaacaacaaccgtatcccacatgccaatgccatattgatcgaaaatatgatcatacaagttttgtttttattatttattttctcatgaaaatttgtatatataattggattggttagtaaccaaattatcacttttcgtaccatgcatccttgcatctgcgcattgcttaacatggatggcatatacgtgaagaaaaaaaaatcaaccaataacatataaagaaacttgtgaactctgagtgacatataaggaattttctaaaaataaaaacaagttctgcacttcgtatgcgaatgtagtttcttgaaccaacgtcttaatgtacaagtgcagagcatatggcctacaataatatacagaaatctaaaaatctgaactatatatggcctacaatgtacacaatggatgcaaacaaatgattgtgatgcccatctgatactcaaatggcaataaaaaatattgaggatttagttccattaaaaaagaaagagagaaaaactgagcaaatttcatagtagccgccgtacattaccacccaaaaagcagcactatctcaaatttctacagtccccagactaccccaaggtttgctgtccatggaggcgaaaattacaggattcatatcatgcacacggggaatggtttacataatgcaaatattattttgacaatccataccacggtttacatccagaatgccacggggtacttaagcattgcctcagtaacttgtagaggcatgctgtagtaccaaacccggcggctgttaccagttgtcagggctccattcctatcatactgcagcgaaaaggtcgtcaatcgcagaaagcacttcggatctagctgatcctcctcacccacctcatcagcagaatcctcgtcattcgcctcattagaatcatcaaaatcgatctcattcacctcatcaacagaagaaacctcattcgtctcatcggaatcagtcaactgatcagctactatatcatcttcgatgtggatactctccaggaggcagaagttgctttcaccaccacccatgtagacaagagtggcaccaatgtgcctctcagctgggaccatgctgaagagcttctccttgctgatcttcagggctggggggcggctagcaacagtgtcgtcggtagacaccacatcacaagagcagatgtggccaacggtgttgaggtcacctgaaagcccaacccaggcatccagccttgggtcgaagtagccgcgtccagtgaagggtagctgccattggccatgtcgcctccacatcatcggctctgccgttctgaagctgaaggtggcagggacgacgacgccaggtgactgctcaacgctgctgacgaagatggtttgtttgtcagggtgcacagcgtaggaggtgacaaggtcacactgaaaggctggcttggggagattgaggcacgagaagttcttcttccagttggcatcatcatcagcatcatcatcatcatatgtcggtggtggcatgtagagcatgtcaaaggaggcgctaccgagagtaaacaacctgtattcatcaatgggaatgtagatgatggggtcgagcagcacatcctgcagcattggccaagagccgacaacgaaggcccgcgcatgaacgtcaacgatgttcacaataagtctcttcttcttctttttcccgtgagcaggaggaggagtagccagaatcttgtggtcgaaagcacccacgatggacttaggctcgccgcgccgtgcctcgaagcggagcaaggcggatggcagggtgtgcctgccggtgaagacatgatcatctcctcctcgcgcgacgtcggcgggtatcagcggcggattgatgtcttcgtgcgagagcttcatcttgcggatgctacaaccctgcgaccagtcatccaggacgagataaaggtgccgtggcttttcattggaccgccgttttgacatacttgtttccttttgttcgtcatccccttggcaatccaacgcttgcaccagtcaatccaccttaatcatagtggcttttcacattttggtccttttgaaaaacttatttcgcaaatagacccctgaaaaaacttatcccagaaatggtcctttttggggcgcc

SEQ ID NO: 22597 - DNA, 710 bp, Oryza sativa
ccccgcggctggaagtagcagccgccaaccaccgacggcgggtgacaccgactgcacggtgaagaaccaccggaacagctgaagagaggggcgcaccccaatgaacatctcgcacaggtgcgcgaagatggccaatgtcatcaccgcattgggggtgaggtgcgccatctggagatcgtagaactccaggacatccatgaagaaagaagaaaatggcgggaccagcccagccattgcgaaggggaggaagaagatggaccgccccgggtagtctggtgccgggcgcccctcgcccagcatcactatctcccgaccggtggcggactccggcatgaagcggcgcggcagtccggcgtgcctctcgctcacgatgcgggaaggcggtagtacactgccgtcgagcagagcagagccccgtgccatggcggtggaggaagagatgattgagaacgagcgcgtgtggcgaaagtagggcgtagcagagaaagagtagagctcaggcggcgaaggcaagaggaacaatggcgaaaggaaggaagcaaatccttttctcgatgcttttatacccttgccatcgctgggcctggctcctcgtttctcgcgcccactacctcgtccctcgtatctcgccatctcgctccctcgtttcccgtgcccccgcttccactaatcccattcgcccgcttacggcgcatgagggctgcaggaat

SEQ ID NO: 22598 - DNA, 3120 bp, Oryza sativa
ggtatttcagtcaactgcgatagtgggggaggtaattcatacttttttctttctaaaaaaagaaagaaaaagggtagcactgcgctattactggttttgttacatgttctgatgtcatagttgttaaaaaaaagaaaagaaaagaaaagaaaatacatttcaaatcgattatgaactattactatacgttttatcttcagtgattggaggtaattatacgagattgaaaatatacgattttcttaatttagctgggaaagtctaatttgttgctagtgttgctatgagaaagaaagttcaaaagaacccatccaaacaaaagatcctatccacatttaaaattttatgaactagagtgcatcggcaagcaattttttttcggaggcaatcctgattatttgacaaagtaaataaacgatatactatgttctggtattataataaaaaaaatcctttgcaaatacatgcgccattttctagcaggcacgctccagccaaacatgaactttggtcggtaccatatatgcttcacaaatatcaactatacacgcatacaaaatgacaatgtcatgtacaattaaatcgacataattgtctcttaacatctcatctcaagataacatatttatttaggtcgtcacacaacttacaccatacacatgctaaattataagacaatctcctaagagcaggtacaatagcagactataatccagctataaacatattttaaagagataaaagagaagagagaagagcagcgggctatagatatatagccagttatagcacgaactccaagacgtaatacgtgtataacacgtaggagcagttattaaaagtataggaagcaactattgtatgaattggctattacattggttatagatgatttggagctagtagttggctatactattaaacttactctaaattacatgctttcataattctccatccagcacggtgtatatataaaagatgcacacatgccttgaatatacaaatcatcataaggtttcgggaatgtactacccagattttgaactttcgagctattaaaatgataatgataggcaagtcctgtttccctattttggttcagaaaaataacttctttataaggatggaatcccaaaattgaaagatatccgtggcatcctccttcatttggatttgcagtgtcaagaatgtcatcgttgtcggagtcccactcaaatttatttactcgtactaccacatctttcttgatatcttagtgatttttgtaccagacactctcatattattcatagtgatatttcctaacgatgtgtttcttctaagcttcataatagttgtccatgtcattttgactgggatatccaaagtagttgtggtagtgcaaagtccacggaccatcattttgtatacagctttcctgacaccttagaaggaaactaagatcattgtcatgcttcagttcccatgtcatctgaccatataactcattgaggaaccaaacccgtagtcggtgctcaatatcgattaatgcatagtgcacacccctcattgatcttccgacaaaatggtttatatattgacatactttagtattcatcggtaactcaagtacttggtgcttgttattcgacaaggatattctgcattagaaaaaaaacaatatatgggtcataaataaaaccattgaaaaaaatataaagaaagaagagaaaacaatataagcacgataaaagtatgatgaacttgtacatcataataaaatctccctggcaatgtacataaagtgtcccatgccaatagactgcattatgatgatcatatggaaaagccaatgccatatcagtaactgtgcaggcagccgcaccgtctcgtacaaacaatcgctctccccattgcctagtccttgatgagaacacttgcaacacacatagtaacacacatagtgatggtggccgttgcaagctcttaagcataggatctagcacacgaaatcctatactcggaactcgtgggattttgaagatctcatagtgtgttgatatggtagggtcgaacacaagatagctgtcaaaccggtagaagtccttcatctagacgggctgaggtggggctggaggagaaggcgtccactgccgggtagcagggttagccacgccagactctagcagaaggagtctgttgcagtgatcctcgactaggttgtcgtcgggcgtgtagtcggtgaacaagccagagatggcgaggtgtgtggagctgggacgggataggaaaacaccgaatgctgcatctcatggaagttgatgtagatgccggcgagcgagagagggaggaggtcggctcgcagcaggcggcgggtatcgatgatggcgcgccatgccttgcagacgcagcgggacgcggcgagccatcgcggggcgaggcggccgaggacgtccgcgagcacgtcgtccggtaggagctgcgtcacgtcgtggtgcatagctcctccatcgaatctctctctgttcaattaattcgttgctcgataggtttttgggtgcgtgtacgcgtacctcctacttgtgggcggtctgttaatctatggacgagagtaaagcgcgattccgcgtttgttttccactccgagtaaagcgcgcgctgggcgctggagtgagagttttgcctgatacatacggagtcgatcgagggattcttatcggttggacttgggcgcaaatccgttctgctcccagacttgggcacaagaccactgcaatactaacacccagcatgaagaagccaacaaaagattggacggctgctgcatgcatgcatgcgcgccgtcgataccaatggagccatgagcaggcggcctgctgtgctgccaccgcgacaggttcgatgttggcgacctcaattccgatcgcaggagcaagaagggattactgatcgaatgtctggctggatgcatttctagttttttttttgggaggattactgatggtatagttgttaagaacaaaaagacgaaaaactcgtcccactcccaccacccgggtacccgccctctatgcgccacaccgctggcactactaaaaaaccgtttttgcaaacgggcagaatgcattttcgcatgcg

SEQ ID NO: 22599 - DNA, 16222 bp, Oryza sativa
ccattagattctccatggatggtagatatcaaccattcccatcccctaatgtgtgaattcaccgcggggaatcggtgattgggttctcattatcatctctagaccgaaatgaccagaattttcaaaatttcggaaatttcgatccgcaatgtctaaccctgctcaggagcactcccttgctgtcgcacgcccggatcatcacgcagctgtgtaccccatggatggtattatgcctccctcaactctgtgttctttctctgtcatatatcttagaccagtaggccaaaccagcgcgtctccacctccctggatgaggccatgaggtgaccttagccattagcaagagccgtgttatatggtactgttatgttcaacacttgtagttgatttgttctctaggcccctttttttttttagataatagattttcattaatccagtctctatatccacgaaggatatacacagccaaaaggaaacaagagtacttagactcatatctcaacaaggagaacacaacacaaaaaaaaaaacaaacaacctcggcacatcctgcttctctgtctcccgccatattctcctgaaacggccgcccctagtgtgccgttgatgcaaacctccatttgtgccatcttcatcaatttcaggtaagctgacgtcacgcgccgcttattagcccactttcaaccgccgtcattcgtcgtatagtcggaactagacaactagacacgaaccgacgggatcggcttccacttcgccggattctaggcatctactatccaaagtgctcaaaccatcactgtctcgagccgccgcaacccctagggccgccggtgccgacgggagccgatgcgtcctaggccgcagcagcccctagtgccgccggcgctgacggaagccgtccttgtcctgcatcgtagcccccctagggctaccggcgctgacgagagccgccgcagcccctagggccaccaacgccaatgggagccgccgctgtcctccgctgcagcctttagggctgccggcgccgacgggtaccaccgccgccacagcacccacgggaaccaccgccgccgcagcgtcgatgggactgccgccgtcctcctccgcagccctagggccaccggctccaacggaagccgctgccttcttgggccgccacagcccctaaggccccctccgccgacgggagccgttgggccgccgccatcctccgccgcccccagcaccgtcaaagagactccgtcgcctatgccttgccacctccccgccgccactgtcctagccgctggtcagctctggcggcagcatggccagatctgggagctggggggggagaggaagagacgagctggggggagaggaagttgggatctgggcagaggccccgttgccactgtcctcgccgctgcacggacgtgcgggagctggctctagcggtggcaaggcagtggaggggagggaggaaaccggcggcggcgcgggatggggtcgctacccgtgtcgcccgtgagagcgacgtgggggcactctgtttctctattctctaggcctctatatagttgatttgtgtacttaaatctaatagagtaaagtgcattggcggtccttaaacttgtagggttgtgttatataggtccctagactctcaaaatgcatatctaggtcccagaacttgtcaaagtgtatcatctagatcccaaatcgacacatctcatttaggatcctacatggcgctgatgtggcatgccatatggatgtgacgtgccattttctttattttcttcatttcttttttctttttcttcgttttcttctcgttcttctttttttcctttcttctgctcgggtcacagagaaaggagaagaaagggaaaaaaagaagaaaaagaaaaaaggaaaaaatttaaatgggacccatttgtcagtcaaaatgatgtcacgtcattccgtgtggcatgccacatcaacaccacgtaggatcttgaaggggttgtggcgatttgggatctagatgacacactatgacaaattctaggagttggatatgaattttaagagtttagggacctatatggcacactgctataagtttaaggaccgcccgtatactttactcaatctaataatctaaagggttaccctaatctaaagctggctcttttgctagcttttcattggtccacttttttttaactagggcggcaaggcccccatttctcttactagaaatgaaagtcattacagatagtcttgaaataaaaaaaacaaaaaaaagaaagaaagtcggtccactgaatataacagggacagcaaaaacatgcagcctaaccattacaggcctgactagaacatagaacccagtaacatagaactaaaaccattcagacagtccaaaagctttgacacagcacagaagtaacaaaacaggcccagctgccgaagaggactatgtcaagccaattcttctgatgcctcctcgccagccgtgacttgaattgaagacttcatttgccacctgtcttagtacactggttcccagctgcaaacttcttcaacttgcttcttgtttctgcagacaagtcgaggagtccaccagattgcaagccatatacactaagtcactaggatcatgaggaaatttcatttcaatacaagctttgtttctagatttccaaatagtccagataacatcctctatcacgatggaggtattgtgtgctgggatgcggagtcgaatttggaaggagtccaaatttggtatgagtggttatgtaaagtttgtttcttgtacgagaaggtttcctagggggattaggacttctagtatgagtttggttcgtgactttaggctgcctacctcgggtataaatagagggggagcgtgaggcttccttgcttttgagagcaattgagttgatagtttagttagggtttcgagtttactcgagatttttgtaaggtgtgctgttggcgcactttgtaaacacagagagaatcaataaagtcgtcttcgatttgtgttttctcgggtgcggcggtccaaccggcggtcagactagcggcatcgcggcggtcagaccagcggcggcgacaagcagcagcaggcgatttttggcggttagaccgattgatctatatcggtgagaccgacattcatcaggcggtcagaccggcgcagctacttcggtcagaccgcgatccgtcgaatttgagggtaacttttatttccgctaaaagttttggtttttgggcataccaaccattcacccccctttggttagcttagttcttgctgttcgatcctacaaatacaagattttttgtaaacttctctatattattgagccaataaccaaaaagattatgtctatttagacaaggcttaagattcagagcaacagcaatgacattccataacaatctggccaaaggacactcataaacaggtgccgaattgtctcctccttatcacaaaaaaggcattcctccaacctcttttgaaaaggttatctttggtgagtattttgtttctggtaaacaaccaaatgaaaattttaattttcagaggaattttaaaactccaaatctttttatgtggataattgacctgttgcatgttgagagccctataaaatgatttcacagtgaatttcccatttttggacaaagtccaccaaagtttatctgtacaattgtcatctaaattcaaatgttcctagataagaagaatcgtttcccaatttctaagtttgtccccccgcaaatcccttctaaattataaatttatactagagaaaaaacacctaacaatcatatgtgagaaaaaatctagagaaaaatatcacatatggattccaaaggcttctaaaactatcttcctttccaaccacacgaacctctactcctttgccttctataaatataccacgcctattcgatactactcctataactctaaaatatatctaaaatatatagtaaacctaaaattattaggcaaaaaacaaatataaaacaacgaatttacattcattatcattctttaaatattctatgcctactcggtactcatataactctagaatatatatagtaaacccaaaattattatgcaaaaaaaaaaaaaagaaagaagacaaccttgtttttatatatcacggaataggatcagtaatacctcctcagctaaaaaaaataattgtgtttttttgttaaacatgatatgtttaaaaactatgaatatattaaatgattgatctttaaaaaattcaaatccacaagcaaatataattaaaaccaattaattttgattaatctcaaaatttattttacttatttggatttcatcaaaatttatgtataaaatgacacattaaatttggtatttttgcttgacatgacatataagtcctaatttttttataaaaaatatgtttttcacttgtatatataataaataaatcatttgtaaatccataaatgttttttaatatcatacatccatttgtcaaaactaaaatagtggttcaaataagaaaaaaattatatacatattttaaattagggagcacacaaattttatcatgtagtgtttttgagtgataagtatatgtgtgtgtatatgtatatatatatatacacacacacatatatatatattctgactagcaagcgtgccaacagcacactgattttctggttcgcatgtaaaatagttcaacggtgttgttttcttctctattacaaatctacaaataaatgaaaaaaagtagtcatctaattaatcacatcatcagatcatcccattttgatattatcattcaattctttagattacagtgaatagcaatatcccaaagccaagatactcaaatcacagtttgtggtagcaccctaagccctattagagttgattaggtagagagtggtggtccacgacgccccgcctgctcgcccgcatggccttgctcgctgccaacactatgctagagtatttgggcttggtttgcgctaccacgaaacgctgccataaacgctgtctctgctgatgctttttgtttgactggaatctctgctgatgctttgtaagatgagacatctagttgaaatgcttgtgcttttatttgctgttgaaatcatttgctctttttgcctcatctttccctcccagcacaggatgagcattaacttgtgaagctgacaagctggcatcacagctagctgattcttgcatgaatgggtcttcccccgatattaagtgctgcgagaaaattgtagacctgtcccttcaaacagaaggacgcagccctgtgctacggcttcaatggttaaaatatttctgctgttctctaatcaatgaaatttcaaataatgtgttcttttgcatgctagctagtactaaactggcactgtttcacgcgtgcagaaacaaaagacgagcagccaaatctttcgccttcggctggaaatggcgttggcatagccaaagtgaagcagcctaaggtgatgcttgatcccgtggataacttcagtaactgggattggtacttgatcccgtggataacttcagcaactaggattggtacgttatggcaatcttgtaggtggtgactggacttcagatcgtgtacgcactttttcgagaagtagtaaattgcttgccgacaatccttgcacggaataatattcctcgtcaagtgtaagaggttagaactcttggatctatatatgagttggggtcgatggtcgatccatgtatctctgaattgtagctgctgccttatgcatctctgagttaattgtaggtagttgtaggtagcagctacatatgtatccctgagtattcttgtatcttggatctctaaacttaagtctggtacttatttattgaatggctatgtattaagcagtacgtagagcgtgatattgttccttttcttccctgtcatttgctgttcagatggcaccaccttgcatctttgcattactcagctgtccacactaacgattactggtggcctctgaagccagctagagttggaaggtgttgactactcctaccattgatttcatggaaacattagttatggaaaagtaacaaaataatcgccaatgctgttggaaaataaatattaaaaggtgcacagctaagttaaaaaatgaacttaaaaatgtcattggttgaagttgaagcgactgattttgctgggaaataagtccactttaggtctctcaatgtggattttgaatcacgtccctaaacaacaataccaaatattacacgtttcccaaattacaataccggtgtaccagtgtgatgacgctctctcgtggcccgattttctggtgaggggataactcttgctttgatcgagtgcgacatttgcgatgtggctaccaaccagaacaagtccaggacgctgtgcaatcgctacaccacaaacgatgtcataccaaccgtgacgcgcatttgatgatctctgcaatgcaaacgagagaacactgcaagaacaagataaaatgcaatctaaatattgcaaataggtaattaagcacaatggaatagttgcgaatggagtggtagcaaatcaacacaccaactattgggggttctgaatctaaagtcgccgactaatcgaacgaggactaaacaaaacccaattgttctagatggtgtacatagatatttatagaggaaaatatatctagggttaagtgctaattcgtggaggtggggggagacacttccgagatgagctagtctattacaaggcccaaggcccaagttcggtttcagtaacagcactgccttgttttgatgattcccgttgactcggaatgaatttggatatgatactagatgcgtttgaaaggtagcaagataagctttccatcaagtccaagatagcccaaatcggagttggcatgaaggtgctaggtctgtttgaagtcggtgctgtatccggaggttgaactggattccaaaactcattggactttaatatcttgtagatcctctgttcactcgatgtattctttggccatgttgtatatttctcatgcttgggtgtatgcatatacttgatggtcacattatcctcctcttcttgtttggaaaccgttatcgatttgttattgcaattgtcgtcataggagagatcaattgaaaaaatatcaaacaagcaatcattgtgtagcatcatttgttccttataaatccaatttacatcacgaggaaaccaactcaccgtactgaatgaatatgtcttaaaatgatagcgagacttgaccttcgaagttaacagtgcacagcactcaccttcttgaatattgtcatcgatatttaaaacaacgttaggtgaatttatcccaatagcatcaacgttgtgcaatccatttggtttctcatatttttccatatttaaaggaggattcatatctaaacatatataaacacgatgcaccatataacaccctctattattatatttaccaatgacatgataattgttccaagaataacatggaaaatcataaattttcttctctaaggtatttagatcacaaagaacatcaaattcgatataacccaaagtacataaagaagacaataatttcagctcttcttagtcatcagcaataacaaagacacgtttattttgagtggaaacaaaatattcagaaatagaagtaacgtgttctttcactagttgtggcatgtatataagtgaagcattgcacaactcttcctgattacaagcattatcaatatcaacacaatctgaatttttagcttgtgataaaggcaaattagaaatctgttccactagaggttgcttaacatagcataattagtggacaattgtagcatatcacaatctttcttaccttggtccatttgaccatcagttaaattacctgaaacgctctcttgaccaaatttaggtgcttcattcttcttttcttcaaaattgtttttaccttcctgcacgatgttagatataatagaaggcacaggaatattgtcatgtatcatagctatttttgtttctttctcaatctgactttcaatatcgcaagcaagcagaagtaactgaaaaagatggctatgtgttttattttcaagcctatgctgaatttttaaatcaagcccgtgtaaaaatcttttaattgtatctcctctagactcctctataccagcatacaatatacaaattttaaactcccggtggtactctctcggttctactctcttgtttcaaattttgcattttcatttgtaaatcacgaatataataaccgggcataaatctagctctcatcattgtttttaagtcattccaagaaccaggtttattgccgataagacaaatatcactccaccaaagagatgcgaaagaagtaaaagaacttgttgctgccttaatcttttgttcctcggaccattcataatattcaagttcatcttctactactaactcccaatcaatatagtccctaggattaaacttaccaacaaataaaggcaacgatatcttattttcacaaacctcatcatgtacctcttctcgttgtgaaagccaatgttttatttgttcaatcccattctctttgtacacttctgtcattgtcggtagcaaataagaaaaacaaacagatgcatgtaacttcttattaacaacaatattttgtttgtggggttgcaattcgctcagcactgtagcatataccaagttctcataatgttctcaaataatgcaaaaacatatcaattaccatggctgatttgtggcacaatgacacgtttgatgagtggagcgattgcaaagtcggacttgtaaagattagtagtatctggatcttggtaggcttaactaaacagatttgcgaaattaaataatagtccaaagtactagtcaaaattgctggcctagcctagacttaatcccaacttaagcaaacaaatgatcaccactcagactagaaacaactagattttatcacaaagctctcccaagaaatccaacaactaaaaaaaataattctaaattctttttatgattttttttgtgcggctttttttttctttttttttgcaccgttctgccttttctatatttttttctttgttttttttaacaaacggcagctattacacaaaatagctgggcaaaacaaaaaaaatacagaccacctagcaaactcacactaaaaaaagaacgaaatagcaaaacttgctagtctgcatgcacatacaggaaagatgggctcaatattcggtacagaattaacttctcccatgcatgcccatcaaatcaaggagagaatcaaacaagcaactgatccatcaaggaaacacatgcgcaataaaatactccatccgtcacctaatattctatgcaatgtttgaccactcgtcttattcaaaaaatttgtacaaatataaaaaaaaagttgtgattaaaatactttggataataaagtaagtcacaaagaaaataaataataattctaaatttttttaataagacgaatggttaaacagtataagcaaaaactcaaaatcccttatattatggaacggaggaagtaggatagctcggtttaaagtatggtaaatatatctgggttgtttttttttcacttggttgcacgataaaatctcggagggaataacaaggaaaaacaaattttccctaattatctggcacatgcaaccgagaacaaaataatctcagatgcgaacggaacctcagctcgcaaaccaatctgctacccatcaatcttctgcgaaactttctctacggtggcgacgcacacttgcaaactcaaaccaagactaatctaggcttaaaccagcacttgactcgacagtgcatcaaaactcagtaaagcaaaaactgaatgaaattgcgtggctcaaaactaatgtttggtgatggaaaaaaatagtgtggctatatggtagacgatgggtagatgaaataaaattgcaaactaaaatcctcaccaggcaactgatgctctaataccaactaatgacacactctctcgtggcccgatcttctggtgaggggataactctcgctttgatcgagtgcgacgtttgtgaccaaccagaacaagtccaagacgctgtgcaattgctacactgcaaacgatgtcagatcaaccgtgacacgcggttgatgatccctgcaatgcaaacgagagaacactgtaaaaacaagataaaatgcaatcaaaatattgcgaatatgtaattaagaacaaaggaatagttacgattgaagtggtagatctaatcgacccagcaaatcgacacaactattgggggctctaaatctaaagtcgccgactaatcgaatgaggagtatagacaaggtgaatagcacctggcaaaattcaactaaacaaaacccaattgttctagagggtgtacatagacatttatagagaaaaatatatctaggattaagtgctaattcgtggaggtggaggaagacacttccgatatgggtctagtgtattacaaggcctaaggcccaacttcggtttcaacaacaacaatgccttgttttgacgattcctgctgactcggaatgaatttgtatatgagaccggatgcgtttgaaaggtagcaagataagctttccatcaagtctaagatcactcaaatcggagttggcatgaaagcgctagatccgtttaaagtcggtgctgtctccagaagccgaactggattccaaaactcattggactttaatatcttgtaaatcctctgttcactcaatgtattttttggccatattttatagttctcatgcttggatgtatgcatatacttaatggtcacatcacatcacagtgtacatgagatcctaggtactactgtccggttttagctaacgtgatggttgagtcaacgtgaaacccacctaaaccccacgtgtaagcttcctccctctcccctctctcccctccaattgttcctcctcctcgtttcccctctacctctcttcccagcctccaaggcagtgggctggcagtcgatagggaaatgggtagctgagctccatcatctcatcacaacttgaggccacaacagagcacacgagaaggagcaccctgttggggtcagtcggactcggtcccatcaccatggccacacggccacgctagatgccctgaggtgcaacaacacatgattttttgcagcgacggcattgatgggcaggttgaacccaaccggagcccgacgcatgtctgctagtcatggaacccaggcatggacgggagccccatggcgaacaccgcccgtagatcgtagatcgggtgggaacatgaatcccatctcagtctcggcgcacgcttgctctgtgttagacagccctgggagcacagccatgcgacaacactacgctcgccagcgcgtggaacgaccgaacgagtggagcccatggtgcggcgaggccgatgtcgacaagggccctaccacgatgtgcatggacaactgccgaagctctgccagggacaaactggcccacactggtggagaaaccatctttcgtcggtcggccgaattccacgatagtcccggttgcaacaaaaaccgggactaaagatgatctttagtcccggttaaaaagggtaacgggcatatttgatctttagtaccggttggtgttaccaaccgggactaaagatgatctttagttatctttagtcccggttcaaatgctgtcagggcttgttaggcccccccgggatctttagtcccgtttcgtgttaccaaccgggactaaagatcgtaactttagtcccggttggtattggtataccaaccgggactaaagatcccggtgatctttagtaccgattggtaacaccaaccgggactaaagtcccacccctttatatatgtcttcttcctcctccagcccgagcaagcttcaaaatttcttcaaaaaagaggggaggtcatgccaaaatttatagtgaatttactttggtgattatatacaaatcggaggtgcctaaaaggttagcaacttcatcctccaatgttttttttggtcatattacatttggagctatgttttgcacacttttttgtttaaaaaaatttgttgtaagttgataagagagaaaatttgtgtgggaaaagaaagaatatacagaaattttgtttatttgctaaataaggttttataaaatagttgagtaggaaaatatagtgaaagttaatcttaaataaaagaaaacaaactaaattgaaaattaaaagaatttaaaacttaaaaaataataaataagaattatttggtggaatattttataatttttgtatgaataatgatatgtcattattgtatgactgttgaaagagtttgtgattattttatcattattgtatgactgttattattgtacgaatgattatttgtgtacgatttttttttcatttcatgtagatggatcggcaatggatgtacgctgaccggcggtccaaagagtttattgacggcgtgcattattttttgagagtggccgaagctaacaagcagaagagttttatttgttgtccatgcaataagtgtaagaatcagaaggagtattctgcatccaggactattcatttccacttgtttgagtcagggttcatgccaagctataattattggacatcccacggagagcaaggggttgaaatggaagaagatgaagtggaagacgacaatattccagactttgctcagtacgctggatttgaaggaaatcaaacgggcgaggaggacatagatgctgatttataacgacgttgcggatgatcttggtcagatgttgcaggatgccaaggaggactgcgaaagtgaaaagggggcccataaattaacaagatgttagaggaccacaaaacgtcgttgtacccaggttgcgagcaggggcacaaaaagttggataccactctagagttcatgcaatggaaggcaaaaaatggtgttagtgacaaggcatttggcgatttattgaaactcgtcaagaacattcttccggagggaaacaaattgcccgagacaacgtatgaggctaagaagatagtctgccctctaggactggaagttcagaagattcacgcatgtccgaatgattgtatcctatatcacagtgaggagtacgagaacctagaagcatgccctgtttgtaaagcactacgatacaagattagacgagatgatccaggtgaggttgacgggcagctaacgaagaagagaattcctgctaaggtgatgtgatatttccctataataccacggctaaggcgtttgttcaggaacaaggggaatgctagaatgatgcgttggcacgctgaagaacgtcaacaggacgggatgctgagacaccccgcggatggttcgcagtggcgaaacatcgacagaaaatttaaagactttggaaaggacgcacgaaacatacggtttggtttaagtacggatggcatgaatccttttggagagatgagcagcggccatagcacttggcctgttacgatgtgtatttacaacctccccccttggctatgcatgaagaggaagtacataatgatgccgattattattcaaggccccaagcaacctggtaacgacatcgatgtgttcctaagaccactggtcgaagatcttaaactgttgtggaagaaggaaggtgtccccgtgtgggacgaggacaaacaggaggagtttaacctacgagcgctgctgttcgtaaccatcaacgattggcctgcacttagcaacctatccgggcagtccaacaaggggtacaaggcttgcactcactgtatggatgaaacaaaaagtacgtatcttaagcactgtaggaaggttgtgtacatgggtcatcgttgattccttgcagcaaaccacccggtacggaagaaaggaaagcactttgaacatacggcggaccatcgtacgaagcctaaacatcgcagcgggaaaacagtgtttgctatggttaaagatcttaaagtagtgtttggaaaggggcctggcagccagcctatagagagcgaagatggtcacgcggcgatgtggaaaaaaaactccatattttgggagttaccctattgggaattcttggatgtccgccacgcaatcgacgtgatgcacctcactaagaacctttgcgtaaaccttcttggcttcctaggtgtatatggaaagtcgaaagatacactggaagcacgtaatgatctgaagcatatggaacaacgcggcgaccttcacccggaaccacaggagaaaggcagccattacttgagtccagccagctacaatcttagcaaggcagagaagaaaagtatgtttcaatgcttggagagcatcaaggtaccgtctggatactccacgaatataaagcgaataataagcacgaaggagaagaagttcacaaacctaaagtcttatgactgtcacgtgttgatgacacagctgctaccagttataataaggggtatcctcccagacaatgtccgggcaacaataacaaggctatgttctttcatgaacgcaatttcgcagaaggtcatcgatccggataggttagaagcccttcagaatgatgtggtgcaatgtcttgtcagctttgagttgatatttccaccttcatttttcaatataatgacgcatctgctttgtcacctagtgaaagagatcggtattctcgggcctgtgttcctacacaacatgtttcctttcgagaggtacatgggcgttctgaagaagtatgttcgtaaccgtgctcgtccagaggcaagcatcgccaaggggtatggaacagaggaggtcattgaattctgcgtagaatttattgaagaccttcgcccaatcggggtacctgaatcacgccatgaagggagactacggggaaaggggactctcggaaggaaagcaataatgacggtagacaacaatttattccgtaaagcccatttcacggttttacaacaatcttcattggtggctccttacatcgaggagcacttggctctagttcgcgctagaaacatcggtaagtccgatgcatggattacacggcatcacattgatactttccccgcatggctgcgacaatatctcatgggtaacgagacgattaaccagcaactggccttcctggcgaggggtccatctggctcgatcgcgacattccagcgatatgagattaatgggtatacattctacacaagagcccaagacatgaagagcacgaaccagaacagtgctgttcgtatcgatgccatgggacacgatggtacaactggcacgtattacggtgccatcgaggagatatgggaacttgactatggacctctcaaggtccctctgttccggtgccaatgggttaggttgactggtggaggcgtaacgattgatgacagtgggatgacaacggttgaccttaacaaggttggatactcggacgaaccttttgtccttgccaatgatgtaacgcaagttttttacgtgaaggacatgtctagcaaaggaaagaagggcaaagggcctgacgagccgaagcgccacgtggttctcccaggcaaaagaaaaatcgtcggagtagaggacaagactgacgaggattacgatcagtttgatgggcaaccccctttcacggtgatggttgaccctagcatcctcctatcaaacgaagacaccccttactcacgtagcgatcacaaggaaggaacaatagtgaggagaaagtacgtgcggacaaccgtcaccgccgatctattgccgtaattgttgtaaactattttggatgtattgaatatgctagttatatatgattaattataatttttaacaatttaatatcatgcatatactaattatatacgattattagaatttttaaaagttttaaatcatgcatgtgggatttacatatattagttacaatttttaacaatttaatatcatgcatatgctaattatatatgattattagaatttttaaaagttttaaatcatgcatgtgggatttacatatgttaattagaatttttaatgcattatttactattttagaaacacatatgcaacgaaatttaatattcagtgctattaactttagtcccggttcttaaccctaaccgggtttaaaaaataatttggaaatagcgggaaaatatctttactcccggttggtgaga

SEQ ID NO: 22600 - DNA, 6842 bp, Oryza sativa
aaacgtgaacgaacgcgaacgaacgtgactgaaacgtgaacgaacatgagtgttagtgaacgaacgcgaacgaaggtgaacaagcgcgaacgaacgcttaacgaacgcgaacgaaacgttaaagaaacgtgaacgaacgcgaacgaaacgtgaacgaacgtgaacgaacgtgactgaaacgtgaacgaatgtgagtgttagtgaacgaacgtgaatgaaacgcgaacgaacgtgattgaaacgttaacgaacgtgaatgcacttgaactaaaagtgtgagaacgaacgcgagcgaaatgtgtacgaatgagataattaaactattgttgaacttagcatatatatatgattatatatacttgaaaacgttaaatacattatatgttcctttgcatttagactaatacattttttttgcatgttgcagagaagacgacgtcgtcgtcgtccctcaagccgaagtggtagctagccctcgaaggaattcgcgcaggcaagtgatgtaaagatgtgattgttagagatataatataagattgttggatttctaatataagattattagattattagagttagcatatgtgagtgttagagattattagattattagacttagcatatttgagtgttagagatagttagagatttaatataagattattagaggtttaatatacgaaacttaattagacttagcatatgtgagtgttagagatttaatataagattattagagatgtaatattcgaaacatatttgattgttagagatttaatataagattattagagatgtaatattcgaaacttaattagacttagcatatatgattatctaccgtacaaatacatgacacttagacttagcatatttgagtgttagagatagttagagatttaatataagattattagaggtttaatatacgaaacatatttgattgttagagatttaatataagattattagagatgtaatattcgaaacatatgtgaatgttagagatttaatataagattattagagatgtaatattcgaaacatatttgattgttagagatttaatataagattattagagatgtaatattcgaaacttaattagacttagcatatatgattatctaccatacaaatacatgacacttagacttagcatatatgattatttgagttttaatacaagattagtagagtgttaatattacgcttagcaaatatttcttctatgaacagatggctgatcgcgatgaggaacagatactgtacgatataatcgcatcgggaagcagccagtactggaacgaggaagaggggaacgaagatccaaaccagtacttgaacgaggaggggaacgcagagagggatgcagaggggaacgaggaggggaacgtggagagggatgcggaggggaacgaggaggaggctagtggaagtcatccctccgctggacagaagagggcacgcggacaacgaggtgccgcgaagaaaatagagggtcggcacatcataactgaggtggacgcagacggccgacctagtgccccggcacaagcagccaagaattttgtacgccacagcggttgggttgtgagggataacgtgcctgtcagcaaggtgtactggcgcagaacaagggcacgcgggggtgatgacagcttcatcccggaatcagagaaagagatgctgtggaccacaatgctcgagacgttcacgctccctgcgggtacagagaacatagtgaaacagtggactcttaagaaaatggcagaacagttccagaccttcaagggagatctgtaccggaaatacatcctgaaggagcagacaccgaacttcgacgtattcccgaagctaagggatcactgggacgagttcgttgcttacaagacaggtcaacaagggcaaggcgatgatggaaagaaacaaagaaaatgccaccaagaagaagtaccatcaccacttggggtcaggcggctatagcatcgcgatgccaaactgggaggagatggaggcaagcttgcttgagaggggtatcgaaccgaccaccgctaagtggcctgatcgatcgaagttctggtactatgctcacggtggaacgctcagcccagttgatggctccttggtcttcagcgatcagatacgcgaggctgcgaatcgactaacggacgcagtcgaagcctcttctcagggcacgttctgacccgacagagagaaggacgagctgtcactcgccctacagactcccgagcatccaggacgaacacgagggaaaggcgtgattccctggaagatgggattcaaggaggacatccacacgtataggagtcggatgaggagcaagagagatactgaggcgaagattgcagatcttgagtacagggtatcgagctatgagctcagcaagcaagaggaggtggcccggaaggtggatgaacgcatggcagcacatcggtcacacgatccccagccgtacatacctcctccaatggtcagcccatcaggcaatcatagcagctgcgcctcaacggggcaggtagtatcacatagcatggacgccatgcaaacccaggatgaaaccacctgccccgttgatgagatcacgcatcggacaccatgtgagctgcatattcccttcaagaacttatcaatcaaggtatgctcgatgtaatatatgatttttgactcgtacgttccgcaagttgctgcttatgttgattactaatagataacttctcatcacgtgaaggtggcgtcgggaatggccatcccaacggacatttcagggacttaccactgcagaccgattccagcaggatactcgagggtcgaagttgagctggtggaagccgtgtacgaggacctcgagttggactacccaggaggagatggtgagacgcatctatgagacacaagccacgccattatactatggcgcaagcggtacatcatcctccctgggcgacaagcggcgtctcgtgcaccatctcctccggctccgccgtctcctcctgcaccatctcctccggctcctccgccacctcctcctgcaccatctcctccggctcctccgccacctcctcctgcaccatctcctccgcctcctcctccaccgtgttcgcctgcacctcccaagacaaggtctcgccaagctccacctccagccagcacaagggcaatgaagaaagccaaagttgacaccaccaaaaacaaggagccaccgtacggttgcagtcaagaggagcttgacgcttatgtggcaggagaagtgaagaggcaactcaagcctcagagtcctgaaaagaagatacctattgacccgagcgtgaagaatttcttgaagggaatgtccaccgcaaacaaggaggccttaaagctctcggactatgaccgaacacttaggaaagcctattacaagaagtccaaaccagttcctcaacttggagaacaaccacaccaagtggtcgagccgttggtgaccggcgaagactttggcataacggatttcatttcggacaccggtctaaccatggctcagttggatggaggcgcaccaatcccgaaagcggaagtggcatacaagtttgagctcggtaaaccgcttgtcaggcctgagcagctacagtccctaccgacacaaatgtataaattccatgaacggtacatggaaatgagcgccaattgtagagagatgttcgaagcgaggatcagaaaccccgacttcttgcaaggagaagatgttctatggatccatttcaaggatgtcttcgatctgtaccatcgggatgccctcgacgtctctcttctgagcgcatggattttgtaagtatctttgagttcgatttgtttcgttcaataattagctcctggcatatatgtaagcaataataattttctttcattgttgtagaatggagattcaaagggcccgatggcggagggtttacgatactgggttcatcgaccctcgaaaaatcaacaccgaaatgctcgacaagtacgaaaaagacacagaggacaatctcgtccatctcctaacgcagcagcattacaagacgttcatactattgccgtacaacacagagtgagtttttattgtcgttcgaacaaatttcattcccatacatatcacatgtacattctgatatttatctcatctcacgcatattccagattccactgggtcctgttctttttcgacttggacgcacgcagagtcactgtatatgactcaatgaataaagaggagaaggtttttgacaaggtcttccaactgatagacaggtaatataatgccatctattccaaagtcgcgggactctgttgctattatgttgatctcgggtaatatttaattaatcatagcttgcaactgcacatgtagggcttgggatcggttccgtcaattggtccgcgggacttggaaagaaaaacttggatggaggtttcattttccagtgagtacatgcatgatccaaaattatattgaattgaatctctagttacagttaatataaagagtatattaaatctctcattgtttctcatatagtgtgcaaagcaggacaagggaactaacttatgtggctactacgtatgcgagtttgcccactgcctatcaaaccaaatatacaccacacgagagctcgatgtacgtatacataaatcattcaaaatttcattgtgtatcgatttgttaagttgtttattaatttcatatattgatatgtcattatttttcgaatgatagcgtattcacatgagggaaaaactcccacacaaggattttatcacggctgttcaagaacaactgatggggttcatcaacgaagaagtccttaatcctgatggtgaattctactacgacggatcgacaattcgtaacgtcggtccttcctcttctgacgtaacgcaggcgttgaagtcgtagctatagctagcgagcaaatgaattgtactatacatgcatgtatatatatatatatatttatatatgtaagtacatttactttagtgttaatatatattttggtaacatatatgtacataaaatgttaagtgctttaaattataaatatgtgtgtaatatatgtatttatacatatatacatacgcatatatatatatatgtattctatatacatgcataatatatatatatatatatatatatatatatataggacactcatatggggcaccatggtgcccgggcaccatggtatgaaatacacaaattcgcccaaatgtttcaaaattttcaaactgtgagtatatacctacttataagtattcatttcatacctatacctagcaacaaaacaactcaaatttaactttatttcacaatccattattacatacctaactaattatatgtttggatgctatatacctaggatcaaaatctaacaaaagtaagtttgaatttagtaaatttcaatcatggtgcccgggcaccatggagcaccaaacaaatttactatatatatatatatatatatatatatatatatatatatatatatatatatatatatatatatatatatatatatatataatcaaccatgtagcaaacagggccatgcaaataaaaaaatggtacatagatctttagtcccggttatttcacccgggactaaagatcgctaactttagtcccggattcgtagtcccggttggacaaccgggactaaaggggggttacgaaccgggactacaaacgatttctccaccagtgccagtacacgtccaccattgcaactgcctccatatgttttttctaaaaactaaaccaacaagagaactacctattatatttcaattaagcaggagtaaaaacctagatagggttacagaaaaagaaaaaaacaaccactcgatgagtagaacgctaagtccctcaaccgcggccggtacaaaccacatagcacacggagcaccacacaactctagccaaactaccacggcggaatccaaaggcgagcatcaacgtcaggatgctgaagaaacggcacacggctttgacatcacaaggcacatgtcatcattgccaagcttgccgcccagcgaccaagcagttccgacttcacggcgatcacaacatcattggaggtaccgccaaaacgagcaaaacaacaccaagctcacactttggacatcagccaaagcccctggggcgccaaaacctacactggcaacaccaacattccttgagagaaactgcaaatgttatcgttgccaagcattgtcgcaccctaacgacatagtagctccgactccatctgacagagacaaacgaagaagctggatgccaccaatacaagaaaggaacctaggagaaggcctcgccaaaacctaggcatctagtgcttcgagctgacgcgggagtccaccaacagcaatcaatgcaagggtaagtttctccaagacgatgcccccataaaggatatgacgtgaaacgctgccaccgcctgtacgggaaccggaacacagttttcacctggagaattggtagcgacgaagaaaaacgccatcacgacgcctccaagaagggaacgacgccaaagacgccgttgtcgtcacgctagccaagggctaagcaaggctttcgccagcgattttcatccattaccaccaccacccccacacaataaccgttgccgcaccaccacgtcatctcctcagccaccagctggcccagttcaccaccccacaggtcctccccgcacacactagccttgtgacgtcaccgccggtacgcggccctccacagaaacaggtaaccgtgcaactgtccaccatgagctccggggccacaaggggacaggcgaagg

SEQ ID NO: 22601 - DNA, 6844 bp, Oryza sativa
ccgtcgagcgcttccagggccaccggcactccacactccgcccggctcgccgcgctctgcccacctccctcacgctggaggggacgcgtcgccgcggtatggccccactgccgccatcccagctccccgccctgttgtccggcggcgaactccggcggcggcgaggtagagagaggggaggagggtgggtggcggcggcggctagggtttgcccccgagccaccgcacgcgtgagcgactcgtgggttgtccgagcatatacaagtaattaagtggctagttcagaaaccgcctccatatgtcgatcgtccctagaaagtgcaatagtaaagcttccacaatggctatgtgttaacaaccaaatttggtaatctaagtatcggaggtgaagactagatcgaagtggaatccaagttcgagatcgtatcggaaacagagcaaggatcggctggactccaaatcggctacaaccagatcggctgagtccgagtcagaaagggagagccgatgcagccgattccgacaatacgactcggtgtacatcgtcgaattgagttaatgtgcttcacggtgattgccgcgcaaggatggagtcctgagaaggcaattgtatctattaattaggatattttatgtaatttacctagagatatgtttggtcaaaagtctgccgtaaagacttatggtatcttagagtttgttagagataatagtcgtgtccggtatggacatatcttgtaattctcgggtataaatagaccccgagccttatgtaaaagaaaacacacgttcaatacaacttcggcgcattgccaccctttttacttgttatggcggtttgcgttctcgggattagtgcttccatctttatgacactctaatcttgtttgtgtaatccgtcgagttatcatatatcttacataatctttagcaatatcattatctaacctacaatcggctagtatctgtcggtggagtacagccgattcggttagatattgacgttgatttagattatataggatatccaccactctatgaaacttccagcggcttgattgtctagatattgttcttcttttcatacttaatgctgcatcagttgagtttgatttattaagtcgtgcttagaatatcaatctctagcctgccttctggttgccgattagggtagtatcggggtttcagccgatcttgcctgatttaactacttttattctatatgcttgattgatacgttaaatccgccctttatgttaagatctcattgcattcgagtatattaggcttctgtttgatatattttacttgctttaatatcttgatatagagtagtattggagtattagccgatacatgctagatctatttgatcggctatgctataaacatatatagccctgttattaatatatatttcaatctaagtgatttatactgtctcggcatggcgtccgatctatcccaatcacttgacttaagtatatatcgatatagggagtatatatcattaatatctacagccgatcaagtaggtttagtttcttcttatttattcatgactgccgatcgatgcctatatgacatcggctcaaagataaatgatatgtcatcggcacctagccaatcggctatcgtttataggattaatcgcggtttctttgtctttatttcttgttgattgcaggatcaaatcaactggcatgctcatacacccgaaggcgagttttggacctgcactggagttaagcagatctcccaggccgccgtgttcgatttttacgtcaacacgcttttggcacgcccagtgggaccgattagaagtcagaagacaatttccctcgtggctgagaagctgccaccttcaccatcctcggctagcccagggattgttaaggaaaagatccagaggcaaggcttgggggacatcaacgaaggaaacattgtgactgttgacccagaaaagttcacacctgatcaaaagaaggattttgaagcaatgatgcaacaagcgcgagaccaattcttaaactcattcatgcagactcgcaagggaacatttgttcagaaatacaaggtgaaagtagttcctgatgaacctgagaccagtacttctaaggaaggagaagggaagaaagtctcagaatcggctcaaccaagtgacaaaggtgctaccgacggctcggctcaagagaatcagggtgacaactctcagggggtacatggagttcaaggtgatggtgttcatgggctgcaaggaggaaatcttaatcaagacggcgagacaacacaggatttcttcaacaactttcaagatcgagtggattatgccgtgcacaatgctttgatcaatcagtctggagtattagttaacaccttgtcaaacatgatgaagtcaatagccgacggatcaatagccgagcatcaggctgtaggcccgatttatttacaaggaggtgtctttccaaactatcggcctttgatcaccggcgctcaaccgtctgtacaaccagttcctcctattgcaccttcagctcagccgacagcaccaccgttgactcctttacctgctccagcagcatcggcaccaggacagccgattaatcctcgactattgatgagggagcagccacagcatagtgggcaggcgacaaatcagctgacacaagacaaggttgctgctatgtttttacgtcctcaacctactattgatccagtccagcaacagctgattcaacagacgccgccaagacaccaggttacacagccgattcagcaaacaccaacaagacagcaaaccatccagccgattcactagcaaggcttgatgaatcaatcggctggacaatcggctggacatgccttgactcaggttgttgttccagagcatttggttcaccatatgcagccagatgttacggcaatgcctcagattgtacctgagcacttggtgcagaatattcaaccgaattaccagaattaccaaggaggcaatttgagttatcaatatcgacctccttctccacaagtccaatatcagcaagaggggctaaaccagccttagcttactccttagtataatcagttcgaaccgacgcagcaacaatcgcaaggagcagctcagcaacgaccatgggccgatgtgattgctgacgtgatgagggagcagtttgggcttaaaccgaaggatactggaaacttgtatcggcaaccttaccctgagtggtttgaaagagttcctcttcctaacctatttaaagttccagatttctccaagttttcgggacaagatggtgtatcaacttatgaacacattagacgattcttagctcaatgtggtgaggcatcggctgtggacgctctgagagttaggttgttccggttgtccttgtcttgttcggctttcacttggttttcttctttgccgtatgggtcaataaacagttgggtcgacttggagaaacaatttcacagctatttctacagcggagttcatgagatgaaattatccaatttgacagcgattaagcaaagacataatgaacctgtggatgagtatattcaaagattcagggagatgaggaataagtgcttcagcttgagtttgactgatgcccaattagccgatttagcctttcagggcatgattggtccgattaaggagaaattctcatctgaggactttgatagcttgtcacatcttatacagaaggtaacattgcatgaacagaggtttgcggaagctaggaagaactctaagaaggttaatcatgtgtgtcctttcatgtacggatcggatgatgatgatgatgactctgagatagctgcagccgaatgggtaaggagtaaaaaggatataccgtgccaatgggtgaagaattctgggaaagaagagaggtatgattttgatattaccaaggctgacaagatttttgatctactgcttcgagaaaagtagatccagcttcctcctggtcatacgattccatcggctgaggacttgggcaagaagagatattgcaaatggcataattctgggtctcattctactaacgattgcaaagtgttcaggcagcagattcaggtggccattgagggaggcaagatcaagtttgatgattccaagcgactgatgaaggttgatggtaatccttttccagttaacatggtgcacacagctggccgaacagccgatgctagacgtacgagaggttttcagatgaattcgaccagagttataaataagtatcagagaaaatacgacaagcagcaagagaggtgttatgaagaggatgatggtagtttcgatcctcattggggctgtgagttctttaggttctgctggaatgagggtatgaggttaccaactattgaggattgtcctggatgcggtgatgttgcggaaagttcgagccgatcatacaatagaaataatcggctgaagcaaacaagagtccctgttcatcaaaggttgggcccggtaaaccaacatagtttcttggaggatgacgaagataggaagattcagtggtgtccttctggtatttttacaaagaatcagaagagaagggtgcaaagcttgaggaacagggaacgctttcaggaggtcgagcaagaaattaatcatcggctaaggaaggcaaaaccgaagcaggagtggcgtgttaagggtcaagcttttggggccgatgatgtcgtagccgatgaggcagagatgttggcaaaagggaaaagtgtggtaacagcatcaattaacatggtttttaccttgccagtcgaatttgggatcgatcaggctgatgtcgatgaagtggaagaggaatcggctaagttggttctatcgtcagaacaggcagtctttgagaagcctaaagggacagagaatcggcaccttaaaccattgtatataaatggttatgtcaatgggaagccaatgtctaagataatggtcgatggtggggctgcggtaaatttgatgccttatactatgtttaggaagttgggtagaaataccgaggatctcatcaagacgaacatggtgctcaaggactttggtggcaattcatcagaaacaaagggtgttctaaacgtggaaatgaccatcggcagtaaaactattcctaccacattttttgtcatcgatgggaaaggttcttacagcttgttgcttggaagggattggattcatgccaattgttgtgttccttcgaccatgcaccaatgcttgattcaatggcaaggcgacaaagttgagattgtgccagccgacagctgattgaagatggaggacccaagctattactttgagggcgtcgtggagggtccaaacgtctacaacaaggacacagtagatgatctcgatgacaagcaaggtcaaggtttcatgtcggctgatgatttagaagaggtggatataggtccaggtgatcgaccaaggctgatattcattagcaagaagttatcttcggagtttaggaccaagctgatagagcttttgaaagagtttagagattgcttcgcttgggaatattatgagatgccaggactcagccgatcaatcgttgaacatcggctacctctcaaaccagggattaaaccacaccagcagcctccgaggagatgcaaagtcgatatgcttgaacctgtcaaggctgaaatcaaacgtttgtatgatgcgggttttattcgtccttgccaatatgctgaatgggtttctagtatagttcctgttgtcaagaaaaacggcaaggtgagtgtcgcgaccgagaaaatttgcattttcccgaacgctagtgtattaatccccgtcccaggaaaagccggggtacaccacacaaacatgatataaaagacacatctttattatatcgataatatttacattattacaaaggcacttcgggcctgatgtcacgtcccaaaacgactctaaaatacatcctctaaattatgcctagaataattaaaatccgtgtgaaagcctccaacaattaaaatgtgcaaagttaaaagtcaaataaggcttggaggatttttgtatatttcctaaaagcctaaaatgcgtaaataaattttagtggaattttcagagcacaaataataattattaagaaataaacaaagttaaaatggttttataaaaagaaaagctctaaaaagtccctttccccccctctccctcttgggccggtttggcccatctccttccccctccctctcctctccccgcgcgcgccgctgacgggagggcctgcccgccaccctcgctgacgggtggggcccacccgtcatccccttcctcccgccggtcccgccgacttccccgcgccctagcgccgccgccggccggaatcccggcgcctcccgccgttcccgtgcgcaataaagtggggggaattattccccgggatccccttcccctttccccccatttttccctccctctctcccttggattcgtttggaaacccctcccctaacctcgccggcgccattaatagcggccgggtctcccgcacccgtttccccctcttccggccgccctctctcactcctaaccctatataaaccctccccgagctccccccaccgtttccgccactcaccgccctctctcccgccggaatcgagctcgcgccgtcactctctctctccgccgtggccgccgagctccggtccgccgccgccatcgccccggaccacctcccacctcggcgccgcctccttcggcttcgccgcatcctcgccgacctcgtccacctctccgtttcggtcgccgaccgccggagcaccgtcgaccctgtccacccgagccgcccgccgccttcctccggtccggttgctg

SEQ ID NO: 22602 - DNA, 8532 bp, Oryza sativa
gggtgcacccggtccaccgtggaccgtggggctgccgcgtgggccccactcccgtggacccggtccgcgcgcccctatcctcggctgacgcaataaaccttttttttaattaaaatttaatgaagaaattcgcaaatattcatttaaagagcatataaacttcaaatggccataacttggccatttgaactcggaattggaccgttcaagtctctaatttttccttaagaagtcaagaacccatttttgtgctttgttcctgcttgttatatggagtttattagagtaaaagccttttcttttccgttggtcgtgtagacgctgcagcttcggaagatccgctcttcgtggaagttgaagccgacgtttgggaaagcgaacaaggcaagtcacatcatccttgaacatattgaatcctagtttataaaattattttgatttaaattattgcagtatcgctttatttaaattcctgcgttatcactgttttatctagccatgcctatttacctttgttatgaccctattattgttattgttattatttccttgttcaccctagaataaacaaaaccccaacttgaagaaatgtcacatggcttctaagcttaaatcaatggaaatggaaatctctaaaggttttcttgtccatttcattatgtcatctctgccccaggagttttctccatttacgatcaattataatgcaatgaagatcaagtggggcattgatgaattaatagctatgtatgtacaagaagaggaaaggcttaaggcagaaagagttgaccatgcaaatctatttaaacactccaagaagaaaaagtataagaaatttaagaaggagtatttgaagcctaagcctagtcaatttaaagaaaaagggcaatcttcgaatcaatcccagcagaataaatctggaggaaatccctatacagaagaaaagggaaaagaaaaggatgggtgctacttttgtggaaagagtggacaccgccaaaaggactgtattgggtttatgagatggctcagtaagaaagatactgatgttatttcttttgttgatgaatccctaaatattgattatgccaccaattcttggtggattgactcaggagcgacaattcatgttgcaaattccttgcagggattcgctatgaggaggacactaagaagaggggaaagaagaattagagttgctaatggagaaagaatctccacccacggtgactgccaacgaggtcctctcgggtgagccagtgaggaagactgcagtgacctcccaagcagcgtggggctctgcatcgtcaccatcctgctccgggagctgcttgccctggtagtccactccatgcggataccccaggacaacgcacatgccccgtagctccaaaacaaagctagtcaggtccaggccacgacggttgatgctgccggccatctacaaacaaaaacaaaagagaaaagcaacattttaaagatcagattttgacgataaatgaagcagcaagacagagagagactagaggattttcacaaataagaaaggatttttatttcgaaaatattgctaaggcttgggatctaaagctcgtcctagggtcaagggggctctgataccaacttgtcacgaccggaaataacccaacgagcgttccttacgtgcgtgtattattccttgtcccaggaggcaaggtacaccaaaagttgatacatttcagagtttatcaagcggaagcataaataattaatttattacatgggcggcgagaggtggaaacggacgggagaagcacggggagggtttatatagggttggaagggggagaggccggccggaggggaaggaaaccggcgcggcgttctcgggctccatcaatggcgccggcgggattaggggagggtttccaaacgaatccaagggagagagggagggaaaaatgggaggaaagggagaggggatcacggggagtgattccccccactttattgcacgaggggacggcgggaggcggcgggattcgcggcggcggcggcgctagggcgcgcgggaggcggcgggataggcgggacgaaggggatgacgggtgggccccacccgtcagcgagggtggctggcgggcccgcccttcagcggcgcgcgcgcggggaggtgccgagtgggccgcggggagaggagagagaggggagggagatgggccgagccggcccaagagggggagggagggaattttaaggtttttctttttataaaacctttttaactttgtttatttcttcttaattattatttgtgctctgaaaattccactaaaatttatttacacattttaggcttttaggaaatatacaaaaatcctccaagccttctttgacttttaactttgcacattttaattgttggaggctttcacacggattttaattattctaggcataatttagaggatgtattttagagtcgttttgggacgtgacagtgaccgaccgggaaattcttcccgggtgcacacgagtgaggacaaagtgtgcaaaaaagacatgtgttggtttgtgagggcagtctatgacctatgaaagctatcagatgtaagcgggcctgtcctggggaaggcgggacattacagtattatagccctgccgttcctatagaaatccagggaatcccttttccctcggatttgattcttctggacaccaagaacttggatgtgatccttgggatgaattggttggctcaattccaaggagtagtggattgcgcaagacgcactgtcactctgtaccgagggctggaacaaccggttgttttctttgcacccccaacctctgtcggcagttccgaacttcatcagattggactgtcggaaacccccatcgtcagagagttcagagatgtgtttccggaagaactacccggtatgccgcccaagcgagagattgagttccggatagatcttgctccaggaaccactcctctgtacaagcgaccctaccgtatggcagcaaatgaactggccgaagtcaagaaacagttggaagagttgaaagaaaaggggtatatacggccgagcacttccccctagggtgctcccgtgatttttgtggaaaagaaggacaagacaaagaggatgtgtgttcactacagagctctcaatgaagttactatcaaaaacaagtaccctcttccccggatcgatgatctgttcgatcagcttaaaggagccactatcttttctaaaatcgatcttcgctccggatatcaccaattgcgtattcgtgaagaagatatcccaaagaccgcattcaccacgcgatacggactgtatgaattcacaatgatgtcgttcggtctgaccaatgctcctgccttcttcatgaacttaatgaacaaagtgttcatggaatacttggataagtttgttgtggttttcattgacgacattctggtgtactcacaatcagaggaagaccatcagcagcatctccgtctggtgttgggaaagttgcgggaacaccaactgtttgcaagctcagcaagtgtgagttctggttgtccgaagtcaagttcttagggcacgtgatatccactaaaggagttgctgtggaccccgaaacagtaaccgctgtcactgattggaagcaacccaagatagttactcaggttcgcagctttttgggtttggcaggatactaccggaggttcatcgagaacttctccaaaatcgctcgacccatgacacagttgttgaagaaagaagaaaaatttgtgtggagcccgcaatgcgagaaggcgttccaaactcttcatgaaaagctggtctcctcgccagtgttgatcttaccggatactcgcaaggactacctggtgtactgtgacgcttcgcgccaaggattggggtgcgtattaatgcaggaaggtcatgtggtagcctatgcctcacgccagctacggccccatgaaggcaactaccctacccatgatttggagttggccgctgtggttcatgctctaaagatctggcgacactatctcattgggaatcgctgtgaaatatatactgatcataagagtttgaaatacatcttcactcagtcggatctgaatcttcggcagaggagatggttagaactcatcaaggattatgatgtgggaattcgctatcatcctggtaaggcaaacgtggtcgctgacgctctaagtcgaaaaagccgttgcaacactcttggcgtccgtggcattccaccggaacttcatcaacagatggaagccctgaacctaagcatagttggtcgtggattcttggctatgctggaagccaagcctaccttgctcgatcaaatccgcgaggctcagaagaatgatccagatatgcatgggatcctcaagaatatgaaacagggtaaagccgctggtttcacagaggatgaacacggaaccctatggaacggaaatcgggtatgcgttccagacgacagggaacttaaacagctgatactttaggaagctcatgaaagtccttattccatccaccctggcagtacgaagatgtacttagacttgaaagggaaatactagtgggttagtatgaagcgggaaattgcagagttcgtggccctttgtgatgtgtgccagcgtgtcaaggcagagcaccaacgaccggccagacttctccaacctctccaagtaccagaatggaaatgggatgaaattgggatggatttcatcaccggacttccaaaaacccagggcggtcatgattctatatgggtagtcgtggaccgactaaccaaggtagctcggttcattcccgtgaagaccacctatggagggaacaaactagctgaactctacttcgctaggatcgtgagtctccatggcgttcctaagaaaattgtatctgataggggaagccaattcacctctcacttctggaagaagctccaagaagagttgggtacccgattaaatttcagcaccgcgtatcacccgcagacagatggacagaccgagcgtctaaatcagatcctagaagatatgctccgtgcctgtgttctagattttgagaagacctgggataagagtctcccctatgccgagttctcctacaataacagctaccaagccagcatacaaatggcaccctatgaagcgttgtatggccgcaaatgccggacaccgctattgtgggaccaagttggggaaagccaagtgttcgggactgatatcctgagagaagctgaagcgaaggtcagaaccatttgggataatctaaaggtggcacagtcccgacagaagagctatgcagataaccgacgccgtaacctggaatttgcagtggatgactttgtgtaccttagggtcacgccattgcggggtgtagacaggttccagacaaaagggaagctcgcacctcggtttgtgggtcctttccgtatcattgctcgacgcggagaagttgcttaccagttggagctgcccgcctccttgggcaacgtgcatgatgtgttccatgtgtcgcaactcaagaaatgtcttcgagtgccatccgagcaggccgattcagagcaaattgaagttcgcgaagacttgacctacgtggagaggctagtgaaaatcctggacaccatggagcgcaggaccaggaaccgggtaatccgtttttgcaaggtccaatggagcaacaacgccgaggaagaagctacttgggagcgtgaaagcgagctgaaggcagcccatcccgatctcttcgccagttcttccgaatctcggggtcgagattccgtttaaggggggtaggtttgtcacgtcccaaaacgactctaaaatatatcctttaaattatgcctagaataattaaaatccgtgtgtgaaagactccaaaaattaaaatgtgcaaagtaaaagtcaaataaggcttggaggatttttgcatatttcctaaaagcctaaaatgtgtaaataaattttagtggaattttcagagcaaaaataataattaagaagaaataaacaaagttaaaaaggttttataaaaagaaaaaccctaaaagtcccccttccctcccttgggccggcccgacccatctctcctctccccccctctctctctctcctctccccgcggcccactcggcctctccccgcgcacgcgccgctgacgggcgggcccgcccgccaccctcgctgacgggtggggcccacccgtcatccccgacctcccgccgctcccgccgcctcccgccgaccgcgccggcttggccgccctcgggcgcgccgagtggctgccgcgtggggcccggccgtcagccgcccgcgccctcgggtgcggctgacgcgtggggcccacggcgccggccggtgcgagcccgggtgcgcccggtccaccgtggaccgtgaggctgccgcgtgggccccactcccggggacccggtccgcgcgcccctccccctcggctgacgcaatacacccctttttaaattaaaatttaaatgaagaaattcgcaaatattcatttaaagagcatataaacttcaaatggtcataacttggccatttgaactcggaattggaccgttcaagtctctaatttttccttaagaagtgaagaacccatttttgtgctttgttccatcttgttatatggagtttattagagtaaaagccttttcttttccgttggttgtgtagacgctgcagcttcggaagatccgctcttcgtggaggctgaagccgacatttcggaaagcgagcaaggcaagtcacattatccttgaacatattggatcccatcttataaaattattttgatttaaattattgcattatcgttttacttaaattcccgcgttatcactgttttatttagccatgcctatttacctttgttatgaccttattattattgttattgatattattaccttgttcaccctagattaaacaaaaccccaactagtggacactctactcatggtaccactagtatgaatttaggtagatgcttcgccgcttaattaggtaacattaggtggttttacaactctagactttgggaatattcatatcacctggacactatggaatggttggattattgaggaattggattcacacctccccctctattcaaaaccctcaaaatggttttaggctgggctcagggtgcatggttttgatagtagcacctcggccatataaggaccggtcttccggcctctgttgcaaagcactaccgtacttccacatgtctagtgggtaaggcttagtttgtggctcagtctggttataaacaaaagtacacgaatggagatggatgaagtcgggggtcgatggacatctctagggcaaatgaaggctacacgagctgcagcccggtagtcgagatgtcatggcacagggccggtgtcctactgctaggggctcagtcctgcctacctgtcccggaggttccggccgtaggtggggttggatcggtactcttgtctatggctaggatgggtaaagatgtacacctctgatcagagtataacctattcgaatagctgcgcccatggttatgggcaagccgagcaatgtacccaagttagtgttttaattcttaaatcctgctgaactactaaaatgtggaatggttggcctgggttggcttgggacgagctggaacccagggtcgggttgccagttcggtctgaatcatcgtaggccttgggttaaggcaggttcgtgtgggttcacggccttgattaataatattgtatagctctagaatggtgtttacaaaatagctttgagcaactaagtgtcttttaatgctgtttactgcaaaccctaaccctttatattataacccccttgtactcccttgcatttactctgcacttatgggtgtgtcttgttgagtacggtggttgtactcagtcttgctcaatttttcccaaacctagaagaggagcccctggatgatgaaggctttggtgtctagctcgtgcctgccgtcaagcgcctgtggtcatcgcagtcttccgctgtttcccgtttgtctttgtgtgtgctgggccttcgccgcccatgtaataaagtaactattcacgcttccgcttgataaactctgaaatgtatcaacttttggtgtaccttgcctcctgggacaaggaataatacacgcacgtaaggaacgcccgttgggttatttccggtcatgacaccaggtgacatcggctaccatattacttcttctaatcagcaatctcaatattcctcttttctaggttttagctgatatgttttcttttgacatcaggcaatttatggaagaagaagaagaagaagaaacaacaagtaaagtcttggtgcctctagccgatgatgtaaaagcaaccttgctagatatctcgaaacggcttgagggctccctagaaactctagtgactagctgtggatctatcagggatagatttcatgaaatccatgaccaaattccggatgagttagccgatgccatcacgccagcggcatacctcgagcagcatcgg

SEQ ID NO: 22603 - DNA, 556 bp, Oryza sativa
atggctatacaaaatgattgctggctgcagaaggtcatccagcaataaatatggccaacttttagaagagcattccagcactagcaggtcagtaaataatgcatgtacacaaagtacacaaggcatccctgccaaaaagttctaagatgacctcattttcttttgctttcgatttgggcttgatgattccttgaaagctgaagggcagatgttgtttatgccgcacatgtcacatttgggcctaagtggagtacagattgtttgcccaaatccaacctgcatgattttaaaaacaataatttcaatttacataagacttacatttctgcagtttaggtaggattcagatatgtagtgttaaaagcaaatgacactatcttatgtagttatttacatggtagaaattgaacatcagcggtggaaaaaagaaccgattcataccagtaatgggttgataggttcccactcatcctttggtagccacttctcaagagacattcttgtttgctcgggtgttgtagttttctgagcaaagtaaacaaggggcaatttgtca

SEQ ID NO: 22604 - DNA, 920 bp, Oryza sativa
aactggtctagctaccttcaacttcagcacatctgtttccttggtctgtccaacatgagtgcaaaatttaggaaacaacttgccaaacccaggattatacgtaatagagaaaattcaaacttactcttgaaggatttaagcagcaagaaacacaatattcataagaatcacagcactgtaaatcgagtttgcaacccctggttggtgccatgaagattgttaaatttataactgtacccatttattgcggtgcagagctgaaagtgaagtgagcaacaaaagataagaaactcactgacaggaaaaacgtgaccctgttcttgggcaacaccgagaccatggatcgatagataaggaagaacatacataacctaaaaaggaagtaattatcagcgggggaagtctagaaggcaaatacactgcttaccaggcagtatatgtgagcaaaatgagatgggcagggtgtcctaccattatcatctgatatcaggtgccgcccttgcacagtgctcctgcacatgatgggtgctgcaagaccaatgtccttcctgcacaatattcaaaatcaagccgcatcattagatatactgaaataaatactccaacatccatcctatattcaggatggaaagaaagcatgaatggcgtaacagtttgggcacgctaataagcttgacacacatgggtcatgggttcaaaggccacatgatgccatatacaatgaactctgtcccaggctactcccagttccagaattcagttgaaagcacaattagataagacaacccgttaactcgtagtctcgtaccacagtatttaactgaacacctgcacttctataactctattctgcactttgtagaggtcatgtattagtcagcaagaaaatgtaggcacaaaattgcattttgtgcactggt

SEQ ID NO: 22605 - DNA, 638 bp, Oryza sativa
tttgagggtgatttttttgtgtgtgtgtgtgtgttcttgatttttgtttttaatttggtttgttccagattcctgacggaataatgggtgagaccatcgccaaggatgtcaccgaggtgagcgagcgccaaaatggtttcttgttcttcatcgtggtggcatttttttggattggtattgggatgtgatttgagagagaaaaagaagaagattgaatcttttttgtgatgtgctgtagttgattgggaacacgctgttggtgtacctcaaccgggtgacggatgggtgcgtcgggcgcgtcgcggccaagctcgagtccatggagccatgctccagcgtcaaggataggtgaagctctactgaaatttatcatcttgtcatgttagggtggtggattatgtctgaaaaatcggttatttgtggttgtttccggaatggagatgtgatttttctctgtttagttctcagctgtttatgattagagctcttacttgcatcttggattttgagatgaaattttgatgtgtggttgtgttgggtttgtacaggattggatacagtatgatctctgatgcagagcagaaggggctgatcactccaggcaagataaggattttttttaatgatttcggtgttct

SEQ ID NO: 22606 - DNA, 736 bp, Oryza sativa
atccccgcaacagtgcttttcgattttggtgctacacattcatttttatctatgagttttgcgggaaatcatgggatggaagtagaagatcttagatgtcctttgatggttagtaccccaagtaatcaagcactctctttgcaacgtagcccctcggtcagaatagaaattcaaggagtaccatttctggccaatcttattctgttagaatccaaagaccttgatgtcatcctagggatggactggttagccagatataaaggtgtgatagactgtgccaacagaaaagtaactctcaccagcaatgatggtcgagttgtaactgttcatgcattgtcttctgagtttttaaggtcaagtctgaaccaaatagctttggaagagattcccatagtacaggaatacccggacgtgttcccggacgatttacctggtatgccgcctaaaagagatattgaattcagaatagatctggtaccaggaacaactccgatccattagagaccttatagaatggcagccaatgaattagcagaagtcaagaggcaagtagatgatttggttcagaaaggatacattagaccaagttcgtctccatgggggagctcagttatttttgtggaaaaagaaagatcatacccagaggatgtgtgtggactatcgtgcactaaatgatgtgactatcaagaataagtacccgctgcccaggggtaccgagctcgaattcgcctatagt

SEQ ID NO: 22607 - DNA, 22724 bp, Oryza sativa
ttcggagtggtatttcgaattcttagttgatctggtgactaaagtacaggcattttcagctcaaaatttaagagggaactattggtgattaattgaaagttttttttttcatatgtttgtcagttctgcaatcccaccatttttttccactgcttgtttgaaacagctgttctctgttgctattaatgctccagtgcaccgcactaacactctgttcccactgatgataagaaatttgaatgcagaacatccaatttgcctgctttcttcgtgtttgggaaaacaccattggataccgatgcttgtggccgctcattgttggagtgctcgagagaaagtgataaacgcatcctggtatggtaaacctatttctaatgttctgaaaattatgcttcaattcatggaataagctataactctgatttgttattaccaaagtacagccaaattatggcattacgctttaatttttcctctacactataaaatcaaatcaaatgtaccaaaaaaaaaatctcctttgatttcaattatcgtgaaaaaaaaaagttaaaaatcatagggtagttcttcatacatcatcttcaattttcatggattcaaatatttagaagtgagtgcactatattggtagtcttaaaagcaacctcaattggatcatgaatgagaacttgtcgttttatcatttatgcagtggacacgaattcgatatagacctacagtagctcctgcttgtgtctcatgttgtctacctgtcagtatgttgtgtagacagtgatggttaattaattagctatatctactggatgttatcctatttccaagtaattggttagggttttatatttgtacttctcagtattgttttttttattgagcatttgactcatcgactgttactatttgcatatttgaccatgaaatagctaatgtaagatgtgtatggctagaaatttttatcttcattaatttacttttaatagtctatgatactcttgtcaaacaggttttttatggattagagtatgcacatgcattggatgatcttaaagcagtagttgcggaattatacaaatcacattctcgcagtgttgaagttcagtatgcagatgttctctgttcagttatgagcccaagctctgctgcagaagtggaacacggtcaatccgatggaagcactcatagtgatgatttatctatacaaagtgatgtagcgacatttgtgaataattgttgcaacgtggaaggatccacacgcaagtatagccttggaggactaacatggtctacatccatagatgataatatggaggactatttgttatattggataggacaagataactcagcatttgccaacattgtgcttaccttcaataaatgtgatataggttcgttatcttttcaatagccagtggggaaattatttgaatttgtgttagtcatgttttccttctattgtagtttgcctctagaatctattttggttttcgtaagataagtacgaaccattagttggacaatatgaagtactacatggcatacatcttgctttggaagttattgtattctcatttggctttaaatatctctatccttaacgtttagttatcatgtaacttccagtcaatgctttatattgtaaatgtagctattctaattcccttcttcatatgaatgatctgacaggaggtacaatccgtccagtgtcatgtcataacataattgctttaaagcagagacctttataatgaaatgcattctaatattaatgaacatttttaattttattatgcagttaggtatgatacagtagcaaatcaaccatcaagggatgtctctcatctgatgaaaatacttaggcgcaggtcatcttatgcagcatatataatactttatttttgcgtgaaatgaaagattttttttttgtcattgtagcattatttacaaaatagtttgtatatgcagatattaccttgtggagaaggcgaaggatgcaaatattgttggcattttggtggggaccctgggtgttggtatgtattcctttggcgtgttttattttttgatttgtttcccattgtaaagtacacataggaactgttgaccctattaaatctgtcaagttacgaattaacaaaccccattcaaaatttgccagcagttcagcactatgcaatgttgtattggagaaagaaagggggacactacaattgcagataacagtgcttgattaatatgtcactcagtcagaatagtcttttcctttactcaatccttgtgctgaggctaaattaacacccctaagaaaattaaatggagtatgttgctaatcacaagattattaatcgttatgctatgttaggttgttgagctagaaaatataggctgggcttgtctctaccttgtgaaattgaggtgttatttgaatggtgaaaaaaaaggttatttgtgggctctaaatttctactacatttgaagtttactttggtcaacctggtcgaagaccaaggttgattcaactggatttgaagtagttccacacatgacctatgtaggaaccatccaattacttcgatgttggttctacctgttttaagtaaattgtgctcacggtacaacaacttggtgagtgggtgcgatttagtgcaagaaataaaaaatatgtacaacaacttggtaatggggtgcacatttggtgcctaggaggtgccacacatgcaaactggctgtgtcagctggccagctcgtcaactaggtcacccattatgtgccttcaaccaagattcgaacagactagtagacaatcgctggcagcaaagcttccattgtcttcttcctactcttcataaagttgcacatccatctcatctcactgactgcatcaccccacctcacctttggtgatcaccttgccattgattcgagaagccagaatggcaaagaacttcaaccaaataataagatgttggtgattatgcagagaaacacattgttgaaggcctcagcgtgcccatcgtgcaccacatggcacctcctagaactataagatcaacaataagccaacttgttatagttgatcgtacaatttctaagttgtattcaatctcatctagccatcaagttgttgtactgtgaccgttatttactctgttttggtttgataccaaaaccaaccttaccaaattttggtaatgccaaattttggcactgccaatttttggtgacatagaagcgtgcggtagttgcttgggttgacaccttaacaaatgcaaggtgttaggtgtgatgttttagaattaccaaattttgatgtggtagaagtatttagagtctgtttggtttgtttccttattgtaatgactaaaaatggtgacagatcaaacatacccctattccttttattttcaactgaactgtctatttgttttgatttttatattataaatgctttcactgaacctcactgccactatagctttagcttgcacattattgtcttttaactttattacacactacatctaaatgatattatgtggtacatggcatcattttcatatgcagctggttatcttcacatcattgagcaaatgaaagatctgatcaaggctgctggaaagaaatcatatacgttagtcatgggccgacctaattccgcaaaacttgctaatttccctgaggtgctactgagttctaatatgttttctctgcttttcatgttaaggataactgactcaccattctttttttttttttggtatggcagtgtgaagtttttgtttatgtttcttgtgcccaaactgctctattggatagcaaagattttttagctccagtcattacgcctttcgaagctgtattagcttttagcaggtacacaccattattgcctccgatagtgctgttgacatacttgtgctgttcatttatcaatcatgactttatattaagttgtgtatggtggtctggcctcatgtggatgcaagttcgaagattttttcttacattcttattaagcagtatcacatttatcactttttcaggggaagggaatggacaggagagtatcttctagatttcaaggatttgatcactacagataaaccagaaatttcaagcacaactgaagaagcaagattttcctttatcaaaggtggctatgtggaagataattgccttgaaggtatagcatctactcttgggttttgaaatgatcatgtcaattaattatttgtcgacttccgagtacatataacatgacccgatattctgcattagtacccccgttctcatggctgatgcattcctttacctttttcttccctgttccgcaccatttggtcccacagataacgaggaacagccagagacatcgcttgcacttgctgaggtaacagagaaggcgctaagtataaaaaatcagaataatgatgcagttctttaccaaggaggagcaaagtctgcgatcgactatctcaaggcacgatcctaccgtggtctcaccggagaatacgagggtccagcaccagactcggtcttgacaggcagaacagggagagctgccggttacaacaacgagaaaaaggagattacacagtgaatgaatgacataccttgagtgggaaaatatatatatatatatatatatatatatatatatatatatatatatatatatatatatatatatatatatatatatatttgacttgtttgccctcgatgggcgattgatggagaggcaattttgtacttcagaaagtactgtcagatgcctcagttttgttgtgagccatgaactatgtgttcctttttttttttcttttatgatggaagggaaactccccagcctctgctcctactagggaactgtgtttcatcaaactgttatatgttcagaacgatgttgtacatctcctgccaacatactgtacagtattccatatttgcaaatctgcaatttggttcctctgtaccaaggtggctgtaaatactggcagaaacagccagcaagatcacattgttttgcaaagccggctagatgctccatatgctgattgtaagtttgtaatcatgctatgataatttagcaaagctcatgactgctggaaaaaagaacatgatcacaccacttattggaaatgaaatggtaattaggatcaaccagcaggagcacacctgtcacaaagaaagtaaccgatcgagatataaattaaatccacaaaaatggaaaaaaaaatgttgtctggttgatgtgtcaaggacaacaaatctggttgccatcagctgaaatcagcactaggaaagcaaacaataggactgcactgtacttcttcccttcccttgtatcatggtgatgtaatcgactgatttttaaaagagcttccatgttcttaaaaatgaaaaaaaaaactcagcttcaaggacctagattggcatgaatgcatgaaacacaaaccacacacttcatcattgcagaacccaatcaaatattcaaagcatatgtagtgtacattgtagcacatagtacatttacaaatcaaatgtgcacacacaagcactgcacttattacatgagaccacattatcactcgatatacagataggaaagccacacaagtccaaatccatgagcatagacacaaccattatgctcaaccatagtgccaaaacacacacagaggcagaatatatacaaatgcacaccacacatatatagcagacagaaacacacaattaagtagtagcaaaccaaacctcatgagcacccaaatgcaaaccgataatgggagggacacgatggtgattcccttcagctcgacgtccggtgccgacgcttgtccttggggatgaataggcagcatggcgcaccgtgtagtttgcttccgcgttcccttgtgttttctcatgaatttcccatttgtagtatgtataatgaattttatctttatgcttatcaatggcttctttcacctggttagggagagactcgccgttgaactcaagctccttcaatatctcggaaggttgcattatattgtcgatgccagagaaagacgagttcatcccggtgaaggtccacatgatcttttcgagcttagggacaagccccattgtggaactcgatctcagtgattttaaagcagtgcacaataagatcgcagagttttgggaactcatctttgttgaaggcaagatggctttcatcaaaagactcatccaagagctccaggcagcggatatttgatgtattcacgaggagccatgacgataaggcggcacaggaccagacgaggcccgcgaggagcaactaggctagctcagagcaagttcaaatagtatagccaactactagctccaattcatttatagctaatctaatagctcattcatacaatagttacatactacactattaatacctggtcccacctgtcatacacacactgtgtcttggagtccgtgctatagctggctacaaatctgtagcccgctgctcttttctctcctcatttatcttcttaaaatatgtttgcagctggcttatagcctgctattgtacctgctctaagtggtgagctcattgcctcatcgccgccaccgccgcccaactcccaagttccacggagcaggcggccaccagatctcaagctcgagcttgtcccttctttccacagctccacatggcagaagaacgactgtcctacttcccctacctcgccgcctcttagcctccgcgcagcggcctgtggtgggtgagaattggaactctctaggctatggaaagaaaggaggaagaaggagggagagggactgacgtgtgggtcccactgctaaaatggagagggtagatgaagaagctgttggaatgaaaaacaaaattaactctctattcggttggcaagctagctaaatgagtatttggagaggcaaatttggagactgatggagatgctcttaattagacttgggaccctaggtgccaggacttgtacctgcatggtatgaagtatcaagtaccaacgcctcctctcctcttcttccttcccctcgttttaacccatgttccctactgctactgctgtgaccagcgttgctgcctacaccgttgtaggctctggctcaagaagcgaggacgccgaatgcgtggagtgggggtaggatgactctaaacttacaggaaaaaaagcaaatacgtgggatgacgtcagcctccctaaagtggtatcccatcctctagcagccctgtatcctccattaataacaaataaaaagatattagtcactacaaacactcttcattacctagactcaaaactatcagtttccctgcatagttcagttacactgcttggccaccgcccccgacgtttcccctctcatgaaccctcgccgctgcccctcatcttcctcaactcggcaacgccagagctcgccaccgggtccccgcatggcagctagggcgacggcagcggggcttcgatgtcgggatctgacagggcattgcgtagatggggttttagtttaggtgaccgactggggtggtgccaaagggtggcggtgaggactagcagcgtcggcaaacttggtggtggcgtcggggaggcattgggcggagacggggctagtcctccatccttttctttgtcaacgttggcgagggctagcggtgtcggcggcggtagactttgaggtggcgataggtggtggcaatgttgggtgagatggggctagtcctccagccctccctttgtcaccggtggcgacggcggtgggagaggctcttggaagcgccattctagagatggcaattgccaagcgagcgtcagcaccaaggtttggctgcggataggtgtcgacgacggtggagcatctccaacaagctcatagcagtaagggcatgagcatatcgtgctggacggctccgcgatgctctaaaaacggaggggagttcgatagtttctgaaagatggtggtgatgtggtagatgggctttgcgacgcactagtggcattcagaatacggcgtcggcgtaaggtgttatggacagtgatggtggacaacgaacgaagcagttgatagtatgtggtggttgtgatccgtagaggtgaaaatggtacgacgacgagcggcacggactagttccgactctcccctgcccgacctcttatgctgtggcagaaagaataagtcgccgatggagtttgagagtttgaagctaaacttctatcttttctttttgtgtttgtacgtgcgctttcttgctactctgtgtaagtttggaagttgaaaaactcgtgtattattttggatgcgtatgctcttcgtggatatagatgcaagattaataaaaatcaatttattaaaaaatagagtcaaacttatatcagtggctccaccaccaatctcatggatatatatattgacatgcatgccgaggaagaagcacgcagtagctttcatatcaacagcctactgacatggccaacatgcatggcagcatcccaaggattgacttcgccggaataatcgacctagccgcgttgccgccgccggcagcgccgcctccccccggcgccgaccacctacggccacggtgggccgccgtgcgcgccgccgtcatggacgcgctccgcgcgcacggctgcttcgaggcggtcgtggacggcctcatctccccggagctccgcgccgccgtgctcggcccgggcggcgcggcggagtccgtgctgtcgctgccggcgagcgccaaggcgcgcggcaacgaccccggcgagggcaagccgtaccacggctacgtcggcggcatccccggcctgccctacgagagcgtggccatctccgacccgctctcccccaccgccgtccgcgccttcgccgcccgggtgtggccggccgccgccgccgcgttcccggaggaggcggtggtcgcgtacgcggggaggctggcggcggtggaggcggcggtgcggcggatggtgctggagagcgtgggcgcgacggcgtcgtcggcgggggccgtggaggcgcaggcggcggcgacggcgttcaagctccggctgtcggagtacgcggcgcccggcggtggggaagatgcgaggctggggctccccgcgcaccgggacacgagcttcctcgccgtggtgacgcagaacggcgtggacggcgtcgaggtggagtgcggccgcggcgacggcggctgggctcgcccaacgctctcgccgagctccttcctcgtcttctccggcgacacgctcaaggtatctgtgcatgtgcacgcatgtcacatctctctatctctttcttctttttttttaaaaaaaaaatggattaaaagaaacctggcgatcgatctagctacatccaaatgcatgttgctggaatagaaaatactaaatagtacacaaacttccttaactttcacatttcaaattaagtcaaagtctataccataatttaactagccgaatacaatgtgcgttacaacggttttagataaaatattgtcagttgtaaacttgaaaatattgtgaatatatatgtatcatggaataacaatgttattatacaatcaatttccaacaaaagattcccgccaccaactcaattaggtggtggtagctagttttgcataagactcctccctgctattaccgttggtcaattacattattttcgtgcggaacgtgacgaaacatagacataagatattaatcgaaaaccagttaatcgaaaaccagagtaccacaatatatagcaaaagtattgattttggaaaactaataagtgatgcgcgcattcacagttatatattcgaacctgagttttaaatcaacatttaacgatcagccttcttaaacagctaaatagcagggtaaatgggaaatagattttaattctttgagggaataggttcactcgttattgcatgtcctccaaatagtaaaaaaaattaaaaaaataaaaataaattaatacgtgatgcatgaccggtgatgaccggcagtctgaccagctctgcatggccggtctgaccatgcagacagggcggtctgaccggcattgcgtggccggtccgcccggtcccagagaggaagctgggggcacgttacaattgattaaaaggccggattaattgtgaatttggacatttgtgcccataagtcagaaatagattggagaatccctttgaatagaatatttgaaagatcctagtttcaggattgatcggaaaatttggcggcaagcgttcaaatacattttgcttgatagagaattatatcgccgaaaaatagatagagtacttttgaagtgcttagataatgatcaatctaagattgctatgggagaagtacacatgaagggatttgtggaactcatcaattggcccgcaagatggattggttgcttaggagagttggattctattggccgaaagtgattgatgattgtttcaagtactatagaggatgtgaagtttgtcaacggatcggcaatgttcaattagcgcttaccactgtgttgaatcctatcattaaaccatggccgttccgaggttgggctttgaatttcattggtcaaatttatcctttgtcatcaaaagggcatcggttcgtgctaattgcgatgaattagttcaccaagtgggccgaagccgtgctgttcatgaatattacttacacggatgtaattgactttatcttgaagcatattgtttatagatttggtatttcataaactttgatcaaggagcttcttttgtgtccaaagatgtgagaagttttactgaatcttatgatattaagttgttgagttcttctccttactatgctcaggctaatggataagccgagtctagtaataagatattgttgaaattagtcaagagggatattgaagaacactcaaagaactggcatgaggtgctttcagaggcattatgggttcataggatatctaaacatgatgctactaaagtcactccttttgagttggtttatgaaaaaaagccgttttgccagttgaggtaaaacttggctctcttcggtatttcaagcaagacgacttgttaattgaagatcacaagaccttgatgggaggcaattttgaagacgtcatcgacaagcatttgaggactttgaaagagatggaggcacttcaagacggtgtttacagagaacaatctatgggaaatacttgaagaaatactttcctagcgtttggcaagatgcttaggagatcccgtggccggtaattggattatcgccctaagacaacatgttctatgcttttagatttgcgatgttcataaaaaaggcaggggggcatgtgtttacacccaaatttagcacttatggacgaaataggggaaaattgccaaagtttggaaagtgccggctttctttcacagggccggtcataccgcaagtatgtgggcagtctgaccggctagtagggccggtctgaccgcaggtatgtgggtggtcggatcgtcagggtccgagtccgagtctatttccgtcgggtctcggatttccttgctcgagaaggctatgtttcgtgtttcctttgtttctatcccgagttggacgtagagaagggcctgtagagggcaagactaacccctatataagggacaaggccggttcattgtaatcccccgaataaaatctacttgaatagttcttttaccatgttttctattttaccctagtttagtccatctttgtcggtttgcgccgtaaaccgtccgccgctgctgcgagagtgcgacacctctttgtaggtttgtcctgaaaaccttccgttttgcccacgagatgggtagctatcctcatatcgatctaaatcggcctagaggctgattttgatatctaaatcggctccgctagctggtttagctatttttctataaaacccatcttgatttggccgtttggctagatcgaggtggttggcgactccatatcaccgcaaggcgtttaggtgttgcgatcgtacttgtcgacttgtcacaaaagttgccaacatggggttcgaccgaaccccctggttcgaccgaaccatgggctggcccaaaccagcccatcttcggctggcaacctactggacttcttctctttgtagatttgtgaattttgggccaattgatcgtgtcaattctgagttcttagcccattcatgcataagtccgattctcgacatcgtccgattgatttatcgtctgatttgatgtcgattctcctccacttaatgattattctctgtaaaaggttagtgatccaaatactagtggaatattattattctaacatgtatatgcattacaagtataactagttctcctctattgataatattgacggtcgaaactgatcgctaacgaccgtcaacggcggagcagaaacccagtgaagaggtgagcaaacaccggctaaaaaaccagtgacgctcaccacaccaccaggacgaggagcgtcggagccgacagccaccttgagcaccaaaagataagggacacactagtacaacgagaagacaagaaaataagactactacttacactactaaacaagaggagatggccgccctccccccacatgccccacttccatccttcgtcggcgtcagcggtaagccgccgaagaggaggaagaggggtcggagaaggcgagtctactgtagcggtgagtcacgagagctcgagagagagactggttgagtgtggacgagttccacgagcgtcgagtgtcaagttatccgttctcgtttttgattcttttccgattcctcctctctcctgtctcaccatctttgtctcctctccctcatctcctctcacatggcggcggcggtgacagctgcggaggacgaggagaggctgctgcggctggagtagtaggcggagcactgtggcaccagcggtggcggcttgtgagactatctctgcctcgccggcaagctccgcacacgctgctcgcaggccatccaccaccttggcctagccctcaaattacaacgtaaagctgttggtgtcaatcacaaaacgcacacgctcacgcaaatcacagagaaatcacctaggaactcagtaggaacacacagtcgaacacttggcgggcactctcgtcctacgagaacagagtagagagctagcagagcagagaaacgcagggactatatatttgcgctgctcaactgaattttctggtttttgtctccttttatcatagcaagaacatgaaatgatgtaaacgtgcacctggtagcggactactcctgccaaaatgtaaggattttagatggatggtctcacactgatactacgaatctaaacatatctatccaaatttatattatgcctgctcagatttctaatattagaatatgcctcgtccatttaaaatctcttatattttagatggagagagtaaaatacaagacataatcatatgcgtgctccgtatgatgcccaggttcaagatgctctcccaatgtggaaatagcacgtcttaacatgatgcgaaactgtaaaactgaaaaaaaaataaaggggaaatatgtagtagaaatatggaaactactattggatccaatatgggacgcctgagagtaaaatttttactcttgataaaaagaaatcttacacgttcatttatagattcaccggtaatttacaggttttgcactacatatgtagtttgcactatatatttccccaaaacaagaaactctgcaaaaaaaaaagagacaacttggtacaaaacactaaaagatcgtggtctttgttggacacccaaaaatgtgtatctattcatggaaaccgtaaaaacattatgttctatggacggccaatgtattttattatattatgttcaaatggagagggaaaatttcataaaagataagttgcccatggggcctcctcctcctcacctccgctgccgccaacagtgccaccgtcccttgcccccaccaccctccctactaacaaccactgccaccacctccttctcgccactgcagcgagcactgccataacccggcttgctgctcaacgcactccacctacagggctgcgccaccactatcgttggaccactcgtgccctctctatcaatactcctattgtgccctccaccattgccatgcgcgcgccggcgggggaggggggggggttccacccgtctagcttcgattgtggtgccacttcgctggtctacctcgacactattccagagaatttcttggaaaggaattcagattttttttctctcttcctcaacttgctcgtatattcctccttccatgccattgcatcactcggcactcatgcgcaaccacactctcttcctcaattcgttcatacaattttttctccgttataattagcgggtatattatattatttctaggtatatatagctaggacaatattcaatctcatgtacgggcagttttttaactagggctgaaagccccccatttccattactagaaatgaaacgacgagtacaaaagagttcggaaataaataacaaaagaaaagccaggctagcgcaacccccttactggagcagcaccctgacaggaaagactagcatttttctgcagggcaagctttacagagatcaacagatcagagacaacaaaatgagaaggggaaacctaactgactgccagagcaaaacaaagaactcagcatcactaaactcctaaacttttcattccaagcgtcttgtataaattctccatccaaatctggaactgaagacttcatttgccacttgtctcgccagcttggctcccaacattaagcttctttgtcttgcctccgatttctgcaagttagcccagttttcaatcaaatgacatgtaagatatatcagctcaattggatcattaggccatttttttttatcaaaacacactttgtttctggatttccaaatagcccataatacagctgccacccccaccatcacaagttgtttagaatgtttgtcaaaattggaaagcatatggtttttattcctagcaggtgttatattcagggcgcacaacttcacattccagatcaatctagcaacaggacattcaaaaaataaatgctgtatggactcctctttatcacaaaactggcacaatttatcaccctttctccagcctctcttgtagaggttatcttcagtaagaattttgttttttaaaaccaaccacataaaaatcttgattttcataggtattttgaacttccaattttttttatgggaatgccacttgctcccttttaagagctttataaaaggatttgacagtaaaatagccattcttttccaagttccaccacattctatcttttattccttcttgcagattcaaaagcctccacatctgtttaatcccattccagtctctaagtttgtctccatgcaaagtcctgaatttgatagtctcccagcctttctccttcagttttgcaagagtaatatgtctagtatgggtaatgttgtataaagcagggaatctcatttacgggcatatatgcattcagtttagtaatactaatattactgctatgcacgcaggcactgacaaacgggcaagtgtacaaccctctgcaccgggtggtggtgtccggcgacgaggcccgctactccgccatcctcttctccctcccggtggacggcgccgccgtccgcccgctcgacgaggcggtcgacggcgaccacccggccatgtacaggccattcgactacggcgagtacgccgtgttctgctacttgccggagaacatgacgccggaggtcatgaagcacgcccacaagctggaggccttcgccgccgtgcgcaccactactactgcatctgcatctgcatctgccccttaattagatggtgtagcagcattatattcgcacagagatttttaaaaagaaatgtttcatcgtcggatcaccgttgattatttgtttgttgatttttgtagtacgatatgtggtctccatttatgtatgttatagcttaaaatattgaacaaaaggtctaatgttcgtggttttatgtcttgctgaaaaatatatataccttctcacccagggtttcccttgccgccggtaatcgtggggtaccgtaggggttaccagtggtagtgtttggtgaattttatctaaatttaaaattccgaaaaaaacaaaaaagatcaaaaaaattcatggatgtagttcttgatttgtagtggcagatggtgaagaaatttttgaaaaaagagtaagataaatccaaatttgtgggcaaaaccaaaagtatggaagaaaatagaaaaaggaaataatgtaatgggccttaggttgcattgtttatccgtcacattaaggtccataagtggagaaaatatctccttggtcctctcatctttctctatccctctctctcatttcagcttcacgtggacatcataatgcttttaaaatgtgaggctgttgaattgttgttgttgaactattatgatatgaatgtatcataatattgaattgcttcgaagtctataatatagaaaaaggtcatgccgattttcttttattttacacctaaaagttaggtttgcaagtatcatactatatattcttcttattatctcgtttttttaatgaatcatttctcatgcattacgaagaacaatgaaaacaagaacatatgcatatgaaagtagaggaaaagataagtaaatggatggggatttattttaaagaaatatagtttccaggaaaactatcgagaagtttttggacaatgctgcaaaaaggtattccgttcggactgaatgatacattagttaccggatagcaagcgatatctaagaggtatcatcctgtctgaacaaagtatcagccgatatgtactactccctccgtcccagaatataagcatttttagagttggacacgtttattaagaaagtaggtagaaatgaatggtggagggttgtaattggttgagtagtggaggtaggtggaaaaggtgaatggtgaagagttgggattggttgggaagaaaatgttggtggagaagttgttatattttgggacaaatcttgagggctaaaagttattatattttgggacggagtgagtaggtatcaaacgaaatctctgagatatcatcctatccgaatgtaatactgtttggtagcatttgggttggaatcgccatccaaatttaggcttttttcttacataaactcatttaaaacatactactccctccattttaggttataatatgttttaactttgatcaaagtcaaactgctttaagtttgatcaagtttatataaaaataagtaatactttcgacccacaataaatttattataaaaataaatttaataaaactaatttggtaatgtaaatattactatatcaaatatataaacttaatcaagcttgaaacaatttaactttgaccaaagttaaaatatcttgtaacctgaaacggaactgagggagtaacaaaatttgccacgtaaaagtcagggatgatcacacgttctcacggtctcatcttttcgtttatacttatgtttatcagccaaaatttaaattttcaatcttaaatttaaagttgattttgaggtttttttcgtcgaggtttatcttttagatcgctaagaacacgtatataaaagttttattcacaaattattttgagtaaagtgcattggtggtccttaaacttgtaaggttgtgtcatataggttcttaaactctcaaaatgcatatccaagcctcataacttatcaaagtgtatcatctaggtcccaaattgacacatcctctctaggatcctacgtggcgctgatgtgacatcctctctaggatcctacgtggcgctgatgtgacatgctacctggacgtgacatgtcatttttttttctttttcgttttcgttttcttctcattattctttttttccattcttctgctcgggttacggagaaaggagaacaaagggaaaaaaaggaagaaaaaaagaaaaaggaaaaaaatttaaattggtctcatttgtcagtcaaaatgatgccatgtcatgtccgtgtggtataccacatcaacgccacgtaggatccggaagggattgtgatgatttgggacctaaatgacacactatgacaaattctgggacttgaatatatatttcgagagtttagggacctaaatgatatatccctacaagtttaagaaccgtcggtccactttactcttatttttatttttagtttgcaaatatgtactgtagtttaaacgatgaaacgctcagtgccacagcttactgctggtccggtcctcgcctgctgagtgctggctgctgcagctccaaggcaacaatggtgagtgggaggtccatcacctccggcgccgccgcgccgtgccacctgcgaccgacggaccggcacaccatggccgcgtgccgctcgcggcagcgaccacctctgccccccaaaacaagggcaaagggcccggcgcgccgctccggtaagctccatcgtcaaccgtctccgcgaggcacgcatcgtcatcccctctcctctcctcttctccgccgaggatctgctgtctcgggctcttttttttagggtttagggtacagtgctcgatcctgtaataattctgaaaaaaggcagtgcttttcgtgtctctgaatgccacatcacaatgcccaaatgccacggttgcaccgattttattccgtttctcactgtccaaatgccgcatcacgatcgcgccatgattattttttttttagccctcctcaccagctaacttttattcagataaaagggaatgattttttacagggatgggttattgggggaactacaatacaacatcactggtgaaactgaaaacaaccaagagacaggctaactaaaacatgttcagaaacatcatcaagctaaaccggatttttattcagacagaagggatttgttttctgatttgagattgcagccacatcaacatcaaagataggagatatttcagagcacacaatcttttcgttgaagactgggccacatgatgttggcaagagcaaccacactgttagttagggagaaagtgagcaattaatttaaatatataaattgcccctctgaatcttctagccgattttgtaaataaacgcacttctgtaaaaaaaaaaagatttctaacacctgggtgggtagattgaattgcaggcagaacaagtccaagtttgcaaatccaggagagaccaggattagtgaaaagccaaccaattgatgcttgtcttgacttgacctggcaataaggttaggtagccaaggagtccaatactggagggttgatcggtccgtgttctcttccacacaaatcttcttaatcatcttctttcctagctgttgatattgttcttcctgttgagaaattgacaggaattcatggcgggtgcactggtgagcgcctctacgggggtcatggagtctctccttggcaagctatccagtatgttggagaaagagtacgccaaaaaaaagcggtagagaagaatgtgctgtcctgcgaaacgagctgagcagcatgaacaccgtgatgcagaagtacgcgatgttgagtgagcccgacttgcaagtgaaggcttggatgaaagaggtaagggagctggcctacgacatcgaggacaccattgacgctttcatggctcggagtgaaaaatccaatgagcctacaggtatcagaggatttatcatcaacaatatcctgaaactgagagagctgctctcaagctgtactatttctcaagagattgaaaaactcaagaaccaagttctcgaggtgaacgatcgtagaaaaaggtataagcttgatgtatctgtgtccatgggtaccggctgtgaatcaattgaccctcgcctgccagcgttttattccgaggtaggtggacttgtcgggatcgatgggccgagggacaaaattatcaagttgctaagggagaatgcagctgatgaagattgtggatttgtgaatcgacttaagatggtgtctatcgcagggtttggaggtttggggaaaactactcttgccaaacaagtttatgagaaaatcaaatggcagtttgattgtgctgctttcgtgtttgtatctcaaatcccagatatgaagagggttcttttggatttgctttgtggacttggggcttctggtaatacatgggatgatgagaagcaactcattgacaagatcagagaatttcttcatgacaagaggtttgtgtttatatagagtaacttctactacctttctgttatttcgtatccagacttattgtatgaaacttggcccataggtatataattgtcattgatgatatctggagcatatcttcttgggagatcttgaagtgtgtattgcctgagaacaattctggcagtagaataattacaactacacgtattcttgacgtatccatgatatgttgctctactttcaatggaagtatttaccgcatcaaaccattaagtgacgacgactccagaaggttgttttgtagaagaattttccacggtgagcattcgtgtccatcacatctagaagagctttcaaaagcaattttaagaaaatgtggtggtttgccattggccatacttcatattgctagtttgttggcaaccaaatctaacacaaaggaagagtgggagttggtgctaaattcaattggctcagcacttgaaaatagccatactctacaaggtctgaaaaagatactgttactcagtttctatgatttaccaccacaattgaagacttgcttactatatctcagtatatatccagaagattgcatgatcaactccaaagagttgataaggaaatggatagctgaaggatttatcgcggaagacagtgggaagagattggaccaagtagcagagagttatcttaatgatcttatcaacagaagcatgatcttacctttcgacattactcatgctgatggtgtacaatattatcaagtccatgacgttgtccttaacattatcatatctatgtcgaaagaagagaattttgtcacgataatagatgggcataagtgcagttctttgcaggaaaagatccgtcgagtatccctccagttcaatgattcagaagatgttgtagtgccaacaaacataacaaacagaagttgtgtccgttcactcagtatatttgggattactaagcaagtgccatattttatggatcttcaatctttgcgagtgttggacttaggttattgtacattgttacagaatcagcacattgaatgtttaggaagtatgcttcaacttaggtatctggttctccattctcaattaatcactgaacttcctgatgaaattgggaacttgcaacatctagagatgttagatgtcacattatgttccatacaagctcttccagataccattgttcgattacagaaactcgtgtgtctatatgtgagtactaaagtgaaactaccagaaatgattggaactatgcaatgtttagaggagctgttccacatatcaagcaactctataagattggctggagatcttaaatgtctgaaaaaactgagagatcttgcaatagctgttgaagaccctgttgggacaaagagctctacattgagatacagggaagtagttcggtcatcccttactgaattgggcagacacaacctgcagtcactctcactgaattacaaaggtgatgagaatttcattctggattcgtcgatgggttcatgcttctcaactcagcgtctccggaaacttatcattgggaaaactctttccagggtgccagagtggatgagtatatttgacaatctcacacacttacaactgtgcatctcaaggatggaacagagtgatattaacatactcaaaggaattgactctctgatctttctccgcctcgtatttacagggcatgctcctgatggaaggatagtcatcgacaaccgaggatttcaagctctcaaggaattatatcttctatgtttcattcctgggatgtggccagtgttcgagccaggagctatgcaagaattacagaagtatcacctcactttcaagctacagaaagtacattgcaagaatagtgttttggactttggtctccagcatctttcaagcctccagcacataagtgcgataattattccatctggtgctaccagtgaggacacattggttgcagaggatgccatcaggagtgctacaagtatccatcccaaccaaccaatagctgaaatttttgtcgagtaaaaaaaatggtaaccggccagttataggttttctacgagtcaaaattctccccgaaacaagtagacctcattttcatgtgtctttgtgttatatgctcctctgttctggttgcatttgagaatgtatgcctttgttagtataaccctttcacaagtgaagaactaattacattagtcctctgatactgtagtcctaatgctctttttaggtgaggatagttgtactctaactcttgtatattactgattttatttttgtggttgtatgctaagttatttatttgctcaagcatgcagtttgtttttttttttgacagaaacatgccgttcaattttgtatatgcggccggcaaccctgtgaaagaatatcatgaactgactgaaactgaaatagaacatggctgaat

SEQ ID NO: 22608 - DNA, 9012 bp, Oryza sativa
ttttttgacagaaacatgccgttcaattttgtatatgcggccggcaaccctgtgaaagaatatcatgaactgactgaaactgaaatagaacatggctgaatgctaaaacaaggattaccattacaaaatccctgaaatgttgattatgcattcatgaatcatgtagttggcatatgacctcgatcagtatcctatttttgtatgtagcatcttcgtagctttattgatctttacaaatatagcttcaatgatcttagctcgtacaaaagaacaacattttcatggtcatgtaaatctcttgtgattttagttgggtgaatagttccatatttcattaaatcaagaaatgaaacaagttaaagagtgaattgcttgcaacgatttcttaaccttgctacttttggttctgtagatgttctgatctaatgatgattacagttagcgtgtagctggacggtgtggtttcctgtgaaaatacaacagggactcggaccttgatttatacatgtatttgcttcataaaatttatacgcccacagacaaatattaaactttcatatggatgaaattatatacttcgaatcctactgaaacatcaatttttctagccgtcgtcgacggaactaagttgctgaacgtcagagaggttatttaagttagttagtccgatgtatgaagttatatatttttaaaaggcaattgttctttgtccggtttgagaagttcaaaaaaaaaatgacttcactaggaattcaaagaaagagaggtgcagtttaacctttaggtgtattttaaatctataacttggtttagctttttggcagcacgcaaaacggcatatgagtattaatcattacaaattctaacaattgatttatttgatttttttaaaagaaacttctatataatttttttcaagaaaacacactatctaaccatttaaaaaacatgctaacgaaaaaagggaaagaaaattgcagtttgaagttaaagaaaagaaagcagcattaggccttcttcgaaacgcagcatagaaaaaaaaagaataggaaaaattctattaaaaacaaaggaaagtagtggagctcacaaagtaataaaggaaaataatttccaagaggttggacaacttgcccgtgccgtgcattagccatcacattcatcaatgcatgaaacaatgataagaaaacttaacttgcaaatttgaaccaaatatcgctttacaatgtcaataacaagaacacgacttcaaagcacaggaacattgtcccaaatgctgcttcaactcactcaggtgaatctattgcctattcctcatcagaagagtcgtccaaagggatctccgtttgttcattcacaacatcagaggtctactcattgaatagaaagtttagttagatcttcaggcaaaggagttaccagtgtcgcctaatgcaaataatgctaaatcaggaggctttacctgcattttatcccaatctttcaatttcgacccaagcatgtatgtctcgcgtaggggtgcccacccaggttcgtcttcgtctttgctattgttctgaagcacatcaagtgtgagaaatatccaagagcttcttaagttccaaatacataaaaatatgtataaaatatgttccgaaataaaatgaaattcagatatggcgcacaagagcagccaacttgtcacaggttaaatcattttacatctgatttagttaacttatggcatgagaaacagtagatagtttattatatatctgatgaatcacaggtacacatacagaaacacagtccaacttgtatattcttaacacgtatattcttaatgctaatgctgaggatacgggtgcttatttaaatgatgtcagatttactcattgttgaacactccctcatatgaaatccctccaactgtaaatagatgtgttgaagacctatgttgccccctcattacctcaagtttagcacaagacccaccttactaccaaatcttaaaataaaacatgaatctactcccttgagctactgaactaattggactaatgagctggtcgcttactagacccaatcaacatccggaacttattattatgatttagattaccactaaattaatcaacatctcttattgccttatggctcaaggaaaatccatttttttcaaatttgaaacttcaaaaaagtagcatcatgtcatttctggatgcaatgaatagacgtgggagacagacagctgagatactgaatgggcagtactataacaacacatcgacggtgtcaatagaaaggtgctgcccgacacaaaatagaatcgaaactctgtaccgaaacaaaaagagccccttacatagaggggtttcacacagattgaactagattatgatgtgtccacaataccatcggcacgatcatggttgttaaggcgtcgctgtagcagtaaggcggttgcggaggtcaaggcgtccactccgccttatgtttcctccaccttagaggcaaaacgagtagagaaagggaaagaacaggaaaaaccagtagagaaaggaaaggaagaagaggtaagctcatcatggaacctagttggcttgtagagaaagagaaagaagaagcggccagagacattgatggcggctggtgcctcttctcgtcatggcggctggtgcctggtggtgtacgatgtctcttagggcataaaacacgtgggtatgaagactaatgttggtctttggtgggctggttgcctggcttagtgggccttttaccaatttcctttttttttcttcctaatttctctaccatatcctccactaatcacgcctcaatcatctcataaggcgtcgcaatgttacgcctcagcgctatggcgctaaggcagtggtgggtcgccttaaaccgccttaacaacactgggcacgattcaagtgcacaacaaaatttggggtgactttgctagacgatttcaattctcatgttaaatcgcataatggacaatatgtcaagcactacagctatcaactaatacatttggacaatgaagtgtatttgcacgttgaggttactttaattgctacggtcttgatgtcaaaaaataattgctattgtcttctgtcacgcaacatcttgtattgcagttgtccgttttgatttatttgaggctgtaatttgcatcaaatttagcataactaatttgaacaacagttccaccagatatgcctctgagaacaactaatttgaatttgaagatacaacacaaatacttagcaacagaagtctataaaatgaaatggagtgtttttgagtaaagagagaattatcatagctaccttagaaaagttggaagatgccttgcccttttgactttggttagatgttttgcttaattctgtgaggaaggcctgctttgtttcttttgccaacactgttaggattaacacaaaatgttcagaatattttcgttagtagcaaaaaaatgcatatatacatcaaaataaaatacaaaacataagtacggtgtgcagaatgacaatgtcatatgatagtatttgctgtcaatgaaaagatcatgacacatggtgtttccagctggcctcaattatgcttaacttccgcattttgtgtcaaacaaaaggaggtatttcatgcagtcagaagcacataaacaaagaggtcctattcaaaccatcttgagttgatagtagtcttgcactcttgtgtgtctcccaccttttattttttagatgtaacgccccaacactcgttgtttttatcaggctaactagtagggaggaaggatgcaaagaaaatgcaccatcaaggatgcaaagaaaatgcaccatccaatgaataaagagtacatgctgaaccagtagttttactttttcataaatgtagaatcgatttctttcatatttattgattttttgaagtctaaaatccaaactatcaacctagtcacaacaggttcctaaattattagaggtagaatgatggattacatggtaagtaaaccaacacacctttggcgtctttactccttgatgggttcaaacctttccgacaattctgcgccttgcttacctggaaggaataaagtaaaggcctatcaaatcaatcatcaaatagctgctattttattagtcctgctattacatggaaaaggtacatgcacatgtccgtgagtgtgttcccttaacacaagctcatcaaatattcaatataaagcttcgaaagcacctcacatatacattttcactgtgctaagtaggtaaatacagaattaaatgtgctttacagcagtaaaattaaaattttctttcttcaatgtacttcagtaataaaaactaagaagacaagcaagagctgtcttcaaaaataaacaaatatgagatacatctgtatcatggaaagcttgatgtatcctatgatatggagagtaactgagcctcagtgtgacgttataagcagaatggcaggataaacaaggagacaataaggtttcaccattgtagggtcagtcgaagctcagtaaaacaaagaaccatgatgtaaaaagctatacatgcatacttcacgaaaatataagatagccgtgtgcttaccgagttgaacaacctgacgactgaatcaccagcagcaagacaatcggtgtaaaaaaaatcaacaggagaggcatccaattagctaacaaataatatgtagtttgtgatatgcaaaataacagagtagaaaacagaagattacccccttgggttgcgattttgatgagctccttctctttactatctaaatgatttgtgggaatgacatggcccttctctgcagcctaagcaaatcaaacgcattcaatccaattcagcatttcagcacagaaacttctacaaggggatgtagaaattatcgagcgaaacaagccgtaccatgcgcttttccctgcggccttctcccttgggcttgtgttcttctgcgtcctcggccaacttggcggcgaccagcttcttgtgcgccgaaagaattggaccctaatgcggcggcgcgaaattcatcagtccattgaaaagaaaagtaaagaaaagaaaagcattattcttcttttgtagagagagatggatcgaaccagtgggtcgtcggggagcttcttggccatgatcttcgtgaaggcgacgcggaacgcgcggcacccctgctcgaacctggtcaccgcgccggcggcctcgtcgtcaccggagccggaagccccctcctcctcctcgtcctcatccgagaggcgctcctcgtcgtcggagtcgtcggagttgtagtcgcgggcgcgcttgcggagcagcttgaggaacctgtcgctgggcttgctgcggcggcgggggaggtcgccggggtcatcggagcgcctgggcgtcttggcgaggcggccctttcccttgcccttccccttccccctcgccgccggcttcttgcgcttgtgggggttgttcgacgcggcgccggctgcggcggatggagaggacacaggctgcggggcggtggcggaggccatggggctcttccaccgggagagcaaccgacccctcgattttgttgaggatggggctagctggccggcgaaatccctcgccgccgccgccgccgtacgccggtggggaatcgcgtcgtcggcgaggaaagaagagaggaagggaggaggcggcggctgggccttggggtggaggggattctagggtttatggtaggattttggggttattgggccggtttggttcgatgatccggtgagacgtgtgaacaaatggacttctttcttgtatctcctcccaacaaaatgcattttcaatattgctaaaagtattgccctaaataaaatatttgtatacttatgtttttttagtaaatggtactagaaaaaatatctgtgcattacaacaagtaaaaatctttttttatgatagattaaaatgttgggatcggtacacattataattgaaaaagttaataaaaatccttactttgttttgggctaaaagaccattctttcgttcttttttcagccctaacattgtccaatacctacccccgctcggtctgtctcttcggcctggtgctctgtcatgccggagctgatcctcccatcaaatccgaccgaatctttctcgatatcccaaaattggttgattttttatccactttatattctctttccgttttttctaaaatcggagataattcgcaaaacttattaaaagactcgatattaaaaccggagataattcgcaaaactcaataaaagactcgatattctctttccgttttttctgaaatgggagataattcgcaaaactcactaaaagaccaaagaagcttattggttggccatcttcaatagagattaaattcgatgaattaaagccgaattgaaaggggaaattatgagaaaaatgataagagaggagtgaggaatcgatttgcaatcaattggaggagaaaacagtggaggcagatcgacgttaggattgtgctagggttcagcccaggaacgaacggtgcataggatctcgtgggaggagacagaagaaaaaatttcggaatacctacatatttatttcttaaagtagggtcgtgtttagtttgtgtgccaaaatttttttagtatatggacacacatttgaagtattaaacgtagactaataacaaaacaaattataaattccgcctgtaaactgcgagacgaatttattaagcctaattaatctgtcattagcaaatgtttacggtagcattacattgtcaaatcatggcgtaattaggctcaaaagattcgtctcgcaatttacatgcaaactgtgcaattggtttttttatccacatttaatgctctattcatgtgtctaaatatttgatgtgacagaatttttggaagtttgaagagaaacactacctaggtatagatttaaatttcttcaagagtaaattacacaagactatagttattctgactaaactatcacaaaactcaaagatttaatactaaatttgttaaaaatatataaatttaaggacaagtaacataaaactacatatttaatattgaagttatcacatcactacaaattttagagtttaaatccctagaaccatcgatacgttggaactatatattatagttttgtgactaaatttgttctaaatctgtaattttgagataattttcttactaaatgtgctgttttttgacactccatgttaaatatgtagttttgtgatactatctatagttttgtgaaatttactctttctgaaatttgatattatctaagcaggatggtaaataatagaaacccattttatatcattttggaccctcgaacttcacaccgaaattggagccctgtcaaataggtcataaactaccaaaaattttttaccatcaactttcaaaactagataattaacaccctgcaatatatttttttgttttttaaataaaggtggttttcctggttcatatatttattatccatgttcttctatgtaaatgtcacttaattaggtacagagccatgaaagcctattgaagttcatattattgaaaaccactttcacatagtagttcaaaccatcatgaaacttggtttataatgttatttgctcggttttgaaatgttgagggtttgaagttcacattgctgagaaaccaccatcatatccatcaaaccatcacgaaacatggaatacggtgttatttgctaggttttgaaaagttgagaatgaaaaacagccggtttgcagtttagggtgaaagtacactttgagcaaagctgaagggacaaaatggatttgtcttctttcccctcttcattttttacgcacagcaacacgagaataatgtaccaagatgaaacttaattgctttttaagttatagataataattcatataacatctacaaagattggcacaactaaatagaactacggagtactcaggggcggaggcaagcctagggcaaatcatgataaattaggttaaatcaccatataattttaaagaaaaatcaacaactcgttagttgagccctaggttagcccactctttagtaattgctagctccgccactgggagtacttatttaaaggagcattagaagggtgattgtctaacaaaatttttaggtgtcaaagagtgtacatctatatatatatgtaacaagatggatatgatagatatatatcatccatctcgagaaggagtgttggactgtgtgcatgtgtgtattgtggctcaagatgcccatgtacccatatgcttgtatatgtactagagtaagcaatttagaatagtacactggtactgaagcttctagaaaaagagctatctaagttttcaactattactgactcctttgaaatttaagattaccatataaattatggataattcagccttttgatgtatttttcggattcattagaaaaggacaggaaatttgccataagattgtatgtctatcagtctatggcttaatttgattggaaaataagcaagttgtctaacttcttgcaaattattttccttttactatttgagatccactacttttctatcctgcgtttcaaagagggcctaaaggttaattgcacctctctctttcttttttatacatagtgaagtcgattttcactgtaaacttttcaaacaggacgaacaacaattgcctttcaaaaatagataacttcgtacatcagactaagggggagtttggatgggactaaaaaattttagtctctgtcatatcggatgtttgagcactaattagaagtattaaacgtaaactaatgacaaaactcattccataaccctggactaattcgcaagacgaatttattgagcctaattaattaatccatgattagactatgtgatgctacagtaaacattctctaattatgaattaattaggcttaaaaaaattgtctcgcagattagctctcatttatataattagttttataagtaggatatggttaa

SEQ ID NO: 22609 - DNA, 87866 bp, Oryza sativa
ctaacttaacctctgacgttcagcaacttgatgtttcagcaggattcaaagtatagaatttccatatactttgtatccctatgcgaaaattctgaaagctaaatattttctatggacgcatcattgatgaagcaaatacatgaatcatgaagggtctgagactctgagtgactgctgtatttcacgagaagccataccaaccagctaggcactcgctgaaaatcatcattagacaagaacatctacagaactaaaaataatactcccctgtttttttaatacataatgctgcaccgttgacttttaacacgatgtttgaccaatcctcctactattaaaaaaatttatataaatggcatttattttgttgtgatatgttttatcattaaaaaaaacttcaagaatgacttacacttcagcaaatttacactaattttttttaataaaacgaataatcaaacaaaaaagtcaatagcatcatctattttaaaaacagagatagtataggttgagaaatcgttacaaattcacattttaacttgtttcatctcttgatttaatcaaatatagaactattgaccaggaaacactcaaccaaaatcaccaagaggtttcgaaacagttgttcttttatacgaacaaagatcattgaatttatatttgtaaagatcaataaagctacgaagatgcaacatacagaaataggatatatactaatcgagctcatatgccaagtacataattcatgaatgcataaccaacagagtgacccggttttttcaggactttgtaatggtaatccttgtttcaacactcagccatgttttatttgagtttcagtcagctcatgatatttctttcacaaggttgctgtgcatacaaaaattgaactacatgtttgagcaaacaacttaatgtacaaccacaagacatcaataatgtagaagagtagaattatacttagataaaaagagcatttgactatgactatatagtatcacaggactgaagagatcagttgttcccttgaaaaaaacaacctgatcaaaggggcatataacgcaaacaccaacaaggccacaacaaaagacacatctatctatctatctatctatctatctatctatctatctatctatctatctattatctattatattatatatactaaaagtccattacattaaactccctataaacgctctcaagccgccacgtgagcctcctaaaatccctcctaagctgccacgccgcacttttataatttcatggtgtagcaggtgtgggcccccaaggagcaagcccaaactgccatcgctcttctgccgctagcggcgtgcgtatagtagacgaggaggttgcgaagcgatcgcctgttcccaaatccaagggatacgcgagattgtcgccgtgacctagcagtctagatgaacccggctcgccgccgccttgcctctccgttgcaacggctgcctcgcgccgtcgtcacccccatcgctgccggcccgccggctgctgtgagtccgtgaccgcatgcaactgcaagacgagcatgcagtcgatcgatgatcgatctgctcttgcttatctgcatgtgaagaggaggtgatcaggtgatgatcggagcagatagcagcaagacaagccaccaacaccacgttgcctatttgccttgccatagttgcctatctgcctcttgccaattgtactatttagtgacagacacatttgcctttgactaattttctgattgactccatcgaggttagcttggagccttgcaggcttggacgaatcgatcagtcaatcggcgacaatcgactgaactaactggtaagatctagagtagtttcaattaacccgatctttttgttgtttcgtaactttgtaatacatatgagttcaatcactaacatgttaatagtttcagttatcagttcattctaaatatcaagtcatcgagaatgtattcataaggtagcgtaaaagggggaaaaaaagaaattgctctaaattgttgaacaaccactacttgagatctaccatgtcccaataaagattaaatggtttggcaattttatgcattgaaaagaaattggtagatgagatttttcatatgtagaaatgtccaaagaaaattctatggtaacacgtagaacgtttttcatataaatattgcttttagatacattttaagtgtttattggtaatcatgtttcttgattattattttggggttgtattaagggcctccatgtttagtttcgcactaggccactaaaaccctagaaccgggcctgcacacattagaagtatatatcatcctacctataatacagacgtacatatcctctctcccactgtcccacattgcaagtgcaagtacgtacgtatacttatagtacgtacattttctccttcctctaatcctccctttgtgctacttatataatcttattctatagctaataaaatttcaagcatagcaaccaatcttactatagaaaatataaaaaaatgaaacatctaatgaaaccatcgatttttacttaaattgatgtgtccaatattttaaactattagattagatatattatttaaaaagtaacaccttcctcctgtattcgtataaatgacaaatgtattactgttggcccaagaaaacaatactccatacgtacgtacgattgaagaaagaaacactattgttcgccacgagaaaaaaaatcataagcatgtacttccaataaaacacgatgaaggcaaaaaaaaaagtacgttctatgtgtacaattggaaaaaaaatcaacgtgttctaaaataagatttatacaatttagagataaaatatattactttacaacttacgcagttgaacctgatctacatataatacaaatataaaatatccaatcaatgcttttaaatgctctatcttttaaattattttaaaattatatatctaatttatgatcttatatttatttagttaaataaactactgatgtctatggtcctaaatacatcataacaatgtagtggtagcatgtaataattaatatcataatagttttttgaataattttacatcatattttagtttagggtgtatgcaatgctaatttaaatctacatatgtggaaaaaaatgaaaacaacataatttagttattgctaagtacatatgatttaatttcaatttgtcaaaaaatcacattttttaagactatttgattggtatttgaaaagtgagatcataaatgttacatagatgcgaaaagaattatcaaaaaaattttcagctaatgatcttgctatagtacaacccctcgatacatcatgatatttatggccattatgtatgtgttttcttttccatatagttttaataacaaatgaataatcaagcaacatgtgtgtaataatctactcatgcatgatatattttcttatggttgagaaattctaacatgtcaggtataattgatggaggtatgtcatacaccacactgacgtggctataagtatacttcaactaattagttattgtaaataagtttgaaaaataaatgcatccttcaaattagtaaaaatgtctcatatgattatgaacaataggtgtagaaaacaatcctgacattgcactatagatatttataaaaaatataaacaataaatggtgctttggaatcttgatgatatttcaaaaaatgactttgtcctggttacatataaattcctctaattttgacataaaatttgactcctcggatttatgcgacggagggagtataagcaatataagtctatctttagttagataaagtagtctgctacattttaatgaaaaataatttcattaatatataataaatcaataaagtcatctatagcacacaagaaaaatgttagtcaaattttggaaactgatacgctaaatattctaaaaaaatcacacatagtacaaacaaatatgaaccaactccattattgtgacacaatttttttcataaatttaaggttgtacggttgccaataattttagtatagactttatacattgtaagggtaatcaaaagaaaatcataactaatgtccaaaccaattattagccaaaacatgtttaaaatggagtaaaaaaaatttcaacaatgtcatcctaacatttataataaaaattaaagcaatattaaacaaggtacccgtgcatatgcgtaggctatcttcctacaaacgctctcaaatcatcacatggaactcctacagacgctcctaagtcgccacttgacaatataataaattggtcgacccattatctgtctatccatttgtcgtgtgatttctaacaaaaatcacccagattttttctacctttagattacatctaacgaactacaaaagaaaaaaaatacatatttacttacacattatttttttcaaaattacagtgcacttacatgtcatatcaactgaatttataaatgtaattttagttatataggactgtaattttatatttcaaaatatagttttaggtatacaatactctaattttatattttaaagaaaataacaaatacatatttatatataccaaaattatagtacacttacatgtcatatcaactgaaattacaaatgtaattttagctatataggactgtaatattatattttaaagaaataacaaatacatatttacttacacattatttttatcaaaattacaatacacttacatatcatatcaactaaatatacaaatataattttagttatataggattgtaattttatatttcacgatgacgagagggatggtgtcgcttgccgaatagcattggccgtactgccggcggccggctcgccagtcagaggccgcgttgccaccatgtttctccatcatagtgaatgcatgggctagctgacacaggccgtgagctaccgctcacatcacaagtggtgcatagcggccaaaaaaaatgtcaaatgccatagaaaaaatcacacgggagatggacatcaaaatcaattaaatttatcagatttatctttaaaaaaatccatggcccacctccctctcctcttcttgcaccggcccacagcccacccttcgaatacgttccgtacgtaacatacgtacgtgctcctccctccccttctatctgctctccccttcttcctttcctttagttattaaaattttaaataaccataatttctcaaaaaatgtagtcataacttttaattacacataaatatttttactcttctatattattgtatccgttgcagttcattaacaattaaaaggcaatataacctgtaatttaacttgcgtttttatcatatccatgccattaaaattgttatataaaatagaaaatatgataatgtatcacttcacaaaacgtgcataaataagttagatctatgatatgacaaatataaaaagaacttaaatggcgagtaacattaaaaaaaatcctatcctaacctccttttgatataccatctcagttgtaaaaaggtttacgaagaacatgataatgtggatcatatcatcatatatcacttaaaaatataattagatattaactgtaatatcacaaaataaaataaattaattgtaataagcactccactcccaaaaaaaacacctccattctaaatatcggtatatcaaaataatgttatcttttatgaaacaaaataatgttaattaaatctaccatgaaaaatattttgacatcattatatgtttaatattaaaagaaatctatgatattgtaaaataaaaatattttaattgcgattagcatttcaaaaaaaatattaccatcattctaaaatatccatatatccaaacaatattaattagatttgtcatgacaaatatttggatatgattttaataattaaagtgaattcattataaaaagaaatcatcaaatgttttcttcaaaactttatcgatatatcttaattaggcagaatatggagcatgtatgtcagtattttcctcttcattctttggagtttaagccttattaatctaatctttgtataaagtatataacatctagcgtactcgacccatatatggcttaccttacgtactaattttgtatgacactcaaacccattttatcaattctacttacaaaccgctattctccaataagtcaagtatattgataagcttattgtgtatcaaaatgactatgtgagatccgatgaacagctatgctatcatgtagtgtaggagaagggcaactggcaatatagattataagagatataattgtatatcagttcataaacataaataattatattaggtgtacaatctcatggtataaaattaaaactatgtcttcatgacttttctttaaattggaaaaaatacatgtataaaacaaaatgataaacaaaaattgaaaaacctcaataatatacaccctacatacaattaaaaacgcaaggctaatctatgtggcatataatctatgtatttattggtcgattaacacatataattaaatagagaaagtcttgaaaactttcgttatgtaagcacaacattctacatgtaacttatcattagttaagtggtcatgttattcttagatattggattatttgtacatctctattatgttaatacatattatagctaaacaaattagaaaaaaaatcaaggaatttcacaggtagtagtgaaccatcgtaaggtatttgggttatagctaacgaggaggaaaaaaagactatgatatccattattaattaaaggtatatatagtttcaaagaaaccaacttcatggcggcaacacaatatttctcataggttcaaaactgcatggtttcacacaattttagtttacaaattttttttgctgcaaggataattagaaaatcatagccaacattcaaagtaatcccaaataaattgtaatacagtagaaaagatattttaattaaagctcaccaacacaaacatttgtaataaaatttcaaacacattatacaagatgcccgcgcacctttctagtgaaactaaagtctcaaatactgtttcccaaaaaaaaaaagcagttaccaattttttttactggataaaaatttgttggttggttgggatggatacttgtagcactcctgatggcatcctctgcagcaaatgtgtcctcactggtagcaccagatggaacgataatcgcactcatgtgctggaggcttgaaaggtgctgcagaccgaagtccaaaacaccactactgcaatgaactttcagtagcttgaaggtgaggtgatacttctgtaattcttgcatagctcctggctcgaacactggccatatcccaggaacgaaacatagaagatataattccttgagagcttgaaatcctcggttgtcgatgactatccttccatgaggagcatgccctgtaaatacgaggcggagaaagagcagagtggagattcctttgagtatgttaatgtcactcttctccattcctgagatgtacagttgcaggtgtatgagattgtcaaatatgctaatccactctggcaccctggcaagagttttcccaatgataagtttccggagacgctgagttgagaagcatgaacccatcgatgaatctagaatgaaattctcatctcctttgtaattaattcagtgagagtgactgcaggttgtgtcagcccaattcagtaagggatgatagcactgcttccctgcatcgcaacttataaccctctgtcccgacagggtcttcaacagaaatcgcaagatctctcagtttggtcagacatttaagatcctcaacgaatcttattgagttgcttgagatgtggaacagctcctctaaactttgcatagttccaatcctttctggtagtctcgctttagtactcacatataggcacacgagtttctataatcgaacaatggtatctggaagggcttgtatggaacataatgtgacatctaacatctctaaatgttgcaagttcccaatttcaccaggaagttcagtgataaattgagaatgaagaaccagatacctaagttgaagcatacttcctaaacattcaatgtggtgattctgtaacaatgtacaataacctaagtccaacactcgcaaagattgaagattcataaaatatggtacttgcttagtagacccaaacacactgattgaacggacagaatttttgtttgttatgttggctgggattacagcatcttcagaatcgttgaactggagggacagtcgatggatcttttccggcaaagagctgcacttttgtccatctattactgtgacgaaattatcttctttcgacatggaaatgataatgttaagaaccaagtcatgaacttgacaaatttgtatactgccatcatatgcaatgctcacaggtaagatcatacttctattgataagctcgttaaagtaactctccgctacttggtccaatctgttacacctgtcttcagcaataaatccttcagctatccatttccttattaactttttggggctaatcttctagtcctctggatatatactgagatatagtaagcaagtcttcaaatgtggaggcaaatcatagaaactaagtaatactccgttcatttcaaaatgtttgacaccattgactttttagcacatgtttgaccgttcgtcttattaaaaaaatttgtgaaatatgtaaaactatatgtgtacataaaaatatatttaacaatgaatcaaattgatatgaaaagaataaataattacttaaattttttgaataagacaaatggtcaaacacatataaaaaaaagtcaacggtgtcaaatattttaaaacggagggagtggtatctttttcagaccttgtagagtatggctattttccagtgctgagccaatagaatttagcaccaactcccactcttcctttgtgttagatttggttgccaacaaactagcaatatgaagtatggccaaaggcaaaccaccacattttcttaaaactaggaaggaagcccgcgcagatgcgcaggcaatttatttttgtttatataaaaaactactgaaaaaagtcttatatcatcatattaactataggaacaatagattacctcgtaaccttaccataaaaagaagggaatatttatattgtgaaatagaccatataatttgatatagtaaatgatagtgtctatcatattcaaacaaaaatcactttgttttggttatatgtaaacttaccatcatcatcctttgcaaacataatatgagttttgatgttttttcttttattatacatctaattcacctatgcatgttcatgggtaatgtacaaggaaatactctatattatcaaaattatttttactaattgttaacacaatttatatgagaatgacataattaaaaaggataaaatatgattccatatgacatttttgattgtacatatgtacataagtttttttcgaatggtagtctctcgtatgttcattctttttcatgttttttttgacaaatatttttctctcaaaggaggtagggtgttcatatgtgtattcatagtgtgggtgtgcacacgtttatatgaccgcgtatagttgcctttcacattgctagtcaaaaaaaatactttcaagaaaattggcgagggtggcaataagcggcgacatggcagcgtggcttcttcgtgaacctcgcaaagattggtcgctacatatatgcataatttgaggaaaacattagggccacaaagaaagaaatagaaaactacaagatggggtggaccatatacacacacttcttcgttatttttgacatctattgtatatgtacgtgcatagagagagattagctagttttaaggagcgagggcttatctgaataaatctaatttaatggttgaagataatggattcaccagtttaagtgcaaatcgatggctagatgttttgtttttcccttatattttttctaaaatttcctcctatttattagagcatcacatgacattttacaagtatttgtagaagtataggaacgctattgctcatactcacaatcaacttgcagtcaactattggttgttgtgattttgtggcatcctctatatatccatcatctttttgttaatgggttcccacttagtatcatcctaattattaagtgaattgtgcatgtatgtatcataaacaatataacttgacgattgtgacactggtttgtatatagaacttattacatactataggatttatcggagacatacgattgatatattatactattcttgattcacaaagtatattatgtactacatatttagttttagtgcataggtaataaatttatggttaagttctgaagtgcttatcagagtggctacttcgttatttatcatgaccacgtttaccaaattgctaaatggtgcgtattttacaaaatatttattattatagattttttttctaaaaatacaaataaacccattttgaagcttgtaatatttaatactcaattgatcttgtgctaatgacttgtgtcttttcgtgtgccctagataagctacgtcaatgagctagatcgaacgaaggctatgtaggaggaaaaggatattgacatggtgttaaatgaatatatttaaacttcaattttctaataatgtatgaaaagagtaaacataatatgtaaaaatatatttatgataaatttagtaacatccttttcccatatcagtattttttacaatagagagtgagtaatttttcaaattctacacacacttgaagttgtttttattttggaaaatgtaattttaatttaacaatcacataaactatgctttttatttatttatatttttatgggtgtttcaatgacatgcgcttaatttgaatacaactcgaaatagcatatatttttacaacttaaagtatagttaatattaatttaaattattagtttgattttccatctaatctaaatgatgataagagaaaaataaggatgtgggacccggcatgtgtatgtactgtacatagaaatagttgcgtacgtactctacgtaggtacttaagaaggaatacctacaaacctgtgcatgtataggcattaagatgtgggcctttttacagataaatataataactagtttctaagatagatctaatagttgaaaataatgggtccaccagattaaatgaaaaccgattaattagtagatttgcttttttttatataatttctatgatttattagagtgctatatgtcggtctatgagcaattatagagtactatgtggcggattagaagcgtttgttgaaagtttatcctcttgattactttttctccctttttctctttatgaaaatatttacaacaataatttataaataaccacaaccttctaaattatatatttatttgtaacaatatattttaatttgtcataatttttaacttttaattcgtacgttcaattttttacctattttggaccattgtgttatttatgataaaaatcacaattagaatttaagtgtatgttatctacttcactcgtaaaatgtatattcttctaagttctatttactatcctttgtatgtcatttaaacggatatgaaaaactataaaaagaaagtgactatatattatttcatccagtaccacttcacttgcatgcataaataaaagatcgactttttaaagcctcaccaataagaagaatgcccgcgcagctgaaaacatatattattttttttattgtacgttttttaccatatttgtagagtaataagttttgtttttctactatagaaaatactattttaaaaaactatctatttttgtctactaacgcatcgcatacgtacatttttttttctagtgaaccgtacctttttaatagttttttttatcgtacgtacgtatgttcttttaaattttaaataatcagtacctaaagtttttgttttcttttcaattatgtgctcgtacgtagattttctggtatagacggttccactcgtgtgcactttccggtatatacggtttcaacgtacagtgtagtactcttttttggctttatagctgcacgtatgtttgtttgttctttttaagccaacagtacttaagggtttatatatccgatcgaaatataagttaattgttctcgtaaaaattctcatgtataaagcttatatgttactccctctggttctatattaattgacgttttggacaaagttaaggttaaacttttatagctttcaccatcaataactttaaaaatatttagtttaaagaaactagaaaaacatatatagatttgtctttcaaaacactataataaaagtaaacatgcatttatttatttattgtatatattataatagaaaaataaggtcaaaggtatatagtgtgtcattgtccaaagcgtcaattaaaatgaaaccggagggagtaagggtgtagcaatgactttttaaatagatctaatctaatggtctaaaataacgggcccaccaatttaagtgaaaatcaacggttagattggaaaataccatgtggcggcttaagagcgtttgtaggaacgccacatggcggcttaggagtatttgtagggagattaatggacttttagtatgtagtagataatagatagatagataagagataatagatagatagattgcttttgaaagttctactagatgtgatggacaggagtgctcaccatggaaaattcttttacaaaacaaccttctggagtcactttcacttaatggttccaggcggtaaatactgcctttgaaggtagagcaacataacgccgctatatcaagaatacgtgtagttgtaattattctactgccagaattattctcaggcaatacacacttcaagatttcccaagctgataagctccagatatcatcaatgacaattaaatacctatggcccaagttcatacaataagtccggatacgaaatagcaggaagaaataacagaaaggtagtagaaataacacaaacctcttgtcatggagaaattctctgatcttgtcaatgagttgcctctcatcatccctattaccagaagccccaagtccagaaagcaaatccaaaagaatcctcttcatgtctggcatttgagatacaaacacgaaagcagcacaatcaaactgccatttgattttctgataaacttgtttggcaagagtagttttccccaaacctccaaaccctgcgatagacaccatcttaagtcaattaacaaatccacaatcttcatcagctgcattctcccttagcaactttataattttgtccctcggcccatcaatcccaacaagtccacctacctcggaataaagagtctcactccggtgtcttctacctagagtagaaaaaaatctgaaccgttgatcttatttgatccaatggttcagatctatttctactaccaccacacttagtggtagtagaatcgtggaggggtacttttatccaggaaaaattatctgcggagggatattttcgtccttcccgaatcgcgcatctggagccgatgcggagagaaccctgcggctcccatcaccaccttgacgacctcgcctgctccaccgccctcgacgcctcctacttcctcgcctccgtcgcactggctgcctcagccgccctcgacgagctcgcatctccgtctgggatcgccagagctgcgccctctctgccgctcccccgcgtcggcccaccttccgacgagttcgcctcccggatctccgcctccgacccagcaccgtgccaccggccgccgccaagacctcgtccacctcgctatccccttcctcgtcgtcggcctcctcccccacgctcggctccagccctgtccatctccgcccgccgttgatcccacagccgcgagggcgagcccccaatccatcgcctcccaagcggaacccgcagcctccagagccaatgaccaccaatctctcgacctccgaatcatcatccaagactcctctcgctggctatagcgctgctctccaacggattagctgacatgagaagactctttttctgctttgcaagtcagatttgatttgtttttcttgctgcttgtaggtttgcagctcgaacatctgcactgaatcttcttttttgttggcctctagttctcgaatagtttttctgcttgtctacttaagttctgcagttcttggtcataatttttcctcctagaagaagggattcaagttgaatgccagtaaactgaatccggagcaagtgagcttgttcagaatggctgagcatgacaaggtggacaagctaatgatcactacgtcaatcaacgcttgagagattcctggtgtgctatgtcctgtaattcctgtgaattcattatctcaagatggctttgggtggctttggcttgttactgatggccatgtttttttttcaaaactatagcttattaacagcttgtggttttgaaagtgcctatctgtatatatcatcgtttttgtacgtggttcaatgtatattacttgttgtaattgcaattgtaaagtctacgtaaaaaacataccggattattcttccgttgccttgtatctgtcattgctggattggagtgtttcgatttgtccatcgtgtgtaatattcagatatataactaatatatttaaatttcacatgaaacaatcaagctgaatggaaaccaaatacctacagcaagaaacatctatggaacgcgatgcacaagcgccggcggtggccggacctcgcgatctgcttttctttttctttccctgcgctctcctttttgatggagagcgactctgctcttcgatggagagggatcgagcgacgcttgaccataggacgcacaaatgagaaaaaaattaagtgtcagatttacccctattcggttttagcactttactaatttaccctttaaaataaacggtcgagattaattctacttggagtagaatactgcaagtagagggcaccggagcgtctctccggaataaaacgctggcaggcgagggtcaatggattcacagccggtacccatggacacagatacatcaagcttatacctttttctacgatcgttcacctcgagaacttggttcttgagtttttcaatctcttgagaaatagtacagcttgagagcagctctctcagtttcaggatattgttgatgataaatcctctgatacctgtaggctcattggatttttcactccgagccatgaaagcgtcaatggtgtcctcgatgtcgtaggccagctcccttacctctttcatccaagccttcacttgcaagtggggctcactcaacatcgcgtacttctgcatcacggtgttcatgctgctcagctcgtttcgcaggaacagcacatccttctctactgttttcttcttggcatactctttttccagcatactggatagcttgccgaggagagactccatgactcctgtagaggcgctcaccagtgcacccgccatgaattgcctcggtttcttgacaggaaggacaatatcaacagctaggaaagaagataatcaagaagagttgtgtggaagagaagataatccactactgggctcccaggctatcaaacttattatgaagtcaagtcaagtgaacccatctcatggagacttggacttgttgtgcctgcaattcaatctatccacccaggtgttgaatagaaatcattttattttaactgagcgcgtttagtttggaaaatatatggtggtatatagtggaaacatagaaactaccattagatcgaaaaatagactttcgagattcgtttacgtcatcataagtaaaagttttacttgcaaatacacccatgagtaaaaattttactggtgatatgaacaaatctccgatgttcattttttgatccaacggtagtttctaagtttccacttcatatgtggtttacaccacatattttccccgttttgtttaccagatcagcttgaagattgaaatggacaactttatatctttaaattcatagttcactttctctataacattgtggctaccaatttccaaaatcatgtggtctagtcttggacgaaaagattgtgtgctctgaaatatctcccatctttgacgttgatgtgtctcctgcaatctcaaatcacaaaacaatcccttctatctgaataaatttcggttagctttgatgattttttctgaacaaattcagttaagcttgtttcttttgttttcagtctcaccagtgatgttgcagttcccccaataaccatgctgttgtagcctgtaaaaaaaaatgatcccttttacctgaacaaaattcagccgttgaggaggggagaaaaaaacaaatcaggaaacattaggcgagtaataatggacaaacttggtgcagttgtgatgcgcaatattgggcagtaagaatgagaaacgaaataaaatcgatgcaatttaactgctgctatgtgggattggagggatttgggcatcgagaaacgaaataagaaaccgacgcgattgtgatgttgcggtcacagatcggcggcggcggagaggagaaggggatgatgtggacctcaagatggcaaaattgcgattacggcggcggccggcgattgggttagggtggggtttgtgttgtgtgcttgggtgggtgggtgggtgtgggggggggtgctgggctagcacatgagttcatcaaacattctatgcagacgttattgtacatttgtactccctccatctatgtttatgtttttaggatatgtcacatccacctaaaatcccttatattttagatcacacccacccaaaattccatatagtttgggagggagggagtaaccaacacttagttcatcacaatatcaaacattccagattgattggatattccaacttctaggtaagatcgagttagcttgcgtttcggatattccgggatgatgaacattctgaactcaatgtggtaagtttccgataaaagttaaaagcaaggggaaaacttcaatttgccagaattgcagacaatccaaaacattggatattccaatatttcttgaaagctcacagcagagagttgggttggcccttaaaaaaagaagaggaaattccgaatgatagatactccgacaagattgttgggtattccgaccagaaaagcaatggcactttaagaaaattagtcattgagcactagtgtcaaactcaattatatatatgtggcatcccttttaatagtatagcatatcctaactctataaagataaagagtaaaatggtttaccaagaagacatgcctggatacttattttcgtgctaacaattggacaaaataaagcattagataattctagttgtgttgtcattaattgtccaaatcaaatagtgggggcttgcatgcactttcgattatcttagtaagaaaaagcattgttattttggcattgcattagtgatatagacctaaccaactatttcatcacatcctttaattgagaacttgtagctagttgtgttgtggtcatccactcaacttcgcagcttcaaatgtctttgtgttgactttgtgtttggttgagttagctttcctcccttgggagatgctctattttaagcccctaaggacctgtttgggggagttttagattctgagaagcagctgtttggcagccagcttctgagaatctggaaaagctctgaaacctagcttctccagcttctggcttcttagttcatttttcaaaatctaaactgtggactgtttgaggcagtttctagcagaagcagctgggacaagctcccctaaacagggcctaagactatctccaacaggctaggctaggcatagcagtacccaaacccaaaatacgtgctccaggggctactgtagcaggaaaaaacatggtccaacaggctaccatacaaaggacctattttgcgtgccaggcgaggcggaacccaaatatgagcgtcctctctcctcgaccgaaacttcatcgcaagcccgcgaaggaaactatctgcattgcagggttttcttttgcgttccctgttggagaaggcaagaaataggtgcatgaccttttgccgcagcgtgacgcataacgtccaatgggtctcctgttaagggcagtattgttggagatagtctaagttgccctttgtctaaatagactttgaggggctagttaggatacaaatcaaacattttaatcacccgatgaactatttcttacttttaagtgaggggatttatttagtatttatttagcacatgtttataagtatatcattgacattacccaaattaaggatttatggatttctaatctaccgctaaaatagatatatggatcatatatattatttatatggtatttagaaatacggttaattatattattgtaaaaccgataatttctataaaaaatacgacaaaagcagttggtacaacatcaaaatcattccatttcgcatatttcactattttgttttttgtgtttgtcagttattgtttccacatggtttaattagtataacattttttttaaaaaaagtataaacgtagacactcacaataaatgcacactcatctcgcacccaagcacattctacctctatgaccacatccggaaaactagaccgacatatcttgagattgataaagtcaccacagacacctcactgttcacgggtacgttatttatcattaaaaataattagcagtaaatataaacacccgtgttaaatttagaacttgaacttggatgaattgattccaccataagtaatctagctgttaaactacactcacttcgttaattagtagaataccaaaaatgactgtcagtaggttaggaacttctgctaccattttcggcccctttgattcaaaggaaattcataggaattttggtggatttcaatcctataggaaaattttctataaagccctttgaaacaaaggattgaatcatatccaatcctttgaaattcctatggaatggacaatcctatagaaattttagagaaaatttagcaagagcttcaacctcttggtaatttttctttaagactatctctctcatccaattcctgcgtttttcctgcggttcaatcaaacggtaattcctgtatttttcctacgttttgcaatcctccgttttatacttatattcctatcgaaattctacgtttttcctattcctacattttctcaaaccttcaattcaaagagcccttcacctctggatgcaaggatcgaggaggttgcccatctccgataaacttcaggggaaagaaatttaagcctaatgttagtgcctatcggctatcatcttatcatctatgtgccttcaagtttaagaccggagtatacttgtcaacagtcaaccttcttcctcttttgccgtgtcctgctcctccaccaaactcacctttttcatagctataggttcgaatcttccactgcaatgatatggttaattaacaatgcatatggccaaatatttgcaacacccgtttctttttcttcttgtgcaccacggcaccaagtcaagtcaaggaggcacactatcatataaataaggggacaattgcgttttttactctattttaaagactaacggctaatttggcccctgttttttcgagtttgctcatttgatccttttttagaaacgaagataagacttggccctattccgtgaaggcaacatgatgttgttaactcaagacaaatattccatttgtacccttatgaatttaacccaatttctcaaagtattttattcaatgcagttttgtgcacttattagtatatattaaattgcctcaaacacaaatacatggcacaaatttatgtctaccaaaaacaaaaataggcaaaaaaaaacatgtcaagtggcaggacaccgcgcagctgacgatgatcacctgagcccatccgtgcggagcagctgccgccaccactcctcactccgcccaccggctctgctgctccgaccctccgcgagccaccatgcgccgccgccgccggtgctccctccctccccacagaaccgctgtctccccactaaagtccaccaccgccacgccgccttcgccgaaccgtcggagcaagatccatcgcacgcgtgtctcggcactgcgcgcatgcctcagcgccaccggatccgtcgtctcatcaccgagtctccgccggatccaccctgccgccttcgcccctcctcctcatcgtcgagacgccgctgtcactcctccgcctcgtcgagccgccgccggcccttctcctcgtcaagccaccgccgctcctcctcttcgtcgagccaccaccatccctcccatgtcgccgccgctgtcgctcctccgcctcggtgagccgtcgctcctcctcctcctcttcatctagccacttccatccctcccatgccatcgccccgtggctgtcattgcacgaggagggtggcgggaggaagttcctctcaaggtctggtgagagagaggagaggcagaggataaggatttcaagctctggtgagagagaagagagggagaggataagggaacaatattgatgtgtacaaagggtattttggtcaactgtggctcataaaaaacttttttttttctattttctaaatgaaaccctaactgttttatgaatccacggtcagatggcaactcaaattttaaaaagtagggtcaaacaagcaaattttaaaaagtatggtcaaattagtagttatgcttcagaacagagtcaaagaagcaattgccccaaatataaatggagggagtaactaagagttgtcctacaatgccagtgagaataattcggccaaaagattcgcgtctgaaaataggttttagaataattaaaacttaattaatcatatactaatagcttttcgttttaagtgcgctaacttaatcttcatcttcgtgagtttcaaacaccactaatttgtttccaaatgagctctccatttttagtttaaacaacacacatttggggctagaggtaatcgttgggggtctgcttttcatcactatcttggttcgtggataatcagggagacagtgagaccgaggagtcgtctaaacgttaacgaggcaaacaaaaagagcaaagtttagaaaatcctaagctccatgattaaagtatgaaaaatattgtaacgtgtggcacataatcgcaggtatcatttcagtatatcaaatagaattttgaaaacaatacaaatttaaactatcaatcttagtgaagaacttaattatgaaaactctcatatatacttatgttttttaatgttaagtaaattcatactcaaaataagtgtcaagttctgtgcatctttaaaactataatacctaatgatgtcacacgccatgcaacataatggttttacgaatttaatcacaaaacataggttttctgaaatattacttccatcatatagtaattgcatttctagacaaattaaccgcaaacgcaatttagcacactaaccctaataattacaccgctgtacatttgaaaggaatgtttttcatatgtaaacttaattaaaaagaaagattggagtgcacattctatttgtttgttgtgttccatgttatcgtaaactagatgaatatcccgctgcgttactgcgattattaaaactaaaacaaattaatacttatgaattttgaaaataaaaataattaagagtgcatggtgttatcagaaaagaaataagagataatttgaaccatagatttatcattcaaaggctataaataattgaggtgatgtggcttaatgagataagagagaaatgacattaactgcacttaatgaggatgaactatataagtattccctccatctcaaaatataagcatttttttttactctggcacggtctccgagatgctactttgattaaccatatcgatgttctaataaaaaaaagttatatattatgatagtttgtttaatgataaatttagaaatatcaattttacatgatttatcttttttatatttttgctattaatacttaaagtttaaaatgtttgacttgtcactatgctaaaaatgcttatatttagggcgagtatatatgattttttttggacaaattttgaatgtgcaatcattatgggacgcaattattactgaattaaaaacgaagactttgtcccctgaagtcgtgaagtccggcgtcccctgctctagtgctctctagttttatactccatctcgctcgctcactcatgtcactcgtcagccacttccggtgtccatccaattccccagcaaccgcggcgccgatcgagttcttgggctccggcggcagccggccggtgttgggcgcgcgacggagccccggccacctgcagctagccgtacagccgccggcggccggtgtatacaggtatctctctggattctgtttttttttctttttttctttttcttttggatcgaatcggccccatcgctcgctccgagaaggcggcgttgatccgcgccagcgccacggtttcgaggggctgtgtgtgcccccgatttagcggaggagggcacggtggtttcgaggggtcccgagaaattcgtgagtttttcatcctgcacttcactttgttttcttgcttatcgccgtgtttggtgttgctaatagcagttattacttattcttattactattactattattattattactcactccgttttataatgtatgtgtttagatttattagtatctaaattaatgtaggcaatgttagaaagtcttacattgtgaaacggagcaggtattatttttggagtaaatttcagaaatgggacaaagttatgaaaaaccacgggtattaatgacgagtggcacataaccacatatgacatatttatggtctcattgttttctaaaacccaacctttattggaattttgataaattccagcatatctatggtttagaactttaagtaaattcacgcttaaagtgcataagggtgatattttgtgaaactttaaaatcataatacctgacagcggcggagccaaggcccggccagcacaggcaggcgcctaggctccgccacatgcatccatgcattagagctaaatatagcgtttagccattagcctagcttcacatacaccattagattagcactaattatcatacttggttattagccagcggcctaatttcgcttcttattcatgataaaatgctatatgtatttttgtttacttgttaatttgttatctatcgttaggtttgcccatgcctaaaaaaaattctagatctgccactgatacctgaggttgtgtcatgttataaaacctgtggttatttacaacttcaccaaaaaacacaatgttttctgaaatttgttcttatttttattataaagatgcatagccaccactacggggtttcccaaaccaccggggccggggttaccgcgacccagcggtaagcacggttaccgcgcagtaaccacggtaaccgtgaaaaaccgtacaaaaccgtgcaaaatttatcaaaaattcaaattatattttaaatttatttcaatttaaggaggttaccgtggtatttatattaccgtaccccgcggtaagcccggtaaccgtggtaaccgcgcggttacagtcggtaagtcgaaccctgccactacccactgttctatatgcacacacctgtaagcaagtccacttaataaacacaaagtgacggatgtcagaagcaaatttccaacctcactataaaatagtattaaaagggtacttgtgtgcttgcaatattgtaggtataagtattgatccctggtgtgtgaagtcatgtatgaaatattttgttatatgccattttcgaagatggcattcagatgtgcaagtgcacaaacaaactatagttgtggtatattaacctgtcaagctattagctaaacttgaggggagggacctaatgtttttctttgaaccaagtgatgggacctaacctttacagcctgtttggcaacaattgggaggaggaatgagagttcagttaaccagtaaaatactctctgtgtatcttacactggttttgggccaaaataaaaagaaaagaaaagaaaagcttccaagcaggtcctagtatgtttccgacattttctagcttatgtgagctagaaagtagacatgttcaaacgttattctccttgtgatctgaaacttaaagactctgtgtactcaatcaagtaggattataggaagctacttagtttgcttcaccttgaggtcttgtgaaaatgttgttcatcattttctttttgttcacatacatgatggatgtccactattactgttttcgcattttggattgagttagcaattattctgaatattttgcaaaaaactcaacatgaatagaattccccttacatggtgagtgattaaacagctagatgatggtgggagcaacggtttcagcttcagcgggggtgatgaactctctgcttgggaagctctccaccttgctggacaaagagtatacaaagcacaaaaatgtggaaaaggatgtgatgttcctgcaaagggagctacccagcatggaggctgtgctgcagaaacatgcaatgcaggacgagcttgatgttcaattgaaggcctgggtgagtgagttgagagagctggcatatgacattgaggactccattgatgctttcatggtgcgcattgagcactatagtgatgagtctgctggaattaaggggtttatgagtaagaaaatccacaagctcaagaagctccgttgtcaccataaattttcggcggtgtttcttgaactaaaagagcgtgtcgttgaagcaaacgagcggcgaagaagatatgaggttgatgggtccacatctggaaccacaaccagtgattgcttgttgattcccggttgccagcactctattctggtttagatgagcttgtaggaatcaagggtccaagggattgtataatcaagttgctaacttatgaagctgatagtggcccatcaagacagcaactcaaagtagtgtccattgtgggatgtggaggtctgggcaagacaacacttgccaatcaagtctataaggaaatcaatggccaatttgattgtaaggcttttgtgtctatgtcccagaaaccagacatgaggaagatcttaatggatctactatctcaaatactggggaatggtagccccatgtgctttgatgaacagcgactcattgacaagcttcgggagttcctaaaagataagaggtattaaaactgaactttattgtttcataattgcaagataataataaaattattgaaaaaaaactgcaatttttaaaagtatcaggtgttaacattctgtaaaaaagtccaagtcaagacaaacagagagagatattaaatgtgaactatacacaatacacatatgtgtatacatcccttacatggtagaagagtccttaaaatcttcatttgtgccttaatctttggacatgtctgagacatattagatctgtctggtctatgtaatttcaccttatcaatacttaattttccttcttttttaaatgacctattggattagtgttaaccatgccattttgtagtttcgtatttttatactcttgtttcttcttcggatcttaaatttttttttccgtagattcaactggattgtagtttttatttataagcaagtgacattgtgacatggggatactgtgaaatagctattgacaataaatcaaatattaaagtccctacaagagatgataacaggaaattaggagtgaactttgaacagtttttgaaaatgacttggttttgcgccttatctaaagcaatatgaaatatggttttcaacggaaacgtacacagctagttgtcatgtgccatggaatattaggtacagagcttatttgtattccagttaagtataggccctatacttttagagtaaggcgtctagtgaaaacgatggcatctgcggagtcatgtgaaggagattgacttgagtttttagcaattacattgttaagttcactatgacagcccggccaaaaaaagttcactatgaccattgtatttgttttaaagctccatggaagccccaattgatgcaaaagacaaggcattgtgttcagttagctgtttgggagggcaatgtgtgctttattttgtgtagaaggactgctatatttttttgtgttgtctgcatactgcttattcccaatttcaaacagatgcatcaataacaattttgcgtcttaagtcaccttagagaatttggtcagggcttcccctcatatacaagtttcggtaaaccttgggacattttgtatgccattcagatatgtcatgagaaaatcagacctacataaaacaagtacacacacagatgcagtattattttagtaaaaatatatacatgtaataaaaacagttcttataaactgttcacaaatttatgcaaataggttgtgatgtttatatcataagaataataatatagtttttaatatttcagaaacaccattggcaccttgtaactgctgatatatctctcaattctgctaagttctacctaacgcttgataaaatgtcaccaaaatctgtacaggtacctgatcgttattgatgatatttggagcacatcagcatgggagattgtgaagtctgcatttcctgataataatcttcgcagcagaataattacaacaacgcgcatcatggatgtagctaaatcatgttctgctaatctccaggaatatgtttacaccatcaaaccacttaatcatcaagactctagcaagctgtttgttaaaaaaattttcccttctgggtgtggtgttcctcaacatctgaaagaagtttcgaatgcaatactgaaaaaatgtggtggtttgccactggctatacttattatagctggtttgttggctagtaagtatgataggaaggatgagtgggaggcagtgcataattctattggctctgaacttggcaaaaatcatactttggaaggattcagaaggattttgatgcttagtttttatgacctgcctcatgatttgaaaacctgcttcttatatctaagtatattcccggaggatgacctgattgtaagaaaacaattggtgtggaaatgggttgcggaagggtttattagaaaagtgcgtggtaaaagaccagatcaagttgcagagagctacttttacgatcttatcaatagaaacatgatccaagcagtgggtgttcagtacaaaggtaacatatatggttgtcgagttcatgatttagtgcttgaccttatcagatctctatcagcacaaatcaactttgttatcgcgattgatgataaagggtatgaatcttctcctaggaagattcgtcggctgtccttgcaagctagtaatttggaagatcaagaaatgcagaaacttgtgagtaatcaatcccatatccgctcactcattatgttcagggcctttaagaaagcacctgatcttttcaagttccatgctctgcgtattttggatttatccgagtgcaattgtttggaggaccaccacattacatgtatagtgaatatgtttcagctgaggtatctgagcctcccttgcagaatcactgaactccccgagcaaaccgggaacttgcaacatctagaggtactgaacatcaggcgttgcatgatcaaaacattgccagaacccattgttaaacttgggaaactcatgtgcctacacgtgaagtctggggtgaaactgccggatgagattgggagaatgcaagctctccaggagctggagagtatctccatcccatgtaactctgtgaggttaattgaggagattggtaggctgacaagattgcgaagacttactgttgaaacaacaagcactactgagaaaatgggagaccaagaagtgaggttcagggaaatgttggtcagttccctcaccgagttgggcagaaatggccttgagtcactctgtatcagctaccctcatggacagaacttcatcctggattcattgtttggctctggctgctctcttccaaagtttcatgagcttgacataaagaattacctttgttgggttccaaggtggataactatgcttagtagccttgtgcacttatgcctatccatgtatgatattgacgaggaagatatgcgagttctgaatggcatctccaccctgctatttctccatttagaattaaggaatccacctgaagagaggctagtcattggttgcgatggactcagacatctgaacgagctacatgtgttctgccaacattccacaatgccattgacgttcgcgcctggagcaatgccagagctccaccgtttacgcctcgaattcggggcgagggagacgttgcgcatgtatggtgattttgatttcggcatcgagcatctttcgggactccgggatatcagagttgacattaactactactctggtggcactgacatggatgcagaagcagtggctgccaaggatgctatcaccactgcttccatcatccatccaaaccgccccttacatgatgtccgaatgcatgtcaccatgatgtttaccctgaaggaggctgctcagtcggttgggctccaaagcgccacgaaagaattgaatttagggacggattttcagcgcactttcgtccaaattggtaatgaaacctctttgccaacttactaccaatatatgtctttcctgcttgttcagtttagttacaattccttttgtttttaaatccatcagaagaccttgataatccagaagttctgcgaaaactacagcagctattatcacctgagtcttcgacacggaaccagtagcttgggacttgaagaaacaacgtatgtatcttctggaaatctggccatcaagatcaggtgcgagtatggcaaattgattgaaattcgtataaaaatccaggagattcgcaatgttaatgtgaggtatctaagaatctggcttggaaatactccctccttttcatattataagtcattttgtctttttttcctagtcaaatttatttatatttgaccaagtttctagaaaaatttatcaacatctacaacaccaaatcagtttcattaaatataatattaaatatattttgataatatgtttgttttatgtaaacatgttactatatttttctataaatttaattgaacttaaagaagttcgactaggaaaaaaatcaaaacttataatatgaaatggagggattatcttgatgtgggataaaggcaggagctctaccatatcaattgaagtagggcggaaaaaatgagtgtcatttttcttttacaaaatagaagtcaagaggagagccaaagtactttttttttataaaggaagcttttattaatcgtctgagattacaaaactatctttatcagttgtacttttacagaatagaagtcacggtgatttgaggtttcagccaatgatggttacaagcggccattatgagctctccgtaaatttgcatccccatttagcttttgtgcgctttctagattaatgttcttttttcaaagtcttctagtataaacttgcatgaccatttatcatcatacaatatttgtgtatatggaaaacgataggaaatgtgatattctggtccaattaggatacggcatgtgtgacccataaaagttgtgtgtgcatgttaagtatcatattgctagtttagtaagagtaaaaccaacttataagggtttgtctctcccaacgtaacacttctgagttaatctttttacacaaaatgaaaacgaaagtataagtggggtggtatatattggccctctttgtttaggcttaggcttattggcctagacttttaagtcagcttattggcttatatgatttataagccaatggatttaatgtcctaagtttagtggtggagtcatacatctatctcatataagccaaaaaagcttctccaacctagcttttggcttaatagtgttagagtggcttatggcttcaaaaaagccaaatgaaaaagctgcttgtttgttttgacttagacttttcaacttataagtaggcttataagcctaaacaaagagggccataaatgagtccatccgtcggataggctagactgtgcggttttggagggtaggtagttacaggggtaggtagttacagggattgtgccggataatgttcttgtcttacaatggacttgtcactgccttctgcaaactgatccctagtctgatgttttctggataatactagggattgggtgatcaaaatgttttatttgaccgtctgaaacatcgaactttttgcatttgtctcgtgaaacgaagagttagtcattcaaacatttaaaagaaatgcgaaacacaggtgaacgattttgctcttgcgcataagacattgaattgtttatgcatcaggggctctccttttcttctcgatgattctcttcttcccttcaagcagctgtaggagctccttagaaatcaatcttgatataatcagaaaataaaatacttagaacttgtaaggaacattagatgcatctcatgaaaagagacttgttgtgatggacacatgttgctttcctctgagaaaaagtcagtgtctgcacatttcctgtttatgcattccttgacaaaaacgaagatgcatctacatttcgacagatcacaagagtaaataactcgacacatgcgtataggaacaagcttggcatcctgttcggcaactcattgtctggattttttatattttggctattttcaaaaacttattttgtaaatagatctaaaaaaaattatcgtaggaatagacccttttcgcgatgccagtaaccatgcatcaagattcaatatctaggcgccagcgccgatatccttgtcccccagcagctgagatgtggagggtcggtgccaaacatattggcactaaagatctatttgtaaaatatatttttttaaaaaagggttaaaatgtaaaaagtttttcttacaaataggttcatatcaccaaagagactgagtgtctatttgtaagaaaaaaatatttacattttgacccttttaaaacttttatttgcaaatagatccttgataccgatctcttttgcactaatcccttcacatcagcgacttagctaccaaggatggtgaggacatcaccatcagtgccattgacactgagacattaaacctgagcatcaataactctggcgtcgagaagcctcaccccttctaattatttaatattaggtccttctctaatattcgcgttttttatatcctcgaattttggtatggatcattttcataccctttttgttagttgaccatttaattcctatgaaaaggtctattttgtccataggtacagaaaaagcatataaattttgtagagtatattgtttgaatgtaaaaaatatgttgtacgagactattaaatttataagtttgttatgcgatatatttatgacaacatttatttttagatgtgcataaaaataatatttgttttttaattattaaaaaaatgtacatatagcatattttcttacactagtacaacagattttccatctgttttatattttatttaaaagaaatattgtactacaaggctaattgtttttaacattaaaaaaatgctacacataattttcttgaatactatattaaattttctacatttaatgttttctcatacaacaaacttattatggatattacattcacgcaacaaatcaccatcagtagttttctcaaatttcaaacattccatgcatgtccaagggtacaattgattttttttaagagagaatctactccatggcactaagtttaccacagttcaacgattttcactaacattatctctttctaaaatataccagtgactttctcaattgttctacaatatatcattgggatagattttttaataaaaaaatccaaaatacccttagatacatacaaggttaacaattaatttatcttattataagttttaaaaaatatgaaaaaaaatgtagcctccttacaaaacatggaaacttgtatataagattttcaagttttttttggtatatttattttttagaacaaatatttttctgtggtataagagagagaatttgtttacacaaaatataatagcacaaaaatatcttatgtaccatatgaaagattatttatattaaatacaccgacaaaaaatattttatatagcatataacagataagtgatatttaaaaaaatagaaatgcaaaaaacttgaaacttaaatacaaaattccatgttgtgtaagaaggctacatgaaaattttcatattttttttgaaacttctaatgagataaaccaattgttaatgttatatgtccatacagatatttttgggtatttttgaaaagaaaacccggttcaatggcgtattgtagaataatttgtaaagtagccaatatattataggaagagacaaagtcaatggtaaatttttaaactcggacaaactcagtggtatagaatagattctctcttttttacttgttaaacggttaactaacaaaaaggatatagaaaagatcaaaagtaaaattaaaattcgagagtatataaaagaatgagtaaaactcaacgacattgactaatttaacaatatacaagggattttctctaattagaatatcctaagaacattctaaccaatagtctatgcagcatggaccctctcactctccctttcatttccaattttctgccacaaagttttgcaacacagttctattgtttctctaataaaaacaaaagctatctacttcaaatatggaatatttactctttccatccactaaatagtccttgattggataacaaaggtaaatgctatctactgcaatctgaaaaagaaaaaaaacacctaatcatgctgcactagcacgtgaagctgctgagcttttttttttttttgagaactgctgctgagcctgaaactcggcgaacaatcctagaatgctggagcagcaaaaaaatcagccaagtagccaaatgctgacgaaaattcaatcttacacaaacactaatcccatcaagccaccaagttgccagctctctgaatgcgttttttttttaacaaacactacaatacaagtgtaaaaataaaaacaatttgctctgcgaatcaaattatggaaacaataaggtttgattactttttccatatatcaaattcagaaatatattttccatttcaacttatcatccatttgtaattgtttcatacttcgatctacccaaaaaaaaaatgagctcccaagtagtgggagaggaaagtgatcgtaatgagccgatgactcataagcaatggtttggttaagagagcgtaacctgtcggaattgtagcgaaagcgactcttaataggacaattttcactacttacggagatccgaacttaggtgatttatccatgactaggataaaagtcagattgaaactatcctgcttgatgtatggacatgctcttaactgggaaaaaaaatcagggagcacatctaaaaattaggaatcatgaactgattgtggcctaaaatcgtagcatgcacctccctaaaatggtctccaagaaaataagatgcatgctgttgattttaggtgccctaaaatccttcgatcacgagcaaataaaaaggtcaaattaactagcgagcacaacagtacacaacatgcagatcggaatgaacccattgcaaacgcagtaccaggtaacaaatcaacttcacctctccggaaagacttctctctttatgggaagtaaggcagcgttcgagagggtgagagagtgagtttgtttgtttcgttttccgcgcgcacatttcccaaactactgtgtttttttacaaaaattttctatagaaaagttgctttaaaaaatcatattaatccatttttgaaatttaaaatagttaatactcaattaatcatgagctaatagctcacctcattttgagtatcttcctaatctcctcaatccccttcttctcaaacacaccctaaacacaccctaagacatgtactaataatgagtgtgactgattagtcgcacgtgcaacaagaaatataattattatatgattaattaataaaaatgaaaaataaatttatttgattttttaaaccaacttctacataaaattttttatactaaattaacaattggagaaacatgctatagaaatcgaaatcgaagaagtaaccaatccgttcactttagaacagagtaacagactccctaaggaaaggagatcaagaattcaacagagatgggccgacccaaaaatatagggtatgttcactttaatatcatttttaaccttaccaaatttgagtattaccaattttagcatagttaccaaaattttggcaggatttcttatatagttatcaaaatttgacagcaaactaaatgtaaccacttttttgacaattttactaaaatttggtaaggttgaaaatggcatcaaagtgaacatgcccatattagcctacaaaatttcaggtactgtgtcctagtggattccagatccgacaaagaaacaaaagctcatattcgtgcacaaatcttgaagagaaatggacggccacaaaattcaactaaaatttgtgcagttcccagtcacctgaacactagcaaataccaaatatatacatgtataattctatctactactaaatagtacagtaagtcctaagaatccgtctggcgagatcatctgctccgcttttcttgtaaatcagatgcaaattgaacgcagcctctcttcgtacatcgcaataccctggcttgagatcctgctgggcacaggaattctcctcgtatggaagcctgggaatagggtaatctttcacctcaacggctaaagccttctcgtagtaaattgctgccaaggtgttgaggccaacatgatgatacgcccgagcgatgttgtacaaggcttcctacaaggcgaaaacatgattaacaatgtaccttaatttatctgtaactgctatttattcaacttgaagtcctgtttaactgacaagctagttttctgttttttgtggttgcaagagaacaaaataacgatatcaccccaagcacctaaacctcaaatatccaaaataaaggtgtgctctaccatctatttccagactcctagccaactaacaaccatgagatttgattatggatttgcggcgtagcaatgaacactgaacaagatggatgcaaggtggcccataagcccatgtggatgggaaggttgggcattgcgcacatttcgcaaattttggcaagcacccgtgcatggaacaacacaagaagccagatttaagcaaagaaaagagtaacagagtggatgtaaaacaattctgtgtttcttatcccacttgcattatattaaccaaaaatgtcagaaatggtaaaaaatggtaaactttgaaagtaattgtcctgaaggaatagaagatctttttggtggtacatagagagtttggttaacaattgatggtaaatagggcatttgttttgtgtaaagaccaagtgtaaacaattctctctttttttttgtgtgtaaatagggcatatcaagcttggtgtagcaaccaagagtgcaagaaggatttagaattcctatgtatggccttatttcagtgtgcattagtattgcatactgaaaatcaaaggcaaacccaaccgaaaccaaatgcaggaccagaccaggtcaccttcctcgattcctcgattgctgctgtaagccttaacaccagcttttaaccatgggctcctataagtaggtcagctgaggtgctcccagtctggtgttataaattattccacccaggcactgaagtacggaaagcaagtaacggatgcatatgcttctgccctgtgatttgtttaatcctgtggacctgacctgccttttggggcgacatgcatcacaaagcgcttacagcccaggcccaaatgatgcaagtgctcagcactgcaggctaaccccagccattaaatttggtaaaaaaggaaaaaagctcggccactaaacccataaggaaacagttgagccttactagcagcttagatgctgaaaatactagagcattatccatatggattataaggacaaaacctggctgttgtcacaaagacgcagatatcgaaagaggaatgccaaagcttgaacgatgcactggttcttattctgaagcctaaagccaagggctaaattaattagagcagatcctgcaaatgattgaacagctacagttagtactcttatatgttgatacgtgttaatgttaatacttaatgccattgttttggtggcataccaacacagagatttataaatggattttctgggttcaatttataagcttccagataatcacgagcagctgactgatgctggctgatagccgtaaatcgatggccagatatgattataggaggcacacagtcagtcttttcttctcttgtccgtagaagaaatttatgatgacgtgagaacctatcttctattctgcaaagaaaatgtgaaattagaacaagtgaacagctgcttttgatttcaaaattttcatggtgcaactcgatatatacagactatattgtttgagtattatcagagagtagtacaacggaaactggaaactgaggagcctagcagggcaagagcaatgtcatacaacaccagaagggctattggggaagtcctagtggatattgcatataaaaaaaataaaaatgtgttgaacaaaagcatgttctaacgaaagtggagattaaagcactacctgttttttttttgaaagcagggattggaaaactaggactgaccaacaatcagcattttaacaagccaggtgagaggtttcaaattcggagttgattaggattcaactgaatatgctaggtataccattttcaaatactctgtcaaaacatgaagaattgacaacacaactcagccctttttcatggtgtttatgccaaaaagtgcaaaaaggcaaaaaccaatcagccagctctaggataccttcacccaattcacagctgggttttgtggctacataagattgttcaacactgtttatcgctataatctaactgaaacgaaattactaatgctggcaaaaaaaaaagtaaaaggtctttcaaccggacaaaaaggaaccaaaggcctatgccccacaaattgtatacaacatgcaaaatacagaacatatgtagtgtgaccagtataaataaatgcaaaaaaaaatcaatcataatcattccaactaataaatgcaaaaattcaatcataatcattccaactattaccttgatgtcaccttgtagtatgagttccatgcagcaagggaatatggatgctgctgaactacatagcggacataattaaagccatgtctagggtctggagctctataagctatttctgcaaaattgcaagaacaataatatcaagtcaaacgaactgtcataaatattaccaaataacctgtctcgattttcataatataataagaaatcgatgaagtgtcagtgcgtgctactcaatcactcattaagagtgtcaacaaaatgacactaatatagttgcaattggcaaccagattcactcatacaatatcaccctggtctcattctttaccatttcctgccccagcagcacctctccattgggcctacccgccactcctaggtacagccagaacatagcacttacggcagaaggcatgggaattccaatgtggagaacttcaagaccagctctgtgtcccacatcagttaacttttattatgaggtgtgaggtcattctgatggttgcaaatcacataattgaatggaagttcctagttgcaatagttgcttgtttggttttcccacactgccaaattctatatgtttttctctagctgtttggttaattgccacaattctgacgtgatagtctttttgccctagagccccctttcatacacctgtatgcctaaggtgtggccagcaattagttttatttaccaaaccttttttttagaacatgcaggagatctgcgattaaccaaacctttgacaacatgtgaaagggaaaaaaaattaggaaggttcaaacccatcacttcttgacatccgtatggatggatggtgagcttacatcaactgggctactgcacttagatgattagaaagggagttaacttttttcagaacagagcaaaggatttgattcttttactggacctttatctgggtgagccaatctgtcacatttcccagactgaagcaaaccatgttaatagacagtttggcccaatctgaccagtggaaaggatgatcatcacatggggaaaaaagaggttaatcatttgaaatgagaataatggaaatgttggatcaaaaactgaaatctatagtatgtcgtcagttacaatgaactaactgcatgtagcattttatcaattgaataatacatagagctgggaatagatcttacgagcacccaaggatctgagctcctctttgttctcatcagcgagagtatcatttccaagtttaagagtacggttgataacttgtagagcctcccagtatcggtgaagcaaagctaatgtttggcaaagctacaaaaccaaggcgaagttaatagccagagtatgatcagaaaagcagcatcaagaagtgagctatgtcaatgtagaacagacatcatggaaacaatcaaacagttggccaaaataacagggtacatataaaacatgcctgctattatgtagaatcttattttaccattgcacattaagctatgagcactaaaatgtacaccacaacttagtgtttgtgatgtaagcagtatgtctttgatggggcaatcacaataggcctataatggtgaactaagacacgatttactgaggtccacaaacttgcatggatgtgacatctaggtccttgtactcgaatttaggtgtggtgggtccctaaatttgcattacagtagcacttagaaccccatagttgtaggcatatcaatttccaagtcaactaatgtttgtagttgacataaccttgcaaagactaccaatgtgagcagctcatgcatgtacaaaattaatcacaagccgggaataattacatctccaattccttcagtgcaatacctcaaaagctcagaatcacagcttcaaatcaagtacgagaggggatttagaaatacaaagaggcaaacattagtggttagcacctaaaactgaacacagtaccagcaagatattcgaatatgattatatgaataaggtgcgaggaacaaatggaaccgaaacttatttaagactgaaattgtgctgcaaagggcctacagtctattaagtaggacttgctcaaaatgttatgaataaagcgaagtgtcaattgcaaaataaaacattagcaaaaaggggtagggaaaggcatctgccaggtacggacatgtaacacaagttgatggttctctgcattcgtaagtagaccagatatcggaggtatttgcttcgacctttgctaaaaatatcaaacaaggaaggcatgagtaatttggtttggggaagaaatacttccaagtagaaacaccagcatagaaggaaacagataccagatcatcttttatcgtatcttcattcgaagctgctcttttctctagcaacttctttgctctgcttgccttttgtctagtaaaaagtttaacaagcgtcaatacaaacacagaaaaaagatacgtcaggcaaaggtgaggtcaataataaacatggccctaagtaattgttgaatgtaatcaaatcagaaggcagcatgataactgataaagaactaaagactggtgaatatagtacatgaattcacagttgccactttcctggcatctgggtcaagtggaggtcaagatataaggtcatgggaccaggtcacgggttgctaaaaatgtgggccatatgggggtattagtcttcagtattcacgacagtagtgcaggatgcaggacgtgatcctcatgaattagtgaccgaattatcaagcaagtagttacaatatgatccaagaaaatttctacaaaaaagacaacaatagcaaaggaatagctaggaatagattgttctagattgtgtgcatcatcagaactgacatggaactccacctgctaccatgcgtgcaaaatacatttgtggactgtggttctgtgtattctacctaaaaggccaaagcctatttatggctctcaaactattcccaactccttttttcatccttagtttctaaaaccacgcaaataacaccttacaccctattctgtggtggtttttgttgataaatattttcggttgcatggacttgtgataaactagtctgataaaaataaaagataagtaaattgcatcgccggcacacgaacttgtcaggtgggtgcaatctagtgcacgaacttgtaaaatgctcgttttggtgcataaacttgtctggtgcgtgtggaggaaggcgacacggctaatcttattgatttaggggctgattaggatacgatgtaaacatatatctgagaaggttgctagacatatacctcttcaataaaaaatagaataagatatagtgatagtagaaaaagattaaaaaaactgagcaatgatataagggttagaaatatacgaaattcatcatttccatgatgaatgataaagtagagaccaaatttataaatattgcatgtcttatacatactcactactatgcacgtaatatcttaataaacatcaacttcgtaaataacattgccaagttatttttatcctcgtttggacaaactagacaagttcgtgtactgaaacgagtattttacaagtttatgtactaaattgcacccacctaacaagtttgtgtaccactaatgcaatttactcaagataagtaaattatgaaataatagcatgcttacaactctgccggtgatgctattggccttaatccttgaaacacgctttctggacgttgttcagctaacactttggctctttcatatagaacattagttggaagttttttagctttcctcacctgattgaaatgtcacagaaaatacataacatgaccttaacacattaagcttcataccccaagagcaaaccataaaccgctgggcatttagacatattgttatcaagaaacataaaaataacttgtatatctctaccacatattaaaggaagaataaacaaagatgtatgagaggaccacatcatcctatctctccaccacctgttattcatccattaagggcaaatagaaaagcactacattgcaaataaaattatctagaaaagcgtaaaagtgcacaatagaaaagtgtaggttcctgaacctaccatggttgccatgccatgtgccaatgtgtaccccgtttggtcaaccaaaaaaagcattacacgtatataaaatttacagaaaaaatagttgcttcatagtcaacacatgaacaaaatcctagtttacaaaatgtcaactcaactattgcagtagtacccaaaaaaaaaagtgccccaagtctcacaggtctacacaaattctgtattaaaaagcaacacaatttgatctcataacaagaaaaatatttggaagaacaaacaaaattattaaaaactaacacaatattaaacccagcatatgtgccttcctaatcaaattcctggaaagccaagaaacaaatcaaacacataaagctatttaacaaatttcaaagtgattcaacttcaattaatcttagtagaaagttgttgtgcgcctggctaaaaaagaaaaagaaaaagaaagttgttgtgcatgagttacacaaaagcaagcaggctgatttcatagctcatataattgataagacagtaaaggaaaaaaacatcaggtggaatacagatcagcaagaacaaaaacaaatactaacactgtcccaaaatatagcaacttttccacctaccgcttcttctcaaccaatcacaactatcccccattcaatttcccctatctccttaatccccatgaaaaactctagaagtgcttatatcttgggacagagggagtagatgtgcaatcattgatcaagtaaactaaatgtgaatcaatgtctctacctttcgattagcatactcaatattcagtgtttcaagaatgggtataagaatggtgcccacaaagtcctcgaacatgcctttattgtaatatatgttcgcaaggtgcatctttactttcccatcaagccaccatggcttcggttgatctgtagcagactttgaccctacaaatgccattaaaaaaaactgaacaacgaaagcagctaattgcattgaacaagctagggatagtatacctgaattgttaggaggagaaagcaaaacaatagcttcgtcactcttatccacatcaacaaaaagagaggataaagttattcgcacatcaatgttgtcctccattctttgcaaggctatgaaagaataaagaaaactacatcaaagattcaaaattgataataatggaaaaaactaactcaaaagaaattaaataaacaaaacctcatgccgaggatgttgaattcccagcattaggggtaaccgctcctttacatagattcaaacctcacatatgttctaaaaattctaaatgaatataccttccaaattcacaatcttatatgttatggacattgattcatggataggataagggtctgaaacagggataaaggtgagatcgctctcatcggtgttagccttgtcccgatcatcaggagacactaatacataagtttaggcctagcttgatcagagtctcctagtgatcaggacgagcccagcaccaacaatagcaatattgtttacatcccaactttgaataattgtcatttctattgcacaaatctcagagcaattcaaatggatagtatagcaggagtacatgaaagtccagaaatgtggacttacatttctcaaaagaaccttagaaatacatgtaacaccccagcaactacaataagcctgagacgttactaaacaaccatgaaacaatgccaaaacattgaaattctgcagaatcttctcacaaagaaaagtattatggaagcatcaatatatatatatatgatataatctagagccaacagcatgctaacaagtaaaaacaaactaagcaaagttagataaaccaagttttacgtctcaagtgttcatttaaactattaactccataagtacatctattcttcataaatatgatagcacaacatttaaaaattaaataggaacatggcgtgcaaaagttttggtactcccaacctctaaagtaggcatgccacatcaaatacctggaaaggctgtaagggtgtgaggataaatctcaactagcgaacagctttaacaaattctttaaactacaagttcattaggtcatgatataaatacaggagtacaagatcattttaagtaattgtcattctgtcagaccataatgaaaacgaaatttccgtttttcttctagacgaatacgatattgctatcttttaaagatactttaggatctaggtattttactagttagtcctggtaaagctcccagacggcgtatttttcgaaacgaggtcctcagtaacgagacataaagactcctttttttttccttttttttctttttcgtataaaatccaaatgaaaactgaaaaaacaagttaaaacttgcaaataaacaaacttcataacttcatgagtgaaaataaagcaacattgtgagaagcaaacacatctcaaatataactccaattgtataacttccataggagaattgcaataagttatgtagagtggcttccataggaaaacacctattgcagttttgctagatgttatacaatcggggttatctttgagaagagttgcttcttgagaagttatgcagatgtggctttactttcaccaatgaagttataaagtttatgtaaaagtttaacttaatttttttaatgaggttgcactctcgtatttaaataatcacctaatgaacttgtagcttaaataaactgttaaagcagtttgcttgctgagcaatccttctaggtacttgatgtggcatgcttgcttgaggggatgggagtagcaacacacttctgcacgtcatgttcacatttaatctttaaatgttaagttgtcattttaataaaccataatgtatttattgagttaataggctaaatgaacacttgagatgtaaaacttagtctatttatctttgtttaggttgttttacttgttagcatgttttttgctcctgattatattaccagcatcttaggcttgttgtaattgctagggtgttacaatattttttttatatttgttctgttttgtcttaggcttgttgtaatacaatttttttttcatttgttctgatttgtcttttctgtatggccatgtcatgtctgcatttctcagaatcctagaatgtctcgtgactcttgtctatgatttaagaaactcaatctccataaagtccattcaaataacagtcaccacccctgacaatagaatttattctctcttttgtaataccatattctaacgattttgagaacaatgcatagaatctggtgtagggaatgcaaagcagaacaattatggaatattatgagaatatcagaaagcaaattgattcagaaaagaagagacagggcataagatcctctccatgtaatactactttcaaagctccaacaaaacattgctgtgacggattttcaccagcattatctttttatgtatatcttaacttcttaagcaatctcaagtttgctaccaaagaggaagggtttcatgaaggaaatagaacagaacctttctgaaagtaaggaattgctttccttttctcccctatgaccatgtagcattgaccaactttcacatatgaactaccctgaaacaagttatagtatatcaaactagagaagggtgaaggaaataaaatatacatacaacttcctcaatcccttaatggactaggtgattgcgatggtgtgctttacacccatcctttcatttccaaaatatcatttattgatggatttctgtaggcatgtatttatagaatcttttatgaaggattgcatcctttgtacatgtgtaagcaagtgactagttgatccattgtgaattagaatgttttctgtagatttttaaataccttttttttatgaagcattaaagcagacaaagcccattccccattcctgatcatggtaccattatcaagccttctaaagagcatgtacattctaatcaaatttggaacatttgtggctagctagaagatctacatgctgttaaaagcacattctcaaatgattaattgatttttttatcatatttatgttcaaatcagctaataggaactgctttgcccccaacttctttcagtagcagttgcctggcttcacctcttctgggttacgtagttacataattttattccactataactcacgactaatggataggttcaaatttattatgttgagatgggcttccttccccttccaaaaattatactcattggaatcaaaccagatgtttgtttccaattaccaagtctatcataatcgtattatgcacttatagcattaccttgataagttatatatgtcaaaagattcacaggattgaattgatcttctgaagacttcacagcatttaggaaaaagttcgcttaacactttgtggttagtcaatgtggacaatgacgtggtgggtggtgttgcttgcatgacacacacaccaaagcatgtttcacccaagtttgcccaagcaatcactttctttagtcagcaagcccagaaaccacctccagtgctatttgtacttcttctccaagctattctgctagttaaaaaatatttaactgaatccatcaccatgtcactgttctcgtcatcgtccacatggggaaaacacttacaatacaactccaggggggagggggggtttcaaatagttgttcatgcgttggggagtagaatatcaggttttgtacttcagggggttaagtagaggttttggctttttgccattatttataaatcatatggtcctaattatcatttgttccatgcttaattgaacgctagaaacatgtaatagtgaaacagaacttcaaaatgaagcaaatcggctacttacatcattatgaacagcaacatcttcaatcatcaggtaaaactttattgcatactcatattgtcctaaattttcgagagtgctagcaacctccttgatcacatcggtgttatcttttgaacgctccagatgcacattctgaagaaacacctgcacaagtaataccaattcaataactaagaaactcaaaactatacgttgaagtagtcttggatacagtatatacacaagcacaatctaatcttgcagagtacaacctgttatcagagcaatttatagtcatatcgaggatttatagtgtctaataaaccaatggtagcaaaaggtgggttttgactaatcaaggataaattatgtcaagtgtgtgctataatggaacagaactgggacaaacctcggcatgcttcatatctccaagataagcatggcagattacagcttttgcctgcaattgtactggcaaattgtgttgagatccaaacactatatgtgctctctcaatcagcctcaatgcttcattataggcattatttctcagataaagggatatcagtagatccagatgattcgagtcgatgtttgtagtttgagcattcacataatcctccaataaattaatagctttatcaatttgaccacagtccctgtacatctggacaaaaaagtcacaaagcaataagtggaagtctagaactaactcagcagtccatattgttatgtactggcttcagtgattagatagcagttcagatatatgagttcttagttgtgtcatgtgcatccaggtgtctagagtcaagtcttagcagttggcatccaggagtccaagagtctatagaagttaagagccctcatacttgcttgtgccttaagctaaatagagataagtgtcctgtttggatggtgctaattggtcttgtttacatgcatgtctagggacctatatgtttgtattcattgactcaaatagaggcatgaaagatcattatatctgtatctccctcttgtccctgactacaatggttccctgccgctggctaccaggaagaacctcattcaccaacgctactagcccataaaagctaaaatcaatttgtaatttatatgcaccacaaaataacgcaagaattgttataagcaaataaacctgtgctgctgctttacgagcaacaatgtttgaaggataaattctgactatctgctcgtatatctctccagctttctgatagtcatgcaaagcgcgatatatattagcacaatcaaacttcagtcctacatcttcaggatctgctctcatcgcttttaaaacacagtgtcttgctaaagcagcatcttcctttttcctgacaaatataataaagtagtcaatatggtccgttatattattatttctggccattgtatgccttacctccaagaaaaaattatgctaggtaatcagcaattaaggtactttgggttcatgtattaacaagaactagaggcttcctgaaaattagtatcataaaacataaaagcaaaattgaggtctgaggatgagaccatattactgaatgcaacatttgtactctgcataaatcaagctaactactgtaacaaattaaaagtttatgaatagaattaaaaaaatgaaacatagaaaaaggaaaaaggattagcattaactcacaatgccatgtcaatgagtttcttccacaaaaatacatcctttggagaaacatatgcagcgagcattagaaagtttatggctttatctagttcaccgcactctttataaatgctaccaagtagatggtatgaatttgacaaattcggcgcgatccgcacaacctcatgtaatataggaattgcctgcagtttagtagagtagacaaggtaaaggttactgtcatcctaatcaaacaacataatagaaattgataaagttagattgtaaaaatttctaaaaattctatagtgttgaaatcacatattttatggtcataactgcacagaaccctatctttcatgcctaatgttactaaaccccaggtttcttggtcataaggttctggaacaaatgagtctgtaacaactagattagtcaaactggcagtgatactatttacactgctggtttttctgatgaaccggactttccttacatcaacaattagtttcacctagcaacccccattgctaccacaataaattgtagtttggttaaaggtgggatttcacaaaggattatgagtcttaacaagctaaggctgtgtatttgacaacctgccctttcattgatctgttggttgtagttgaaggttttgaaatttctgaaataccctcaatcaaacggatggctgtcttgtttgatgattaaggattaacattacctgattttttgttaatcttcatttacttgaaattattggtatatgtaaattgactgcaaagataatggttgaatgcggaatctcatgaatttaacattttctgtcttgttccaagaacagtatatctgagctgtgttttatccaagaaaccaacaggaaatcaataagaaaacttatagtatgtgttataaagcaattcttgcaacacaggaaactcatctccagtaagaatctgaccaaatggagcaaaactcttaattgttctaatcatcagcgagcaattgcatctattcttataaacaaaggaaacttctaactcaaatggatataataaaccaagcctattttttggtgttccacaaatctgtttcttcagaagtggttcatcagatgctcataagaactccagaatcagaaatccgctctgtatttcagcgacttccaatatctaaacttgaatagtcaagaaatagcaagacgaaaagtcacaactttatgttcattgatcatctccagttcctaaggaaagatgggaacaggaattacaacaagagttaaacatgacacacaagccttggagaacagaaatgtgttcacatggcattcacatctttgatgaagatgaggtgactgcatgatggtgcagaccttatcaccccttgaaactgccatgccccgatctagtttctagaataactaaaaaaaggttgttcgttctcaatcttgtttccttagtaaaatatcctgcctgttacgcttcctagccaagttttcatgcctagcgcacctaatcaatagttaggcacagagccccagcctgccacctgaccagcgcctagtacttggattaacacgactacacaagattataatcaagcataagcagatcaattactaataatccttgtggagaccagctcatataatctttgaagacactgagaacttggacagattaaggtgaaaacaattccaaagcatactccataacaaaagtttgtaccaatagtagacaacgaggtcaaatgaacatgcaaaattccaaatcatccagctgatccatttagtgatcatgcaacttatgaatgacaagaagaaaaaagagaacttccagtctttagctaaatcagaagcaacagtcacaatattgccactagaaaaattgagtttgccacaacaacacaaatacacaataaacgtccttcaaaccacttatccaaacatagagcatgtaattaatatcccccaacaactattgattagactaagaaagatagagattagacctccttaaatctgctctctgtaaaaagcagtgtggcatcacccaattttttagtaacttcaggactgtacttattccttgttcctttctttcttccccttttcctggcctgatgaaaatgaaaatataaaaagtaaaaaattatgttgatcacttatgaactgcattgagaacaacactcaatctcaagtgtaaattaaaacttaggcatttacaccaaatattttccaaatcaactcaagaatagtttctacaaagatttcatttctataagattcaagacaaaaatatacttgtgttgtgcacatcgtagtcaatgctacaagggaattttttttgcatcatttgtgctgacaaattaaaaaaatggtaccatacatctttggaccttcttttcctacgaaggccaaagccttccattagttggtcaaacacagtcgctgcttccacttctgaaagcccatcctgccttggcttctttgaagatgcatccctggatgatgaccaagacattgaaatgtatactcaggaaatgcaattgctttgcaacacggtatgtgatgaggaggtgatacaatgcctggaacagacaacttaaaacagaacgcaaagacaaaaacaagctttaattatacttcgcaagttcaaagatcatgacatgaggagaggtgattgataaaactaaatagaaaagaaaaaaacaaagatatattttaagaagaaatgcacgatttgctcatgaaaccactactagactagaagattagagtatagaaaaacagtagcatcagtggaattacaccaaactgtaacgaaatataattataaagctacttagcaaagagaaattatcttagggagcaggttcaacgagatcacctttcggttcgctcctcggcgagggccttgcgcttgcgcgcggcgagcgcctcgtagtcatgcacgccggcgtcgggggcactccgctccgccatctccacgcactgcatcgcctcctcggcgtcgcagaactcgtactcctcctcctcctcttcctcttcctcctcatccccgtcagggtcctcctgcccatcggcccccgcctccgcccccgccgacccgcgccctagacggcgctcctcctccgtgtccgacatcaccggagtgcgacggaatagagggttcggcgcagcagcggcgagctaccggggccccggaggccggagctgcggttaccaatgttagtgaaacctaaaggcgggaggcgcggtggtgcaggcgagacgccggggagggagaagacgagaggtcgacggcgatgctgcggcggcggaggacggcggcggcggcggctggctagtgtgggggcggtgcgaggcgggggagagcaaatatgggccggatttagtgggcttatgggccgtaaagccatgcggattgatgcgaggcgccagatcggaatggtttaattactaagttgatcgaaaatattttaatcttttaaaaagctaaaacacaaccaaatcatcttcatgaaacattttgctacaatgtatgaaacaaacggtttaaaaaaatcgggtgttgtttcaccatatataaaacaatgtttcagcaaatagcgaaaggatgttttaattcacggcaacatttaatccatacaaagtgaaacattataagtacacttgctgaatcattgttagcggaacaaagattgaaatagattcccttagtagagagttttcataatatgtgggtaatttgttgcaacggggcacgtggtgggaacggcacggaggcccgggaggcgcgggaaggggcggacgcccgatttttctggcactgatcgggtgcctgatccctagcattttcgagattgatagcctcaacggatcttcaagtgctcattcggaattcggaatggagaagcaacagggaaaaattgagggctttttttagtttggaggacaaaaataaagctcaagaattaattttatgtgagtgttattcgttttgtataggaaaaattacgaattaccccctaactattgcgacagtatgaattacccccctaaccacaaagagaaaattcccttcatacccttgaaattttagccaatcctttctatgcccctgaattttcttcactcccttgtatacctctgaattttgatttggatcccttccatacctttgccgtcaattgaccgttagttgaccgtttaataggtataaaaagtcagttttaccctttaatacgtgaggaatatgtagaaatttgtaaactatattgttggtagtatagaaatttattgtgtgattataatatttgtaagtttgttgtacatagaaattttaatatatattaaaaaagtatgtgtagcattttttctaaatgatagacatagttttggaaagcattcctatataatatatacaacatgaaaaaatgttcaactaccataaaaatgctacatatactcttttaataagtaaataaatattagtttttatgtcattatgtaaaaataaacttagccatgaataatacctcatacaataaaatcataaatataatagtcttatatgacaaaattatacacttcaaacaatatagctagtctacaatttccagatttccttcatgtgtaagggcaaaatggtcagtttcatagaaattaaacattcaactaactaaataggcatgaaagggatcaaaaccaaaattcaggggcataaagggggtgggcaaaactcaggggcatagaaatgattggttaaactttcaggggtgtagaagaaattttctcaaccacaaaaccagacatattaaacctcgaactattgtaaccggacaaattacccccccccccctcgactcaatccagagtggttttgatcgtacgtggcgccgatgtggaaatccaatcagcaaaaataaaataaaaaatatagggcccacaggtcatactaagcccttctatctgtgtgttgttggcgttggaggcggcagcgagcagcagtgggcgcggctctggtcggcggcgggcgcggcagggagggggaaccggtcggtggcgacggacgcggctaggcgagtggcggcgggctaggcaaggagggagaatcggtcggcggtgagcggcgacgagtgtggctgggagtgtgctccaagcgacgactggagcggcggagaggaagctttggtcgtcttcccctccgatctccctcccctcccaccccccaaatggcggatcccggtgacgccgccatgcgcgccgacctccccttcaacctccacctccatctccatctccacgccgcttccgccgttgtcccatcgagcccgccaccagtcggagccgcccagtcacggccgccaccgctcaccacccagcttcgaccacggccgccgctgtgcgcggcgccgcgtcgtgcgtgacgctatgagcaccaccgtccacgccaactgcctgcctgcccgcccccgcccaccgctcgtccgcgtgctgtcatgcgcaccatcttgcgccgccgcccacctccagctccaacgtgtcggcctgtgagagagtgtgtgtgaagagagatggaaggggagtatgacaggtgggtctcacattttttttaataaataaaatgctgactacattgccacacgtacgccacataagacaaaaccgctctagattgggtcgaggggggtaatttgtccgatattgaaagttcaggatgagcaatgtctggttttcgggttcagggggtaattcggtcgaccgcgatagttcagggggtagtttgtattttttccttttatttttatatgaatgtaagtatagtaagactaaaagaaattttctttcctataagtcgtagaagtgtgcatgcataactatttctctatttttcactgtagcattactcggatcactgaaaatcggttctatacgttggaaaattttctaccctagcgatatcacgggaagaccacagggaataaacctcactaggctatgtgcagttgtgtccaaaatgcttgggtgggatagtagctactagctagcctcacgtgagtattgtgactcgctctggaattcacgcctcagctggacggacacagccacaggaaatgtcaagaatcaaaatcaaatgcaaaatactgcataattcaaatcagaacaattcggaactctcctaaaagcaaccaactaaatactgtattttagttcagacagcggatgcaattggcttcagttttgtctcacagtggtgaaagagattatctgcatgttaagtatagggaaaatatcttcgttcctgaatatagcaaattacggcctcatggagaataagcgaaacggtatatttacaaacaaaaataatttatgaataaaacttttatatacgtattcttagcgatctaaaagcaaaggctgaaaaataaacttcgataaaaaaaaccctaaaatcaacttcaaatttaaagttgaaaattcaaattttagttgataaatataagtataagcgaaaagataaggccattagtactgatgggatgtagtatatatactagtacttattattttaaaaaaatatgtgactgatggtgtgtttgcgagtgaccagcataattgtagtgtaagttttaattaaattgtaaaagtaggatttgactgttttctgttcttttgcaaaatgtggagccatgatacagctagtcccaaaatatttatcgctgaatcttaaaatatgcatgcataatttccatgttattctattcatattgtttgtttcaatagtcacactataaattttgtataatacacatcatatatgagaattaggaagtaattacttacctactaggaaggagataagagagtagataacaatcacaaagagaaagatcaagcaaaatgactgaaatcaagaaaaaaatgatgcgccatatttttagctaaaccgattaatttttctatactttagagcttattaaacttaggaccgagcctatcaacattcacagggaaattattgaacgtgaaaaaaaaacatgtgaacagaaatactagagctacctgcaaaaggaactaaactcattgccttaaaaaaaagcaataaacaaacatgaggccagcaaggctctactagagttcaagcatcaaaccaagcacaacaaaacaaggtataaaactatataacagtagcacagaaaaaaaaaatctatggacaaggcctacccagtacccacctcaccctgccctgccatccccccttgtgatgtgtgaatgtctctatcttacttgtgatagccagtatcctcacctcacccacagcccaccaatcacagcactcctttgtattctctctcctacatgcactcccctctacaaaaccacaaccagcatttttttcttttttcacaatccccttgacagcacagaggcaacagcaaaacacactctcatcagtgtcaggtctccacaccacacccaagtacaggtacacacaagacaatcctcccactgaactgaatcccatccactcctttatcatcatcaccatttccctccttcccttttcctcccctcatttccatttccagttgcagcaagagctgcctcctagctctcttcctgccatccatggcaaatgcttccctccaatcctttcttcttcaccaccaccattctttccttagcaatggtatccatgagggctcctccccttctataattctcaagctcacaacaaacagcaacagcagcatttcattcaagctcttctccaacaccacctcctcctcatcatcatcagtgaccaccacagcatcaacccccaactcaccggtgacccctgctccggtaacagcctcgtctccgccaccgccttcgctggagctcctgggcgcccagctcgccgagagggattaccggcaggccgacgagaccacccgcgcgctcctcatcgagctcgcgggcgagccagctcggcgccgagggtacgtcttcttctcggaggtgcagttcatctccgccgatgacctccgggccatcgacgcgctctggcaggagcacagcggtggccggttcgggtacagcgtgcagcggcggctgtgggagaagtcgcggcgcgacttcacccgcttcttcatcagggttgggtggatgaagaagcttgacaccgaggtggagcagttcaactacagggccttccctgatgagttcatctgggagctgaatgatgacacgccagaggggcatctccctctcaccaatgccctcagagggacacagctcctgggcaacatcttcacacatcctgcctttgaagaggagcaagaagatgaattagcagcagaggagaatgacacacctgataacactggtcagagtaaggatggcagcaaagggaaggagaggccaaagttcatgagagatttcttcaagcctgactactccttttgagattggggggtaattaaaaagcatgggagtttgtgatgcagagatgctggtcatggtgcaattgatttagaaaaaaaaaaaaaggaaacatgtatccgtagttcatctggattgttatgtcctgtaaacatgcgtgggaaactgcacaatatattatgaatataattgtttgagatgtttgctctgcacatgaatgatgcatgtaaagaagagagaaaaaaatagaatattctaagggatgcatggatgcaatgcatttgcatcctgcactcttgcatgtatatagattgtagggcaatgggccaatggcacttgaaatgcatgcatttcctttcgatgtgtaacatcctagcaaataccataggatgattcacaggtatccatattcccttcttttgcatcaaccgttgcacagtttgcaaaatggcgatttcttgttgggacaaacaacagggacaaagtttgctttgctcatcaaggagagccatcagttttaagctgatcatctccacttgtttcctggcaagtgattgtgattgatgtgacctagactgaccttggtgatatctcaggaattaaacgagtctcaaaaaaatggaagagccttttcagggaaaatacctcttatgagttatgacagcaacaacttttttacatttcacgcacaaggacacagccttcgggtatgttgatgtgaaccatcacatgtgagccgctcatccatctgcatgtacaagcatgctcctggattctgaaatagaagtaaaataaaattagttctatgtttttaccatggaaatgatgtgttatatcagcaatgtaaagcatcactatgtaactgacatgcaagtgaacattgatattacctatctcatgtgagatttaatgcttaaaatttaaagtttcatgtgttaataaataagtattgaccattttcaaaatagtacatgcgtaaggacttccaatgatgcaaagtaagaaatgtagaattctggaatgattaagaatctaaattagttcaataaacagataaccattacagcactactactacctagcaaacaaaaaatcagttcattgctcataccaaattgcttggagcctcatctacaacttgagcaggttgatctggtccaagattgctgaaacaaccacttttgcatctcatatatttctgcaaactggtttgaggaataaaatatgagcaaatatatttctacaacaagtatgatctgataatgccagagaaataaagtgtccacacgaaaaaagttgtgttgcgctagtgtgtgcatgggaaattgtttataatcaacatgaggatgtgctatcaacctgttgaatgtaatcccgtagcaagaaccatatggaaatatgtagcatgatactatttggcaagccagtatgaagataaacacaaccaaatatctcattcataaatagtgttgttaacagagtgatcaattatcaagttgatgctagcaaaatctcagaaaaaaggttttttttttcctgaagaatactgcggatcagcagttcagcacaacttcgttttccagccaagctgtcacacacgatgttaaatccattatgaataaacaactacagtgcaaaatattcagattctgcaggaattaggctgtactacgctactttcttagctttcgtagttccattacagcattacatatattgcaacaagcagaatttttgtctctgaagtcttcaatagttatgttgtgctccatttgttattttcctagtcacatgtgcatcacaacacgatatgaagatttacatggctgtctataactaaattactccaacaaggaaaatgataacaccacattctaatagaactgggaatagcaagtaaccactgtggctctaggatagagcaaaacagctaggagacaattggtcacccacaaagactaactacattcagacaatcgaaagttcaaaaaatacaaaatatagacaagttatgaagtataaataagtggggaacaactttgttacattatgttttcaaagtcaggctacaaaagcaaaatgtgttggtgatggcagattgatcatttgatggcaattgaaacttgaaaggccatgtaaatacaaaacgatattcaaaggttttcagttagacagattaaatgctccaatttaagtagtctaatactaactctttcaagttactttcaccgtagaaacattccaatacaaattaagttgctgattattcaaccacagaccaaaaaactgggtgtacatgtaatcatgcaaaatcattattaaaatattatttacttcaaaaactcaagacaatcaaaatggagctagctacttcgactagtcagttaaacttcagttattctggcaggattagccattttaaggacaataaaaaaaactacaattttctactgtgacacataatttgaagatatatcatgaacaaaagaaaagagacaagtaaacttacatctcacatttgttcagaacagaaagcctgcttggaacacatgattgtccttttgctctgcacacagaactacaagattcgcccctcctgaaatcaacattgatatcatagagcaattgtgagggtgttccattcactcttcctatatagtatctcttaaattggaaaaggccttaccttcctatgctgatgttaatgccatccagccttggtccagaaccagaatcagctgatcctgcaaaataattttttataatcatttcccccctacgtaattaaagaaaattgcaattgtactagtagtgaataaatggtagcagcttttgtgctgcctgggcaagctcagctcagattaagctcgaaacttaaaacaacatgaatacaatgaatcttagttcatcgtaagtaattaacatactcagaggaccagggatgaggcactagattggggatagggagaggtgatcatggagaggtagaccaattcacctttcttgcttacatcataactaatagcccaccaccttatctctaatataacaagagatagagatcttaaaaagatcatatattcaaccggactcatcttatctcaataaaccttactaatgctatctaaactaatgagcatacatcgaactagattactgtctaattcgctggtgaatttcccagacctgcatcctgttatggcccaatggactgcaagtgttttaccagactattggcctgccataacatgcaagcgacatgttctgatatcttggttccttcattctgtgaagttaaaatactgttgtctcggttcttatttagtgttgtaacttagttttccccacaaaaatgttacagggtcacacattctctcgccttgaaggggaatggagcccctgactttgttttggacttgttggccagtgatctagctgtcacatccatttaatggacttattgctgaaagaaggtgatttacatataaataccggaaaagattatgatttatgtagtatagccacaaaatacagtgccaaggctcatatccacccctactgggcagttatgtttgaatctcacagggtaactgtaatcccatctacctgaccaattaatatatcccttcatttcaaagaacaagaactactttgagggatacaaggactgaggaaaggatgaaaccaagagataaaggacttaaaatgaccatattacctaaactaaagcaccttggaaatatgagaggatgagcagtgatatgtttctaatcaatacagtagtaagactgaaaagaatcaacaacttcacatgaatgtcttctattttgcaataaaaaaatctaagctttataaaaagaaacagagagggcaccggacattatcatgaacagtaatataccaagatagctagcattgtaatataaccaatcaaaatgtgcatacctgaagaattctgctgcagcaagaagcaatgatggaagtcacttgcatacgcattttcatgtacctggttgattaaacaaaactttgattgaagaaaatgctgtttatcagaacattctagcacatagattttgtgaattgttgatttataacatgctagcatgacaagcaccaccaggatgtaactgcaccctgaaccttggttccttatttcatatatggcaggtaaaagtggaaaaccatttcatagaatattatgaaccgttacaatagaacactgcaaaaaaaaaaaagaacagtaccacacttgcagaactatggcggcatcttcccatgcagaaatcgaagacatttctgtaagttcctggagataaataaattgtgaactcccagcacattctagtatgctacatccaccaatcgatatcaacgagatcttaccagaagtaactggtctagctaccttcaacttcagcacatctgtttccttggtctgtccaacatgagtgcaaaatttaggaaacaacttgccaaacccaggattatacgtaatagagaaaattcaaacttactcttgaaggatttaagcagcaagaaacacaatattcataagaatcacagcactgtaaatcgagtttgcaacccctggttggtgccatgaagattgttaaatttataactgtacccatttattgcggtgcagagctgaaagtgaagtgagcaacaaaagataagaaactcactgacaggaaaaacgtgaccctgttcttgggcaacaccgagaccatggatcgatagataaggaagaacatacataacctaaaaaggaagtaattatcagcgggggaagtctagaaggcaaatacactgcttaccaggcagtatatgtgagcaaaatgagatgggcagggtgtcctaccattatcatctgatatcaggtgccgcccttgcacagtgctcctgcacatgatgggtgctgcaagaccaatgtccttcctgcacaatattcaaaatcaagccgcatcattagatatactgaaataaatactccaacatccatcctatattcaggatggaaagaaagcatgaatggcgtaacagtttgggcacgctaataagcttgacacacatgggtcatgggttcaaaggccacatgatgccatatacaatgaactctgtcccaggctactcccagttccagaattcagttgaaagcacaattagataagacaacccgttaactcgtagtctcgtaccacagtatttaactgaacacctgcacttctataactctattctgcactttgtagaggtcatgtattagtcagcaagaaaatgtaggcacaaaattgcattttgtgcactggtaaggtctgggcattactaacattcatcaggaaaccatggatgttagcaaggcactagtacatacacgaacccaacagagccaccattcctctttaacccaagcatatttctcccaaattttccctccatccttgccagctccatccatcatttcccactctttcactcccaatctaggttgatgtgtgcgttgaacacataaagctcacgattacagaaacaaaagaaaaaaaaaactttctgatttggctaggtatacatgccaagatttgaaaaaggatcatcgccaagccgagtaaatatcacaaggaatcacccgtgcgagctaagacggacgcacaacaatcggaacgcaccttagaccaaacagcaaacagggaggaaaaaataaattcaaattacgccgcattttcgggaatgctgaacgtggtgggggaagattaaacttgaacgggatctagctcaccgtatgccggcgacgaggccggggaggcaggcgaagaaggcggcgcatacgatccgagggaggaggtggaggagggggagggcggtggtcgccatctccgtcttggtcgaggagatcgggtgcagaggaggacgcaggacgccaaggaaacctacaagggttttgatgcaaagaaaaaaaaaacatgtgggccatctacgcgcaaaaaaagaagaagaaattccagttcagcttttcgacggagcgccggatccggatccctagactagtatgatatttttccgccaaatgattcgcaccgttttgccaaactttttgccatgttttgacaaattttaatcaaatttcgattgccttttactccctccattatcgtcatattttggcttgacaccaagactaaggcccttttgtttaggtctaggcttattgtcttaaacttttaagccggcttagtagcttatatgatttataagcaggtggatttaatatcctaagtttagaggtggagtcatacatctacctcacataagtcaaaaaagcttcttcaacctagcttttgacttaatagtgttagagtggcttatggtttcaaaaaaagtcaaatgaataagctgcttgtttgtttaggcttatactttttggcttataagttggcttataagcctcagcaaagagggcctaagaaaaacaatcgtgcttataattctactcgtaagcgcttatcagccaacgggccatgcatgcctcggcccacgcttcggcttcgcgtatttagcggcgtgtgcggcaacacttcagcttcacgaccgcagccaccacccccaaaacgcttcggctctgcaaaaatcaacacaaagtagatcaagtacatgaacatgtgttaaaaattaaagtagcaattcaaaaacactatcaatatgcctagatatattgttttcatataggaaaaggtaagtgattttcaacatggatagtttgacatcttcaaactcctcattgtcagaagccttggcaggaatcttggcaaatccaaatccatgatcatagccatggctgatccaaagtatgtccatcgctgcgtcgttcatgtcctgattgtgatctccatataagcaaggaaccatgataggaagcatcaaagttgagacgtgataagcctgcgttgtgctcaccttaggtgccatgatgatgtaaaagggcatgttccacgtctatatccatgactccttcgcatacacccccgacaacattgagctcgctctcggggacagcaactaggacaccattaagctccatctcggccacagccacaatcatcgccattgtttcatcatgtgtgccaagtacgatgttgacctcgctctcggtcacagcaacagcagcgtcatggagcttactctcgatcacatcatggacctcgagctttgccacagtcaccgcttagacttccacggcgacaatatctgcaacgtcgtggagctccctctcagccatgatcacatcttccttgcgtacggccacgacggtgtcgacctcgctcccgaccacatcaacaatagcgtcctggagcttgctctccatcaacccatggagctcgagctcggtcacggccaccgcttggacgtccacggcaacttgggtatcaggaaattctgtatcaccggcaaaggagtcctccacgacatgaacctcgtcgaaatcatacaaaatcacctcggcaccatggtgttcgcttagagagttcacttcctcgcaagtcatggcattggaaacgtattgctgtggttattaggatggagcgaagcggagaagagtttgtcttgtagaagaataggaaggagcaattgatctactcgatgatctgttgctgcgcacgcggagcaatggtgcaatgcattggccgggcaacggcgcgtagtactcccgagacacatgtgcagtgatggattaactccatgagcaaactgaaatggcgagcacggagtactattttaaatttgcattctcgaatacctttgaaatttcaatcgagatctacttccgtcctgcgttaaaacctcaaaatttcgtggttagctatatgcggtataactaatgaggaattattattattgattgagctgtgatatattttaataagaatacattaacaatatcataacttatgagttgcatttgatacctatcaaccatgtgacacacttgcacgctattttctaaatacaaatgttgatttatcgcgtgccatgaggctatttgctatcattaggtcatgcgacttgtgaatgtttcatttggtatgtttgtttgtttatatccgttctatttgtgttttgtctggaattatgcattagatgacataagcttactaatatctgccagatctattacaaccctatgcataattttacttatatccttaggcatcagaagaaatagaaactatatgaagttggcctgtgtcatataaatgcaacatagttgtcccatttagtgtaaacaacttgagtgacacatgctagatttacacatagagtgcctaataaaattaatgatacattaggataatttataaaaactaaggaattaaattgcacctatcttgcaactggaaatatcacagtacattttaagttgtacaatggcaatatgcatatataaattgatcttttcatactaactctgtgatctttaggttaaagtagagtgacattgggttggggtgaactatataacactatattttggcttagggcaacagtgtaaaactaaagtatagtttgaacctggtgtgagagagaaaaaataatgtataataaaatccacaaatgtatatatattgatatcaagttttataatagacatagattacttttcatacaagtcatctatgataatccaaatgtctcgtggcctaaagaattaagtttctagtgtttgatatttttttaaaaaaaaatcatatgactcatatgaactaatcacacccacatcacaattaatttctaataattatacgtctgaccttattctgaagattaaccatcagcttgactcaattttctttaactttgctcatctcttttttaaaatgaagctgacattttgccctattctaattacaacgtgggggaatacaattagaaaataatttagagaatgaagaaaaatgaaatatcccttgacataaaatacaactcatccttcaaaatatcgtcaaacatacaattttcctttaattttttttacctattctcatcatcgtcaaaatagcttctagagttttaatcgctaacacgacctccactaattaacaaaaggaaatagtaatacccaagcgaaaaggaaacagaaatacccagcatgaaaaaaatcagttgctattcgaatataataagtactcaatgccttttgttcgattacagataactaaaccccgttgaattcaatgttgtgcaaattcgtttcaatcgtactttacaaggagaagaaggtacaatgttctgaacgtgtgaaagaacaatgtcccacgctgcaaaccgcagcaccacaagccaagggccacgattccagatcaaacgccacaaactaaaaaataaaaaaaaaatcggaagaatagagagagagagagagaaaaagaacgatgagagcctccccgagcgcgcccacctcccacggctccggctaaaaccctagagcgcgcgcgcgcgagcgcggatgcccctcgctctcctcgcccgcgccgctctctcctccacctcctcctccatcgccatggccaccacgcgctcctcctcctccagggtgcttcgtgcctcccgtgcggagctcaacccaggtgaaacgctcgtttctttcttcttctcctctagtagtaccttttcttggggagggcggggaggaggaggaagctcttgtagcctgtttccattcattgttgccattaggggtattctagattgacaggtcagattagtatccgaatatatttgggcatttaggtattccttttctggataaaaatgtgaaaaagttgaggtatttctaccttggtgaggttatttcttgaaatgtggcagatagatgcttcttccagtctttattgaagggttgctactgatgggaggggtggattgtccattttgtttagtttctgtttataaagctgcgttgattaagtgttggaagttttgtggtgttattgtgcgtttgcttctggaaagtcatcctagaaggggaattttaggaagggtcatctcatgatttttttttctttaattgccaacgaaaactagcttttagtatgatatatgtattttattctgcttgttcttgatggaaaaaaaaatgaaatgaaagttcctgattcgataacaaaggcgcgagcaaacatggtggctaggtgagacctgctcagagaagcctcacagcagaggttagatgcagttttgggaggtcggtcaactgttatgcacccatttcacttgtttatgtggtttagcagcccttcctagatacatttgtgcttcccttcagccctcacatggtctgcaactgcaagaggcaaaccacaattacgaattggggccagaggagctcacaataagaagcataaagtccaaggcggaggctggagttaactgtgttgaccctgatggagatttaccactcatggttctttgctcgaatgcttgggcagctttcctctgtttgagcaacgaatgggttgggttcctttgcttttgttttgggttgatgatattcatgcgtttctcaaagtgtccaattatttatcagggcattactcacataacatagtttgcttgatgcatgttatttcctgaaagttcaactttaattcccatgacttcaatgtagtcgaattacctaacagtttcatactgactctgggaaagtatacatccattaactgccaacttaatctatctgccaactctgggaaagtacatatatggatttttaaagcaagtttagtgtaaatgtgtaattgattatttggtagtatgccttttcaggtgctaaagaagtgaaacgtgaatccagtgtttcttttgacttgaccaaaactgaagcggttgcttccatgagaagcaaaaatgtgaaacgggtgcttgaagtaactggggaaaatattaagaaagaggttggtgtgcacctcttcttggattggtgatgtttttctctctatcaatgaaacaaggcagagcttctgtcttttttttttcaaaaagaagaaaggaagacgtgcctactgaccaaacaccaggccatgtctttggtagttctattttaaaaaagtttcctgcatttctattatttctgtcggcttttttgtccccacaatttaaattctagtctccttaagaccagtcactctaagatagtatgatgtaaatacaccttttctcttcaactgcagttgtgcatttagcactcactttagtagttgctccttttctgccctgttggttggtgaactgaacagaacaattttgcccatatgcaggttgatatcgttcctgacattgaagattttcgatatggcaaggcatcgccatctttaggtaagaactaagaacagttataccatatagttaccaaattataatattcttaacactttgttccatgtcttgcaaaaaagcttacttttgctttcttcagttaggttggagaaaaaggtgagagtttcatctgctataaaaggtactcagaagactacctgatgagagaagctatgcatttcttgtttaacatctttgtaattttcttgttatgtgttagtttctttctctgccagctgatatcaagttaaatctgtacaaacaatattgacaatactttactgaagttttcagttatatattttatatattgctaaaatgtttatgctgctctggattgcaaaaataaacaatcactagattatgacttgcatcatcttaaccagaaggcaatatagtactacatattggttcatacatgatggctattcattcctcaatttcccacacacatcattcatggaatatctaaatctgttgttaagttcaaaattttcattgcatgttcacctactattaacaaaaataacaatcctagctgccaaaaagctgccaggttggtagcagaatgttcaacatcagattcagtgtatccttgtgacacatattagtgattatgtggccattatggcattatcaattgctctaccgtttaaacacaatatatgtcaagacaatgatttgttgtctattgtgtgaaatttttttcatacatttatgcagttggagctccagaaaattgggaggcaatccttaagggtattaaaaacatgaggttatctggcgaggcccctgtagatacaaagggctgtgaaaaagctggttctcttcttccacccaaggtaggttttgtgtttgcatcatctttctttttttgaccaaatccttgcatcatctttcaacctgagtgtagtatctagtgcagagcctatttattgtggtcagacccaagttctccaaatgctcattgtaggtcttgcacaggcatagtgcatatgtgattcccctattttattgtgctatgttgccatatcaaaattttagtgcaagcggtacacttgtcacacttcactactatgagtgtttcctgccacagaaatcatctgcatattaatatattattactcccccatccatttaactccattttttcattgttaaaaggttttcagccaactactattgtgtaactcttcttcatccatgtaatcatatacacatttctttcccaggaaaggagattcgcagttttgatatcaaccatgatgtcaagccaaacaaaagatgaagttacacatggtatgtctcatgaagatttcttttttggaattggttatacactatttttgctagccttgttatagttttcctatagctaaaatgtgaaaaatgaaaaagagcatgtgatctattctgattggagtgttatgcatactctgctgtgcaatggttcagatgataatatgttcttaataattgattggtagtacagaacttcatgctatgtgaccatcctgtgtctatacccttccatttgtttccccattgaactaaccttgtcataaacatcactttatgtaccacaactatgtctgtttgctgcatctgtactatattctttcatataaatgattattgtattttggatcaattgttatcagctgctgttgaacgtctatctgagaaaggtttacttgatccggatgctattgtccgaacagatgaggccacactagcgaatcttatcaaacctgtaagttgcaagaactgtttggtgggaactttcccaactacaataaattactgctctgaactacccaatataaggattgatcctacaaatgtacaaaagaatatacatgatctgcatatcacagtatgggctctagcaaatggtaacaaaccaaactttgaatgcatgcaatttagttgaagcataaccttgatttggacctcagaagacaagaagctagctagagctgtacctgctttgttaattgtactgttatagtttcttgctggaaattactcagctcagcctttgacatcatactggttattgtttaatcaggttggattctatcagaggaaggccaaattcataaaagaagcttctaaaatttgccttgaacgttttggaggggatattccagattctctgaatgagcttcttgctctgaaaggagttggtcctaaaatggctcatctggtagtaatactcattatatagtcgaaatataagcctatttagcttcacaatccctttttaataacaaaaactaagcaggtgatgagcattgcatggaagaatactcagggaatttgcgttgacactcatgtacatcgcatatctaaccgtcttgggtgggttttccgagagggaacaaaacaggtaatttgtgagttatgtcttttgtgcctttgaagaaaacaaattatacatagggaacatccattttgtcactgacaaattgccccttgtttactttgctcagaaaactacaacacccgagcaaacaagaatgtctcttgagaagtggctaccaaaggatgagtgggaacctatcaacccattactggtatgaatcggttcttttttccaccgctgatgttcaatttctaccatgtaaataactacataagatagtgtcatttgcttttaacactacatatctgaatcctacctaaactgcagaaatgtaagtcttatgtaaattgaaattattgtttttaaaatcatgcaggttggatttgggcaaacaatctgtactccacttaggcccaaatgtgacatgtgcggcataaacaacatctgcccttcagctttcaaggaatcatcaagcccaaatccaaagcaaaagaaaatgaggtcatcttagaactttttggcagggatgccttgtgtactttgtgtacatgcattatttactgacctgctagtgctggaatgctcttctaaaaggttggcatatttattgcctggatgaccttcctgcagccatctatcattttgtatagccattatgtagcattttgtatagccgtaatctattgagacaatgggtagggacacattgatcttgccagttatttattatgggcaaacaactggcacttggtaggaaaaagcttttgtaaacagtataactagaacaaaacggaggacgttcatcaattaccctgcatttgcctctgtttattgcagatttgcagttctcatggcgatcaacattgccgatctcttgtagaaatgagagttaatccatggaaaatgtaagatatttgaataacaaaatgtgttcagttctcatggcgatcaacattgccgatctcttgtagaaatgagagttaatccatggaaaatgtaagatatttgaataacaaaatgtgttcaaatcagaaaaaaaaacaggatcttcgcaagcactaaaatgggactacaagaatatgaagataacttttgagattcctaacaaaggaattaaagtgcatcaaccataaaagaattgagtgcgtaagattaactaagctattcctaccatctgtctctctaccaagatgctaataataggtttttttttttcaaaaaaaaagataagaaatactatgacagtttatccctagctaatgtatacacaaacacaaaaagatagtaatagctgaaaatgcagcagccgtagtagtaatcctagacagtaaacgccggcgatttcaggtccggcaagccggcgctgcgccggccgaccacgacgacgttcccgtcaccgtcggcgtcgacgatcaccgagtcgccggcgcagatctccccggcgagcatcttgtccgtgagcgtgtcctccagcagccgcatgatggcccggcgcagcggccgcgcgccgtagctcgggtcgaagccttgctcgacgacgagctccttgaacctctccgtcacctgcagcccgatccccttcccgccgatccgcccggtgacctcggcgagcatgatcccggcgatctccttcacctccagcttcgtcagctgccggaacacgatcatctcgtccagccggttcaggaactccggcctgaagtagcgcttcatctcctcctccaccatgttcttgatcaccccgtacccgccgtcgccgctgccatcgccggcgaacccgagctgcctcccgcccttctcgatgacgccgctgccgacgttggatgtcatgatgatgagcgagttcttgaaatccaccgtcctccccttgctgtccgtgagccggccatcgtcgaggatctggagcatcatgttgaacacgtcggggtgcgccttctcgaccttgtcgaacagcacgacggcgtaggggcgccgccggatcgcctccgtcagctggccgccctcggcgtagccgacgtaccccggcggcgagcccaccagcttcgccaccgtgtgcttctccatgaactcgctcatgtcgagccgcaccatggcctccggcgagccgtagtagtacgccgccagcgccttggcgagctccgacttgccgacccccgtcggcccggcgaagatgaagctcgcgatcgggcggcgcgggtcgcggagcccgacgcgggcgcggcggatggcgcggctgatcgccgtcacggcctcgtcctggccgacgatgcgccggtgcagcgacgactccatggcgaggagacggctcgactcgtcgacggtgaccttctccacggggacgccggtccagctggagacgatgtgctggacgtccgcctccgtcaccgtcggccccggcgactcgccggagtccaccgccgccttgctcatctccttgctcttgtcgaccagcgacatgatctccgacttgagctccacctcctcgccgcgaagcgctcccgcctaatttttgtcgaattcaaatgaattaaattttgattcgatgttcttatataccaataaatttacaggttgattgattgattcaacgaattaaaatttgtatttataaaagaaaattaccttctcgaagtcttggcttcggatggcttcgctcttctctgccatgatcttcttgagcttcttctcgagttctttagcttcatcaggtagctgtcaatatggtaaaagtggtcagataaaaaaaattgtgaacattattaatatgatgattgtgcacattaggatcgattcatcaaaatatgatgattgtttctacctgggcatttcgcagcctgacaagagaacctgcttcatcaaccaagtcaattgctttatccgggaggaaacgatcactgcaaaccaacaagtctgtcagatgaaggcagtgaaaagaggcacatagcaaaaaaattgctcaaagatccacatttcgtaacttaagaagtcaaaagatgcaattcttacaacacatttagaagaacaaaaggcgtattcactgcaagctaaggctgtcagacgtgagaaggcagtgaaacaagggaatggaacagttgaatttataacttctcatgaatcatcatttcataactaacataaaaaggaaataaaaagatgcaattttcaagacatgaagaagaaaaaaaggcattctaaacctaatattcaactagttggtagtactatcatgggatccaagagtttacatgatccattaatcttaaattctggcgcctcatcttttcagtctagagtagccttgaagaaaatttcagtactatgacgagtaaaaatagcagaaaataaattaatatacattgtgagatgcttaaagccacactgattatcttgcatgagacctgctgctgtaacagttctgttatcacaattcacaaacctgatgtactggtatgagagccgagcagctgcgatcaacgactcatcagtatactggaccttatgatggatctcatatcgctcccggagacctttgagaattcctatggtctcatcaacagttggctcagggaccttgacaggctgaaaacgcctctccagtgctgggtctttctcaatgtgctttctgtattcatcaatggtagtggctccaatacactgacagtaacaaagttaccttgagcacttggcaaaaattaaatgaactagaagctcatgactgattttataatttgacaagtaattttaatgagattccagagtaaatattttagtgttaattagtggacctgtggtaacataactcagacaaggtaacaccggaggtataaaatttacactagaaatatggtacttcccaataccttctcaaggactgtgaaaaattctaatttgatagaaataaaaagaaacagatttcaataggtagttattgtgttttttacagagaggtcaaccatgtacctgtagttcacctcttgctagcgctggcttcaggatgttggcagcgtcgatggccccttcagctgctccagcacccaccagggtgtgaacttcatcaaggaagagaattatctcaccattctgcttcacttcgtccatcagcttcttcaatctctcctcaaactcaccacggtattttgtaccagcaacaagtagacccatatcaagggtgataacctggaaaggatttcctacagtgagtaatttttcatctctactaatgatgtcatcaattgttcagatgtgcatgcaggatagatatcaaatcaaggaaagtgtccaaggtactgtttaccatgcttcctttctggtaatctagaaaggtaactcttcgcaatctcatagtgctcaaattgtaaattctgatcagtgagaactgaaactacagtagaatgcctaattatgctgataaattccagttccatagataaagccaacatgaacaggaagcttacattgctacacattttagcttgcaagaaattggtaacaaacaaaaacagaagtatactgagtctcaagagataggacgatcacaaaccgttttcccatcgattgtttcaggcacatttcctgcagcaatgcgctgcgcgagcccttccgcgatcgctgttttccctactccaggctctccaatcaggcaggggttgttcttggtccgcctgccgagaatctgcactacacggtcaacctggttttgccttccgacaacaggatccagcttcccctacaaaaaaaaataataataaagaacatcaattctcggttacttaaatttgtccctgaaatgtcctcttgtattgcaacatgatacgtctgtcaaatctgatgtagaatgctacctcctctgctagttttgtcagattagtaccatactctaaaagtgtgggtatcttagttgtactgcttcctcccccaactgcagcactaacaggttgatgatcttcagaggtgtcactgatcattcggataacctaagaggcaaatatatgaattgatgatatgtgtcaacttggattgaatttataaggagaacctccttttctgtctaaattcacctcactgcggatgttgctgggatcagcctgaaagttcttcagcacaacaagcgcggcaccatgctcacggagcaacccaagtaggaggtgttcagatccaacatagttatgccctgaacaatgtaagtaggttcagtgctagagaaatgaaaaaaaaaatggaatactttccttttttttttccttcaacaggagtagtaaagatatactagcagtaaaaagaactaaaaagtcaccatgtttaatgtcagttcccattaaaaagtacagatgcaaatggtcattaattcctcatgatcagtgttggtagactgatacttaagatcgctcatgtacgactgtacgagctgtttggtgtaacgaagaataacaacacggtgaatatacaaaccacccattgctaattgcatactaactattcccctgtccatagaaaatcaagccaatctggacatcagcattatcttcgaaatgcaattttgactgcaataatttctattgcaacaatgtctgtgtaaaatcaaatgaactagtacaatactacacaaaacaagactgcactttgtagaaatcaaatctacacatctatgtaactcgcatgtgtccaatttttaaatgttttagaaatagctatgcataaattttaaatgtgcccacatttgatttgacaatatatacctagctggtgcgcttcttcttgggaggcctggaggacgttcttggcggcgggggtgaacttgatctccatggggaccatgccggggcccctcccggccatcttctccacctcggcgcgcgccgccttgaggctgagcccggcgcccctgagcaccttggcgccgatgccggtgccctccccgatgacgccgaggaggagctgctcgctgccggcggcgtggtgccccagccgccgcgcctcctcctgcgccatcatgatcgccttgatcgccttgtccgtgaacatgtcgaaccccatcctcgccaccacccgcgcccccctcctcctcccgccgccgccgctcgcacgcccgtacgacgccgccgcgggtgaacggaggccgagtaatattggcggcgcgatcgggggagcgtggagctctcgccggcccgcggccgatgccttgacgaggcgggcgtgccgcatcggcggaggcgttgggatcatagtagccatggaggaggagggcctgatcctggtggcggtggtggtacggcatgccggcgatcggagagacggcggcgggttcagtagggttctctccatggtcgccgaggagaagcttctactctacgcctcgatcaatctggacaagcattcaatccatgaaagatcattaggttaaacggatgcgattaggtattaagagaggagaggaggagacctgttgatggtcggggcaatggcggcgcgcggccgggcggacgtcgccgccggtgatggggcggcggcgggttcgccggcgacacggaggagagaggtacgcacgcgtgggtggcggcggcgcggcgcggcagattccggtctattaatatatcaagggaggatttcgcgaaatctgtggctggagtgcacgcgtggcgtccgtccgtgatgtggatcggacggctgagatttgtgcacctgccttggccgcggagggacacgcaataagtcctttttctctgttatactcctatttttctgttggactagcaaagcgcccgtgcgttgctactcgagggaaaaggtacaccaaattatagctagagaaaacgaaaaacatgaataaagctacaataaaagcaagtgagaggatcggagagacgaatatggacatattattttaatccatatacgtactcaaaattcgtgactacttacgtcaaactacgcatggactatcaatagtcaaatcattttaaatcaatatcgacaattgatccaaaacatgagttagagctatagatttttctgaatttatgtacctttgtcgtatgttgttttgaaatcgtgacttgacacaatttagatgatggagagaacagttgggtttgatatcaattttgagttcgatatatgtatttggctctaattaataatgggtatgaaaataatcagcccaccttccaatcgtggagattgcttttcaaaaaagaagttcttctgcatatgtgcagaatgaagaatcctctcaagcaactggtttatgattggatacaaactatataggaatcatgtttttctttctcttctgtttttttctgtaactttgtaaatattctctttcatttataaaattacactgctgggcaaagtcctagcagttttcctagtaaaaaataataataatgggtatatagagataaataagtttatttggaaacttaagatgccttttaagattaagatttttatgtggtatctctttaaggggattgttggaatggtagtttgagatattgtttctgtatgaaaaatgaatcgatttaccatcttttcctagattgccattttgccagatttctttggagatctatataattcgcgtttggattataccttccacatagtatatctcatgtgtttgggaattggctcgtggatgttaataaaaagataaggaacttattcttgtttgagcttccgctgtatgttggctctctgacttagtagaaatgaaatggtttttgatagatcactttcaaaatctttgcaggttcttttcagggcaacatattggcttcgggaataggttcaattataaagacatgatgatcatatcaagctaataaaagatgcgtgccgtaaacttgagtcgacgatcatgcagctctttgccaacattgggtggagattcaccaatagaatttagtagttgtggggtctttacattgtttgatttttattagtttgcttctacttttggttttgttcctttggctacatactatgtgagtttgcttttgtgtgaaccttgtaataattgactgtagctcttgagcaaagcccaacatgtttcattctattatctagaaataaaatcatgaaatagagggtagagacttggatacaaaagagttatttgttacggttttgaagatatcgcgatatagaaatatatatctcatcatgagttatgtatatctctgtctcgcaataactctagacatgagtgattgaagatactcgttgccaattatactttaattttcgattgaaagactatagagcaggagataattgactccgataagtagggcacagtaaaccaccgatttcacaacatcttgtgttctccactcctcgattgagtatgtatgttctaaaccaaatgttcaacggggcacgacccaaacctcgtgttaatactacctccgtccgtaaatataagggatattcactgttctcgtataacgtttgaccactcgtcttattctaaaaatttgtgcaaatataaaaacgaaaagttgtgcttaaagtactttggataataaagtaagtcacaaataaaataaataataattccaaattctttttgaataaaacgaatggtcaaacggtgcaagtaaaatatctaaatcccttatattcacggacggagggagtacttgataagcaacataacatgaagtgaggttgtgagtctgtgactatctgtccacttgctcatttctttctgttttgacccaattgatggctttgtcaagctccgcaggtagggaggagtgccatatttcagtggtaccagtcacggtctcgacgtaacatggttcgactatgtcagtgtggcaaagcactgatttcactcacttcctggccacccaccctagggactcgatcgtagaagcatagcccagacgcttgtcttcttttatttcttgcggtttctgttctctagctaggtattagctatatgttccttgaccatcatgatgaacaagcacatggagattgagcagattttttaagataatagaagcttttattaaactcagtcaattacattaaattaagatgataaaattatcctaagaacattttgcgcagataaactatctcgacttcctcgtgtctttatttcctacatgtccgcagtggctagccgcttgaataattctccactcggtggttatgtgatattctctccctaagatcaagaaacacttgaccgaaatgcgcacagagacgctagctcgacttcctggtgcctccatttcctacgtgctgccctagccacgactagttgctctcccattttaagatatttggatcatgcaattttatttgaaagagggggcttctttcaaaaagaatgtaattaagagggataagaagtttcatgttgcattgcctcgcctttgtgatatatatagatacaaatatatgtagaaaatgtttatcactagaagtagctgggtggatgaacaaatgtgcatgaagatgagaaagtatgaattactagctagcaggcactaattattatcagaactgcaaagtggacgacattaatttgggtatgtgcattagtctatcatggacatatactgtcccctggttgtaaacttctacgccctccgtttgatttattttaaagtcaaattttttatgtttgattgagtttatagaaaaatacagtaaataccaaattagttttattaaatctaatagtgaatatattttattaatagagcaattttaccattcagcattttgtacttccaggccgtatatatcacattttacacataaaattttggtaacattaggtactaagcatcttgaggtattaaattttacactagaaaatgattcgatgtatcaaaaatttatggtaccttaaggtagcaaaagttggatgttaaaattacttattttagtaacatatttcttttttgttgaaaatactactccatttttctataaatatggtttgactagctattgtgaaattgggaatgctacatacaatatatataaacattcaaaatgaaaagaggactgcaactattgataattgataccttcgtcctgcagttttttttcatggaatatccataaaggagatgagctgttaatttaacaccggtggtgttttcattagtaaaatactcaatttattacatgtcatcgcgcaattgtaacagcattgtacatgtacgatgacgatacataacagtaaattgttagaaggaaaaaaatccttggaaagttggatcttccaatgtccaaaatccttctgtcaagtaatcgtccattccgaaagggggtctaaactagtccaagtccataaatacctaattgctgcacaaaattgcaaaagtgatggtgtgagcctatgctgctgaacaggatgctggatcatctctgctcggaagagcacgtccactgttcagcttcaatcgttcaaccagcttgaattaaatttataaatatactgttaatttgtttttgacaaaaaataccgtcggtctcgcacaacggttacgcgagaatgacgtgacttgacgccgcagttggtctcacaagatagcatgagaccgcgcgtgagacagcaagaccaaacggtctcgctaaaataaaagagctagagcgaacggcttgcctagtgagcagccgcttaattagtgactaattaattacccaattagcaattaagcaataataattagtaattaattatcctgattagcttactaaataattaattaatcgataattaaacaacttgaactgccccagaccccagccattcggtctcgctatttcttcgcgcgaggtcgcgcgtgcgaaaccgcctgtgacatcgtgcccacgttattttcacgtaatgtttgtgtaaaaccgacagtatatttctataaaaaaaattgcattccgaatatttatgggaaaaaacaaatcaacagtatatttgcaaatttaattccaactatgttcttgggagtttcaagctttttgactttttatcgaagtaggggctttttgggagaactaattatctccatccattttatatataagtcgttttttatattctttttcaagttaaagttatttaagttcgatcaaactagtagaaaaatatagtagtattttcaacacaaaataaatatattatcaaaatatattcaaaatgctagaatcaataaaattaatttagtatttcataccacctacatttgactattcgtcttattaaaatatatataaatgttatttattttggtgtgacttgttttatcaataataaaactataatattaacttatacgtttacatatttatactaaatttttaataaaacgaatgatcaaatattatattatgcgaaaaatcatcaacgtcgtagtatgttgtgatatttttctacaaatttagttaaactaaaaaaggtttgactaaaaaatcaaaatgacttatcaaaatgaaacgaaaagtgtagataaagaaatatacagatgaactttaacattgtgaacataacatgtattgtacaggagctctcatggcgctcataagccacaaagtaaaactgatccaccaactatatataagcccgtctcatcaatcacaaaagtttaagcaatcgccttaactcttattctctctgtttgaattttgtcccttaaaaaatcaacttccaccatcctacctaactcttacattatctaaaaaaaaactttttaaaccagaagaaatataaaatggttttaatcctaagtagtacagtacataagctgttaatctaattgggtaacagtactcctgattagtacaaatggttctgaatttgcaaatgcttgattgataaattgcctgactcatgagctgaactgccggcgttgtcagaattctgaagcacaactgttttcaggttgcattcttcatactggcgactctgggaattcagtagcaagtgacaaactctgcagaaccaatagataaaagagcaaagcacacatataatttttgaatggaacaaaagcacgcatcctagcatgtgtcttcaacaattctgctgaaactgtatgcatttcagaacattagaatgcacaaaattaagacatccccacttgcacgttgctctattggctcaacgatttggtaatactgccacttttcgcacggttatgaaacggtgttgaacaagaaacataccaacacaaatttctgcataatgcaactttttttaatagataatagaaatgaggattacatttttggcctctgcccgtgggcatagttaaaaaatctcaaaagtaaataggaaggaattttaaaaaaaggcatgatgggacatactcctaacttctgccaataaaatgatttattaaaataacgttttcaaaatcacatacattttataacaaaattatgtagataccatgccatccaaactagaacaaaagttctttggctaccaatttcaatcgtattgtgtcagggttatggataccacatacccaatagtaatcgactaagcacggcggggtccaccacataccatgtcttatatgggaacaaacctcgtatatagaaggagttccggataaggaatgacgagtagagttctatatggaaacgacaaggactacttggatcgtatccatatttatctccctagttctacttggacaagagggcatctatgggtataaatacaagcccccctaggaggagaggggacacagccaacatgcaacacagacgccacaaatccacaagccaatacgccaccagatctcgacatcagagattagcctagccataacccatccggttcctacggaagtcggcaagagggatctagcgccatctctgatctcaccgagtacagattcgaggaggaagactgccctgtcatcaactacgagctggttatctagccgccaagttgacgatagttagataggttatcccaaatattgtatttgtgtaatccagatgaataaagagcaacaccggctttggccaacaggatgtagggctattacctgttagataaagggcccgaacatatataaaaatccctgtctccatctcttttacctcaatctcgtatataccttggtaccaacgatccccataccatctaaataccctagtcgcgatctcaaacgtcgacattgttagatttgttttatggttaaaaactacatcattacagtaacgtcagattaaccaacataaaacactagctccaaataaaatcatttcttttgtgggcctaggcactcccattagccagctaccaaaaatatcttttgcattgtgaagagggggatattgaaggcaaagaagacaaccaaacaaaacgtgtaacatggcaatcaaacaaaagatgttagatggtcacttgtgtattaaaaaacaacattgctgaatccccttcattttctctttgacaggatgctaaacatcattttgtactaaactgtagcacaaacggtcttgtgtctacctgcaagcatggggtggcattcatttggcatagcacatcttcggtcattcttcactagtaattttcttgcaaattagcaggaggtggagaaacttctcgagtttagtgactaggaagatgatatggtagtctaaggtcatgtttccgattgatgtgctatcaaaattttggtagtgccaaatcttgggtaaattttggcactaccaaaactttggtagggtagagttaaaaatgttcatttggattaaagccaaaatatgccgataagacacaagttcatgggcaaagctaaatttgtggcataaataatgctttgatagaggtgtttggtttgctaccctaacaaaatattggtagggcaaattttgatagggtagcaatccaaactagccctaagtattgtctcttgcttctgccaactggtgaaagcaaggccagtccacccgtacaaagccatgggccctaataacaagcatttcaacaaccggcaaataacacatcatgtcccgtttcatcgtgttgtgtgcatacggaaaaagcagtccaaatttgtaaatgttgaagtttggagtcgtatggggatgttgttttcctgatttgataggtttcctatgtgattaggagccatagttctagtcggattcgtggctatgggcaaccccgttatgggtataaatagaagaggggttgaggctagaagatattgactctttgggagagaaaagttaaagtttgcttcaaggttccaaccctaatttaaatgcactttgtaaaacacatattgatacaataaattttatctactttcaagaattttatcgatacatgtttttcttggtcttgacggtcaaatcggcatatgacgagcggtccaaccggtggcagggaggcggtctaaccggcagcaaggctggcggtcagaccgatggtgtgcaagccgccagaccggtgggagtactgtggtcagaccggtggtgatgtactagtgtgaccggtatagcttcgtcaagtttgcgggtaacttctattttcgctaaaagttatttgttttttttccttccattcgctcctctctagtaggcttggttctgtattcgattctacaaattaatccttgatttctttctcaaatcattcaaccctgtcacatactcagaatccattcctgtagaacattatttatgcttgcttaattgtccctagttaagcatgaagagatacttgatgttgcagggaaattggaaaaaggaaaacactacaaataagcggacggaaagttttaagtacccaagcaacatacctcgagtctttgatgttgagttttcatatactacctgttggaaatatggtcatatatcggcatattttaatccaaaatgttaagacaataatcatggcataaacagtgttggatgatctagtgacaacatgtagcataaccagtagcatgctaaaggtatcataagcatcatgaacatgaacatagtaagaacgcaattgacttgagactaacaggactaacagcgctatgaacgaatgagttaacagcaggagaaggatataccctgagaatggccctccgctagattgtgaggcagaattgcttccgttggtgttgacgttcgcaacggctctggctccagctccaggcgcgccatctccagctccagcagcagcggcgccagcggcagctccggctctaggcgctgctccttccgatctctcatgcacgcaagctatcagaagcgaggaggcgagaacagcacatgcgcagaggaggaagaactaacacccgggaaagaagcaagcgaatcgttctgatcggactagcggcctccttctatagcaggagagaggcagtcgtgggaacgtgggatcgtggacgcgccgttgcggaggcagtcatgggaacgtgggatcgtggttgcaaaagaatagcgacgtgacgtgacgcacgcacgccagccagccagccacgcctcgcccacgccctcgccctcggccttggcccggcgcgcgtgcgcgcacgtgtggctttccgactcccacctcaaccggtcaacagggagcctccaataactccctatttaggttgagatactcctcgcttaaatcctgaggtggtattattatccttaacacttattatgggcctttaagattttaataggataaatcgggcctagcccaattattctaacaatccccaccaaatttcaaggctcataagactcaaggttgtgcctgtttgatataccagtgtttcggtggagactgttaagttgaacttccacctaggaaatgagctacatcagaccacaactgaacaatggactatgccttgaattgtcagttttgtgtgatcaggtttcactcaaacccttgactggtactgggctgccgttcgcatcccctctatttggagcatataagtcaaactccaggcctttcatgagtatctagaggtcgcccaaacctcatagactgtgactagcagtcgaactcatataggtgtgttccttctgagatgttctgcaggtcaacatctctgcttggaaaagccactcggatcacattaaggtatgagccatcctaccatgcaggaaagaagagaagtacatcatgaaaatgagcccttttcaagggtctcttctctcagtcacacaatagtttgtttcgccatccaaattcacgggatctccgatcacaatggacaggtttccactattgtgcaaccttaggtgggtatcatgcccatttccctcgatgcactgtctatcacattacgtggtagccccttggtaaactgatctgccagatttctagccatttggacatagtccaatgctatcactccggagtatttctgctttctgacagatttcgtcttctcttgatatgcctagatgacttcatgttgtcctttgaactattcactttaataatcactgtttgattatcacagttcattaggatacttggcactggttttttaaccaccggcaaatccatcaggagttcacgaagccactcggcctcaactgtcgcagtatctagtgctgtaagttctgcttccattgttgaccttgttaagatggtctgcttgcaagacttccaggaaacagcgccacctccaagtgtgaacacatatccacttgtggcttttatctcatcagcatcagatatccagtttgagtcactatacccttctagtacttttggatacctggtatagtgaattctatagctcatagtgccctttagatagcgcattattctttccagagcctgccaatgatcatcttccagatttgagacaaaccggctcagcttgcttacagcaaatgagatgtcaggcctcgttgcactagccaagtacatcaatgaaccaatgatttgagagtatctcagttgatcccttgctattcttcggtttttccttaatagcacgctgggatcataaggagtaggagctggcttgcagtcactatatccaaagcgactcaaaaccttgtccacatagtgggattgcacaagtgtaatcccaccctcatctcctctttgtagtttaatgttaagaataacatcagcctctcccaaatccttcatttcaaaactcttggacagatagtccttgacctcctcaatcacattgaggctggtcctaaagatcaatatgtcatcgacatataaacacaagatcactccttctctcccaccatagcgatagtatacacatttgtcagcttcgttcacaacaaagcctgcagatgtaagcgtggtgtcaaacttctcatgccattgcttaggtgcttgcttgaggccatacaaggatttcaacagtttacacaccattccctcctgaccttctagtacatacccgtctggttgatccatatagatctcttcctccaggtctacgtttaggaaagctgtcttaacgtccatctgatggacgagaagaccatgagaggctgccagagcaagtagtactctaatcgtggtcaagcgagcaactggtgaatatgtgtcaaaaagtcctcgccttccttttgggtataacccttggccacaagtcttgccttgtacttttcaattgtaccatcaggccgaagctttttcttgaaaactcatttgcatcctacgggcttgcacccatatggacgctca

SEQ ID NO: 22610 - DNA, 746 bp, Oryza sativa
atagctatttcacagtatccccatgtcacaatgtcacttgcttataaataaaaactacaatccagttgaatctacggaaaaaaaaatttaaagatcgaaagaagaaacaagagtataaaaatacgaaactacaaaatggcatggttaacactaatccaataggtcatttaaaaaagaaggaaaattaagtattgataaggtgaaattacatagaccagacagatctaatatgtctcagacatgtccaaagattaaggcacaaatgaagattttaaggactcttctaccatgtaagggatgtatacacatatgtgtattgtgtatagttcacatttaatatctctctctgtttgtcttgacttggacttttttacagaatgttaacacctgatacttttaaaaattgcagttttttttcaataattttattattatcttgcaattatgaaacaataaagttcagttttaatacctcttatcttttaggaactcccgaagcttgtcaatgagtcgctgttcatcaaagcacatggggctaccattccccagtatttgagatagtagatccattaagatcttcctcatgtctggtttctgggacatagacacaaaagccttacaatcaaattggccattgatttccttatagacttgattgcaagtgttgtcttgcccagacctccacatcccacaatggacactactttgagttgctgtcttgatgggccactatcagcttcataagt

SEQ ID NO: 22611 - DNA, 684 bp, Oryza sativa
tgaatgaaatgctgctgttgctgtttgttgtgagcttgagaattatagaagggaggagccctcatggataccattgctaaagaaagaatggggggggtgaaaaaaaaaagattgaaaggaagcatttgccattgattgcaagaaaaaaactagaaggcacttttgctgcaacttgaaattgaaatgaggggaagaaaagggaaagagggaaatggtgatgatgataaaggagtggatgggattcagttcagtgggaggattgtcttgtgtgtacctgtacttgggtgtggtgtggagacctgacactgatgagagtgtgttttgctgttgcctctgtgctgtcaaggggattgtgaaaaaagaaaaaaatgctggttgtggttttgtagaggggagtgcatgtaggagagagaatacaaaggagtgctgtgattggtgggctgtgggtgaggtgaggatactggctatcacaagtaagatagagacattcacacatcacaaggggggatggcagggcagggtgaggtgggtactgggtaggccttgtccatagattttttttttctgtgctactgttatatagttttataccttgttttgttgtgcttggtttgatgcttgaactctagtagagccttgctggcctcatgtttgtttattgcttttttttaaggcaatgagttt

SEQ ID NO: 22612 - DNA, 740 bp, Oryza sativa
ggcgaattcgagctcggtacccttatctggctgcctactgatggtgacgccgaaaactttatgaagtcgcatgttgagccgacgattcgcgatattccgtcacttctggcgctggccccctggtatggaaaaaagcaccgggacaatacgctcagtatgaaacgcttctccaacggtcgcgggttctggtgtctgggtggtaaagcggcgaaaaactatcgtgagaaatcggtcgatgtcgccggttacgatgaactggcggcattcgatgaagatattgagaaagagggatccccgacgttcctgggtgataaacgtattgaggggtctgtctggcccaaatctattcgcggctcaacgccaaaaacaaaggggacctgccagattgagcgtgctgccagcgagtccgggcatttcatgcgttttcatgttgcctgtccgcactgtggtgaaaagcagtaccttaaattcggcgacaaagagaccccgttcgggctgaaatggacaccgggcgaacccttcaacgtcttttacctgtgtgaacataatgcctgcgtcattaaccagcaggagcttgatttcactgaaactcgttacatctgcgacaccaccgggatctggacgcgcgacggtttatcctggttttcataacaggcacccaaatcgacccgccagacagcgtgacgttttacatctggaccgcatacaaccccgttaccaactgggttcacatcggtaaa

SEQ ID NO: 22613 - DNA, 1259 bp, Oryza sativa
tacagtacagaagaggttgtcgagtgctgtatcgattacttcaaaaatggaaatacaattggagtacctatgccttgacacgagggcagattgagtggcaagggtactataggaaagaagagattcgtcacccatgatcacaaagcatttcaagaaactcacttcagcacgcttcatcagtttgctatcgttgagccttacaccgatcaacatatcaaactactacgagctaccaataaaggtcacacaaccgagtggataatgaaagaaaacaagagtctcttcatagattggttgcgagacctagacttacctgatggacaaacaaccgatgaaataactatgaagcggttggcttgtggtccatcaactacagtaaattcttgggagggatatgacattaatggatactcgtttagtacgagagcccgagatagtaagaccttaactgaaaacagcggtgtccgtgtggaggcaattgattcaccgggtgaaaaacaatcatacttcggatttattgaagaaatatgggaaatcgactaaggacacacaatgcaatttcccatatttaagtgccagtgggtaaaatacctgaacggggtcaatgttgataagtttggtcttactgttgttgaccttgcgaatgtgggtcacaaggatgacacttgggtactcgccaatcgcgtggcacaggtgttttatgtgaaagaccctcaaatttgaagaaagagataatgctaccaggaaacaaatagatattgggagtggatggggtcgaagatgttgaagattacaaccaatacgatagtatgccactttatactcaatttgtacaaaagattaggcatgtcgaggcatctacttagaagaccatgaagctttacatgcgcacgaacggtgtgggcaaaaattttaaagggtaatgattgttgagtggcatgtaagcctctaagaagttcttagttatgtaatgatggtatgtaaggggatatgtgtgctcatattgcaaatttgcatgttataattgacgaacaattgtacttaacattttgcaaattagtttgtactaaattttatgtgtaattaccatttgtagggcaaaattacagacatttacatttcaaagtttgtttaaatgaggtttcaaaattttgtagcattttttttatatacacttaccattgtctgaacaatattttaaaagtagtaatattaaggtttcaaacaaacatttaagtaagatttacattttaaaagta

SEQ ID NO: 22614 - DNA, 577 bp, Oryza sativa
gagcggtgtggtgttactcggtagaatgctcgcaaggtcggctagaaattggtcatgagctttctttgaacattgctctgaaagcgggaacgctttctcataaagagtaacagaacgaccgtgtagtgcgactgaagctcgcaataccataagtcgtttttgctcacggatatcagaccagtcaacaagtacaatgggcatcgtattgcccgaacagataaagctagcatgccaacggtatacagcgagtcgctctttgtggaggtgacgattacctaacaatcggtcgattcgtttgatgttatgttttgttctcgctttggttggcaggttacggccaagttcggtaagagtgagagttttacagtcaagtaaggcgtggcaagccaacgttaagctgttgagtcgttttaagtgtaattcggggcagaattggtaaagagagtcgtgtaaaatatcgagttcgcacatcttgttgtctgattattgatttttcgcgaaaccatttgatcatatgacaagatgtgtatctaccttaacttaatgatttttaccaaaatcattaggggattcatca

SEQ ID NO: 22615 - DNA, 5573 bp, Oryza sativa
cattaatgtataaatcaccttcaattagttttgaatagcgatacgtttttttaatgaaccctacaaatttggtattaatagtgcaaatattttttgttcatttttttgagatatggaaaggcggcaatggatgtaacattcgccgaggtttttgggtccatatagggataaagtgtctaaatttgttggtattgtgaaggcacacgctgaaaagaacaatatgaggaagataatttatccatgtgctagctataagaatgaaatagcctgggaagatgcttctaaagtgatggagcaatttgtaactcgtggatttatggataagtatgtaatatggacacgtcatggcgaagaacaagtggacgggactgaaaatatagttccgacaaaagttgaagacatggtgtacaatgatggttctggtgaggacaaaatcaatctagaggaaatgctacgtcatgcagaacccgaggtgccgatggggtcggttagaggtttaaataactttgaagctttacaaaatgcagctaaggaagttatgtacgatgagtcaaagggttgtaacagtgagttcacaacactacggtcagttcttgatcttatgaggttaaaggcaagacatggatgatctgatagtagtttcaacagtctgctagaacttctgcagaaaatgctcccgaggcctaactcactaccatccagcacatatcaagtaaagaaactcatatgtcccctttcacttggtgtggaaaagattcatgtgtgcattaatcactacatactatataggaaagagtacgcttctttagatgaatgtctaacatgagatgctagtcagtacaaatcgaatagcaatactggcctagaaccgtctgacacaactgagggaactaagagaaaaatcctgtagttgtgatgtggtaccttcctgtcaaagaccgcattaaacagatatactcaaatccgcgagatgtggaactaatgcgttggcatcaagaagggcacaagaaggaagggatgattcgacacccgatagatgctcgtcagtggataaactttgatgctcagtatagagagtttgttaagacccacggaatattaggtttgccctaaatactgatggagttaatccttttggagacatgagcagctcacatagtacttggccagtgcttctcaccatgtataatcttcctacctacctttgtcaaaagtgaaaatgcttattactctgtatcctcatacagggaccccgtcagcttggtattgatattgacgtatttctggaaccattgttggaagatatggctgatttatggaaagagggattgaaagtgtgggacgagtacttaagagaatacttcacagtggaggccatcatcttggtgaccatcaatgattatccagcaatgtttttagtttcaggtcaaattaaaggtaaaacaggatgtgtgatctacttgaatggaacgtactataggtatctcccgggttccaacaagcttgtgttcatgcggcaccggtggttcctatgcacaaatcacaagtaccgcaagatgaaggcggagttcgatggcactaaagagagtgatcctgcaccaaaacctacatctggggaaaaagtgtgtgcaatgacagagaaaattgtttgcgaatttggaaaagttactaagaaaccatcaaaggggacaaagcgcaagaaactcgagaagactaagaaaccaaaagatagtaagaagccagatgatagtatgaagccagatgataaactccctcccccattcaagaagcattccatattctttaagggtctgtttggcacagctccagctccagctccagctccacccctcctagagctggagctcagccaaacagtttcagctccactaaaactgggagtggagttgggtggagctctctcacaagatgtactaaagttgtggaactgggtttaggtagctccacaactccactctagactcaactcctggagttaaatttaggagttggagctgtaccaaacaggccctaagtacctcccgtactggaaagatctggaggttcggcatgccatagacgtcatgcatctagagaagaatgtgtttgacaacatagttggaacattgttggacatgccaaagaagactaaagatggtctgcaatcacgaattgacctagttgagataggaattagggaagagttacacccttaagaaggagagaagaatggcaaagtatatcttacaccagcctatttcacgctgacacctgaggagaagaagtcattttgcaaatcactccgcgatgtcaaagtgcccataggtttctcatcaaacatcagtcgattagtttccatgaaagatttgtcggtatctggttataattcacacaactgtcatgtcttgctcaccgtgtttcttgcaattgcaataagagccataaaaccggaacattgaaaggatgctatcacaaggttgtgctactttttcaacgcagtgtcacagaaggtcattccttacgaagagttagcaaatctccgtccattcacacatgagacacagtgccaacttgagatgtgtttccctccgtcatttttttatatgatggagcacctcattgttcacatagtgccgcagatggttgtgcttggcccattgtacctccatcaaatgtggtcatacgagcgttacatggcagttttgaagggctacgtccgaaatcgtgcacatctagagggatcaatggttgagggttacagtacagaagaggttgtcgagtgctgtatcgattacttcaaaaatggaaatacaattggagtacctatgccttgacacgagggcagattgagtggcaagggtactataggaaagaagagattcgtcacccatgatcacaaagcatttcaagaaactcacttcagcacgcttcatcagtttgctatcgttgagccttacaccgatcaacatatcaaactactacgagctaccaataaaggtcacacaaccgagtggataatgaaagaaaacaagagtctcttcatagattggttgcgagacctagacttacctgatggacaaacaaccgatgaaataactatgaagcggttggcttgtggtccatcaactacagtaaattcttgggagggatatgacattaatggatactcgtttagtacgagagcccgagatagtaagaccttaactgaaaacagcggtgtccgtgtggaggcaattgattcaccgggtgaaaaacaatcatacttcggatttattgaagaaatatgggaaatcgactaaggacacacaatgcaattccccatatttaagtgccagtgggtaaaatacctgaacggggtcaatgttgataagtttggtcttactgttgttgaccttgcgaatgtgggtcacaaggatgacacttgggtactcgccaatcgcgtggcacaggtgttttatgtgaaagacccttcaaatttgaagaaagagataatgctaccaggaaaacaatagatattgggagtggatggggtcgaagatgttgaagattacaaccaatacgatagtatgccactttatactcaatttgtacaaaagattaggcatgtcgaggcatctacttagaagaccatgaagccttacatgcgcacgaacggtgtgggcaaaaattttaaagggtaatgattgttgagtggcatgtaagcctctaagaagttcttagttatgtaatgatggtatgtaaggggatatgtgtgctcatattgcaaatttgcatgttataattgacgaacaattgtacttaacattttgcaaattagtttgtactaaattttatgtgtaattaccatttgtagggcaaaattacagacatttacatttcaaagtttgtttaaatgaggtttcaaaattttgtagcattttttttatatacacttaccattgtctgaacaatattttaaaagtagtaatattaaggtttcaaacaaacatttaagtaagatttacattttaaaagtactaatattaaggtttgtatatttgtatgtacaattaccatttttattacaacttttgtaaacattttctattttaaaaaataaattaaaaaacattttcaactaaactattgtcaggtctctaacaatcttcgtaggcggacggtgcgccaccgcgcgcttcgccaccactgctccactgcgcacttcaccaccgcggtggctccactgctgcccgcgcttcgccgccggccgctcgtcggcgccaccactctctctctctctctctctctctatctctctctctctctctctccctccctcccagtctcagtctcggccgctccaccgaatgtcgtcccggtcgtcgtccacgagtgaactcgtcctcgaccgaacgacatcttcggccggtcgtcgtccacggccgaacctcgtcgtcggccgttcgtcgtccatgaccgaacgtgtgtgcatgtgggtgtttctatttatatgtgtgtgcatgtggatgtgaggggatatatatgtgtgcatgtgggtgtggatgggaatgagggatgggtggtatgtgaatgaggggtcatatgttgattgtgaatgtgaatgtgggaatgtgggtgatatgtgaatgaaaatgggtgattgttggtttttgttcatttttttttgtgtaacatgtgggagggtatgttcaaattttttttatataacatgtggaggatatgtccaattttttttataacatatgataagtagtacactatttatcattttttttaactacgataagtagtgttctattttcgttgattgttaatatatggcaatgtggatgaatttaaatgtgttcatatgacagattgttaaaatacagtttattttttatgttagaagttcgaaacgatggccgatagtactaaagggaatgaagagaagggtttatgggaggaagagccattccttcctattctggttgctccagaaccaacagtcccgccggaagatatttccgacaacgacgtagctgacgatgatgatgagaactcgtcgttaagtgatccttgtccaagcccgaagagatgaaaaacgggcgagggtgaaaaaggcgacaaagactacattccctctaaagaaggggtaagtacacttaatatctaaactgtttgagtgataactgttagcccgagctaattataaactttgatacatactcataggaaacggcgccatggcgatcaaaacagcagccgaagaaaaaagataagtcaaaagacgacgaggtcccagctaagaccaccggctcaaagaaaagcgaaccgtcatcaaaggcgaagaaaagaaggggcgagagaagcgtgaataaaaaggacgaagggttttatgttgttaccaatgttgggcctaaaggagagtcgctcgcccctcaaactgcacgtgccaaatttagttcacagtgtggcataatcgtaagggaaaagatccccatcacggtcaaggactgggatcatgtgtcgaatggggataaggaagtcctatggaaagagctgaagaaaagattccagttcccggattgagg

SEQ ID NO: 22616 - DNA, 15859 bp, Oryza sativa
atctaggaactgggtaaaagctagaactcctaagatcacagaagaaggcaaagtatcgtttgaaaatctggagctacagggggttgccgataaaatagagactttatccagtgcatagaagataggatcttttaagcctaagagggagaaagatgtgctaagtacggtgctgggtactcctgatcacgggggtacggttcgaggtgtgtcattcaatctgagttggaaggaagggttcaaacatgacccccacaagaaacgtgaaacctacaaggataaactaagggacgaaggggctcaggattttgaaaggaaaatgatggatttctgcagcaagcacatgcttttgcctgatcccgcaaccaaagaacctgagccagattaccccttcgatgacctaaaggagaatacatcctgtcgattgcatgttcccattggacgctccggaagaactcttgaggccactacaaccattgctatccctaggagaacatataataaagagtccatacccgatgagtatgcaaaagtgcagctgcaagtggtccacgaagggtttgagtcgtaagacatcgacatccctagtccagatggtgtatccgtacttggggatgcggttgatcttataattctttggcacaagaatgacaaatcctttggattgggcaccgacgccacgcgaaaacccttttggccaaaaccgggggttccaaaacctccgagaaattctccaaagaagcaggtgaatgataaggcggacaaacccgagatgcctaaggaaatttcggtgccggatgtcccaatggagagtgcagcgccggaggtgcccatggagatttcagtgccggatgtcccaatggagactacagtggcagaacaagatgtgcaaattgtggcttcagtcgggacagatatagaagatgtagcaggattagaatgggacggtacagagatagaagtatttgaaaacccttctcctgcgaaagaccccggggcgcaggaacccctagtctctgacaaggccactgacaagtctgaggtgcctaaagtgcttaggagccacaactccaagtccaaagatgataaaaaagagaagttcatggtaaccgtcttcagagggggtaaggaacatgccaaactcagaggtgatgacccccagaaggccgctgcactaaccgggaaaaaatacttcccaactaatgattgcccagaaaaatacgaatatgggaaagcacttttaccggaatgggcacttgacgaaggtctataggagatgggaaggtttcataccttctacatggatgccagcaagaaaggcttgggtaatataacagctcgatcaccaacagattgtttcggcagcaaaggttacgtttggctagatttcgaagatcttcacgccatatattgtcgggacaagatggacgtcaactatgtcgttgtttggtgcatgtgagtatgagttttaattaattacatgaaaaatatgtacaatacaaatccatgtgattattactaacaaacttcttttgtaggatgcaataaatggatgctaagaagaaaaaaaagaacctatcggattcttggatccaactcggatctgtgaaacacatcataccgtgaggctagcaccagggtcagactagatgaacggcaagactcccgaagagatagcttaatacaagcagataatgattactgtcgcacaatacattggacgagccttcttgcactttcaaaataagagagttgtcatggccgcttataattttaggtaagtccggtacatttatcttctacacacatgtcttattttagccgctactaactaactacgctgttgttaatatgtagcgatcattatatctgtttaatcatccacccgaaggacggaaccgtggtagtcttggaccctctcgatttcagtcaccagtcatacaaagaatttctaacaatcttatagtagtaagttattctgactcttgcatttttttaatatgaatgtattataattaaatatcctccttaatgcaaaacgatacgacatccatacagtgcatacaactactacaagttcaagggtggagaacagacccgaacaagggagaagctactagcacatacatattggccagtaatactccactcacttaatttattccaattgtttcactaattgcaaaatttaactattttcttctatgatatatcgtgaagtgtcacaagcaacctagaggcactgtcctttgcgggtattacgcgtgcgaattcctcagtgttaatgggaggtacagagttaacacaaaggatgtaagtctctagactatggactagacagcttcacatatttatgatactaacatattgtttatcttccatgcatgcagttgccaagaatagaacttcgaacaagctttgacgatacaggcatcacaaatgttcagcgcgatctatgccacttcatccaccgtgagtgctgtcatatgcgaggagaattcttcgacccagagggtgccctaactacaagtgacgaattcaagcaacttcgggagtggaacaatgctatgccataatgtaactagatggtgtatttgaagtgacaatgtaaaaaaatattgtaatatatatattttgataacacttttcacttatgcaatatatgtagttttctcagtactaaatgcttgataattactaataatcttcctgcatcaatttctattaaataactaaaaagtaatatttgggcaaattattattgtatcaaatttcaaaattttctacctatcttcgcaggcggatgtttttattttttgcaggcagccacttcctatttccgcaggtggacctgactagctttttatccacctgcgaaaattgtcttcacaggcggacggctgccccgcctgcgaagatcggtgatcttcatagtcgtttgcttacaggcaaatggctgccccgcctgcgaagaccggtttccatcaccgatgataatgctttttctagtagtgaagataagtattgttatcacggagtggttaggtggacttgcttgtcgtgataaacacacggggtatcatatcttgcatgatatatatatcctagcgagtggtcatcactgtacacaatgagaaaatactgcagcaacatttgaagaacctaacatatatagtctagaatatttcagtaggaaatggaggcactaggtagtaattcacatcagaatcaaatatatttcggcttgtgaatttgtgtttagtgagcccgtagttatccttggaattgactccgcttatgggaaggagacagcatgagcatttctgtaagtcgacagcatgtgactacttactggaagatcggtaagtgttgtgtagggtgtgtggggggggaggggggcattatatcttaactcttcaaaaaagaatcccaaaacagaacaagaatgagccacattatccggtgaataatagccgttagatcaaccagcagacaaaacaggtagaataaatctcaaccattggataaaaaagtgtgttctaaaactttccggtgtctctccttcatatgtgagaaagagatatagaacatagaagacacataagaaacaaagaaaaaaaaggaatgtttgtatgatagagagaaatgataaaaacattttttaaaaaaaaactaatatatattttatatatatttcacaacaaatttttcagtaacataatattagtaatggattattcttaaacacctatagaaaaagatagtgatagtcacgcaaatgcgcgacttcatgcactagtatatggtgaacttttctggtgatgcctacatattggctccgaaaaagctagaaaccacatcattcatattatgaggtatgactggtacactagcacgggataggtcatctgaaacggacgacaaacctcgtctatctaaatatatcttgataagcaaagagtactacattgagaccatcagcacagcagaatttgactcttttggatttgcacgcctatttgagagtatggatccataatatagttgacttctattcactgaaacaaacatgagtacatgcaggtccagaggacttttccccaatttgaacagcctaggttggtctaccgggggagaaagcttggtatctggattctggaggctggcgctgtgttatggccatcagggtccaaaacttgcagctgacaacagggggaaaatcgcgtttccgagctgagagattggagtagcagcagccaaacaactgcatatattgctatgcggcgccggccacgatatggagcagccggtggacggcgatatccaccagatgatggacagcatgtagcatctccagctcgccagaggcgcggcgtctctgcttcttcgtcgattgactctgtttggctcatctgtgcagcaccgcctgcgtcgactctgtttggctcgtatacctgcctcgtctcctcgccagcaaggtgctgccgagctgcacactgcactgcattgcggctgatggccacagccgaggtttaagttttcggtttcaccgaaattttgaacaaatgctggtcaagtttaaacaaaatattatcaaattcacaaaaaaaaattaaaaatttggccgaaataatatcatatcggggggtccgaaatttcattccggaattttgaacccgagcctcatccccccccccccccaaaaaaaaaaaattttttgttttttttaggaaatggctactggagtattactccatgctagagagtttcacatctcaattgtgtgtgtttctattcaccaacttgcacaaggcgttagtgtttcagtttacaaagctttttccttgcctcagcttctcccgcatggactaagctgttgtggaaggtgctcaattgatttttgtatgataattatgaaggcaaaatcaaaagcaattttcctaaatatatacactagaaaaaatgctaatgcgttgcaacggatgaaaactattttaatcttattattgttatacggtttagctatggtgaacttgactgtgtgaatttgcttggatatatttttcttttagaaattcatgagctgcaattaggagtctgactttcatctcaaattagtatgcgaatttttttaaagagatttcttatacgactccttttgtatatctaaaagcaaacaaacttaaaatctgactcaaacataaatatgtattttcaaaagagagcgaactttaaaacctactcaaatacgaatgacgtaccaaaataccgacaaaaacatttttaatttttataatagtagagatgtggatgacagaatcttaaacaaaaatgttgcacattttatataccatttaggtgttgcacataatgtgcgagcctgtgctatattaaataggtacattagcggatcagttatcttgttaccttctcaatgttttttatcagcaaagttcgtctgtctctctctatatatatatacatacatatatatatatatatatatatatatatatatatatatatatatatatatatatatatatatatatatgatagaatccaaacagagagaatgagaatagtccttcaaaaatatttggtttatattggtgagccgatatataggaaagggaggcaacagggaatcatgttgatgctctcatcactgtcttttccattcactgtcaaagcacataactgtttgtcaaacatcgtgtttagggtaaaacatgcatccgcagcatccggggattattagggaagtacgctgcctgaacttatgctatatcaaagatgggagtgtaatacttcaatgacatgctattgttttttctctatggcctatgactattgtgacgcagagagaagacaattgtgctgtattggtatcaagtatagtatctacatagagctttagtaatcgttccaagccagggtggatccagtgtgagtgtcagggcgactcaactccccaataccccgctagatcactattggtagaaggagagagggaagggggaagaagagggagaggaggaaaaaagagatgagtccccactataaatttattttagattaacccctgttccaagcagaatatcgttacaacttacgaagtgaataggaaaaaaaactgtgtaggagctcatgagcagggttgcatgcatggaagagatataatagattggataggtgtgcataaataaatttttatttacagtgggcctcatatctagggataagagaagtatcaacacactaatgtctaatggaataatgaccggttccaacctctcactattagttactatttcaagcagttccaaaaagattgtgatttatatttttcccattcacaaaaaatgtaacgactttaaaaggtagtatggcccattaagataaagaaaaccgattgtacacaatcgtaagcacacatctaggctgtgcaaatttcagttgattgacaaatagcaaagtcaatatatttctaacaagtgaaatatagcaaaacttacattttatgtgtttgcatgcagtttaacttatttcagtgtgaacattcttgctgcatgggcttttggatggctggacctgtcaatcaacattgaaactaacgtacatttatagttgtacacaataacattgccatgtgccatcatcaaagcaatgacatagttacattctgtacgtcaccggctcaccgcccagctgattcgaagttcaattctaattttaacactacatttacgacatccagctatcggaccaatatattcatttggaaggtgagcacaaaaaaatggctagctagattggatgccatatgttttctagctattctgaaatgcgatcgataacaacaccaatcatcctttctcatctctagaccctgtaataagtttgtccatctcttacaaagttaggataccaaatgccaacatgtgtgtagatcgactgtatagaacacatgcatgcagcccaccataggaaagggagacaccgagatatctggatgtgatgcacggttcatgatgaaataggacataaagtgcctcatttgcttgcacggcaggtgtagctaggtttaatttgttcgggtcaactagccacattctacaacacctcagttgccagaagcaaaagatggcactttgtgcagcatggcagaagacatgctatgccaaatgccacccctagtatgtataggtagacaccagacaatgggaaggaattgaaggcatgcatggatgaaacataaataatgtttcagcatcatatatgctacaaattgccaaattgcaggagagatgttaagcatgaatactggtttgtgcagggtttgcaagctaggcagaaccatctacaacgacttagattgaatgatggtgaatgacagccaatttaagactaaatatggtgttcatccaacaggctgcggtatagcccggtagcaagagataagaaatttagaatttagttcaggattcaccaatttgcactagcttctcaaactttttctttgttctgcccatcacagatgacctattgtcttgtagcaacggtcgacgcgttgagctgattttgtggaaaatatgtctgcccattgatttcctggttgataataaggtatcaaggtgaaagcagatggatagtgaacatatacataaattgatgtacatgttatagtggtaatttttacaaataatggtctctaccgacagtagtataactcataaggtatggacatgagtatactttacttaagctacaattttatttcacttatagacatagttggtgaatcagttatgttcaagcttaagagccatgatagatcctgtagatgttagataactcctggtcaccctttttatattaagagaaattaataatagttcagaaattacacaagcctggccggagctagtctccacagtgttccgtcaacatgatgcgcttggccacgcatgctgcactctgaatgtccatatcaaaaggtaaagttcatcgccttatatatttatgtctactatacaaaggcactcttaaaagcccccacatcaatcagaaaaagaactgaacgatgggcaccgtacaaacctagttaattaatttttgaagctaaattattatttttggaaagtacctcatcactgatgagtcataaacaaacaacgtctcagatgacctcagctatgatggcattggtatattagaccgtcataggtgagtcacctgtgataggtgtcgaagtagattcatcagagatagggttacctcttattggatcgtatgctttgaacccgtcacaagagaatcacctttaacgggccgataacaaccacacatgggctggtggtgagcctcacctttgacgagcagcggaaacacagcccgtcgtcagaggtgagtagagttatcgttgaccactcatctctaaccagggttgaacccatcaaaggtaaggctttgtacccgataaagatgacttgatccagcgtagtgcctcgcgttacttttgccattgtatatctgtttggatatgcatgggctcattcaggacgacaggacccttcggtatggtggattgacaaaacatttttcgaggattcaactcctagaaaaaattttcctgtaccaatttaatatattcatatatgttcaatgctgttacgagtactgtttgatgacatctatattaagcatcatctcctttatggatactccatgaagaaaaaccataggacaacatttaatatgaggaaagatgtgaatgaagagcaggtagtcacagctgtggaagcttagggtatgtgaaatggaggcactaggaattcaagtctctgctcccatctccacgtacgttcttgatcacagtgacatcacatactgggtacctagagaaaccgttagttacatactcgattgatgagcaaagaacacaaaatattattgcgatacatatagtagccaagtagtttcttcaattgtctctgtctagagtttttgggatgtacagatacacagacctcatgattaacactagcaagaagatatcccaataatatcgcaatatcatcaaaaaaaaactgtaaaaaaatctcctatatctaaggtaccaccggttaatttcatgatttcataaatttaaccatgtgtgttctatttaaatttatctttgtcatatcaaaattgattttaatatgataattagaatgtgtggttttacgtttgataccaggcttcggctatatagattcttcacaaaaataattgctatggaatacataggttgagtggattgccaacacctaaaagaactgcaaacgcgttaccatcatagacaatttgcagccgtttttagtgcattcattcacttagacatttcagcctattttttctcgaggaaaacctccaaaaaggacagggagctcatgcaatttcaccgttagaagaagagagtttatctagtttatcaggaaaaccgagtcaaaaatttactacagcacggttatttaaggaaaaccaatgaaaaccctaatattatcaaagtgagctaaccacgcagacctagatccactaacaaagtccaccaatccaataagaaaaatctcctaagacaaagcgttcaagaaggacacggaaacaaaagggtgacattggccgatccaagcaaatatgagattttcacccagagagatccattgaggctgaggataacatttgctacatagcaacgccttcaagaaggtgtacgacacctaagggcgtcgccgttgttagcgatggtaaggtgtgcaaggcttttgcccaccgcgtccacgatgaaagccacgcaatgccacctgcacacccaaagacttgcacaccaaaagccaccacttgtccaacacagccactgacgcacatatgctatatttttctagctaccaggtaccaagctgtcgaagatgtccgtccatcgccccggtcacattccactgccgcaccacaccatggagctgcacacgagaaagagggtgggagatccacatagagaagtggcccgagaaaagagcagccatagctccagcacagcttgccaagatgacatgcgccgccacctagcctgttctgcacgaagcttcatgccaaaccacggagttagcctgtcagaaccaccgaacgaccaccatctgaccagtctaatctgacaaaaatcatggatctagatctagatctggagaaaaacaaaagtggagacggagaaggatgaaagagagctaggaaaaaaatgataaagggagaggagaggtaaggcggagggggaaaggatgtgggagggaggagggcagaggtaggcgctggacaaggggagcctacagactcgccgttggtcacctcccatgtcgccccgagagagcggcatgggagcattgctggagaaaggtttttaaccctggtttgtaaaccccttagtcccagttatgcaaccgggactaaataaccgggattaaaaatccatatttagtcaagatggagccaagccaggtccggttggtagttttttttcttttttttattgtttttaactttgaatattgatttcactacatcctcaaatcatccccaaaacgtgaaatccccaaatcgatcatcacagaacaaaaatgatcatctcaaaatccccaaatcggtaatctccaaatacatcataaattctaaaaaaaaacatcgcaaatacatcatattcacatcacacacatatcaaatacatcacaaattttaaaagaaattcatcacaaatcaaatacatcacagattatacgtatcagatacatgcaatgaatcacaaattcttaaaaaaagtaagaataaaaacaatccggtgatgccgctgccgcctcccgcctcccctccggcagagaggacagcgccgcttgcacgccgcctaccgctgcccacccatccgcccgccacccgccttcttgcttcctgcagccgccttcctgccgccatcccctccgtctgcctctgcccgccacagccttcacggcgcgccgccgcgcgccactgcccgccaccgccatccccttcgcctgccgtcgcgcgccgctgcccgccgctgcccgccactaagaagaaaggaaggagagaaaatcgagaggaggagaggggaagggcgccggtatggaggaagagaggtgaagggataagaagagaggagaacgacgcggttgccgaggagatagcacgcggggaggcgtgcggctgcagttttttttcaattttggtcccagttgggataaacaaccgagattaaatatcattaaagatagcagtggggcccgacacggcctgaccacgttttgaaccgggactatcttagtcccggttggtgtcataaagtgtcgtgccgcttttgaaccggggttaaagatctctttagtcccggttcctattcgaaccgggactaatgtgatttttgccaacccagcaaagatggtttatctagtagtagagtcaaccctcatttcaatttaattagttggccctactataaattgggttgttccaaggccaacgtagtagcaatgttgagagtgatgacaaataattaggctcttccatgctatatatagatcgccctagctcctagctactcgccatcagcaaagcatgggcacaagaaacagccgtagccttcaatattccaataggagatggaggcatctggaattcacatcagagccgagaaattccgcctcgtgaattttccttcgaagagcctatagttatctttagcaatttattttggatagaaaaaggatacaccatggttcaggttctgtcttgctgtaaaaatttcgagccctgtgcacagggtcagcaagatcaagccggtgacggccaacaatacagcagtctaagcgatcggcaatacaacgtcactggcatgtgatactttgagaattgctcttgctgcaaggaatgcagcggcaacgttagcaggtgatttttttcctagagagggatgtatgttaatattgggagtacagcaaaatctaattagaactgcatgtatcatattgctaactactccctccggtttttttatatgacgctggttagtttaaactttaactagccagcatcatacaaacaaaaatggaggtagtgttagaataattaggctaggcccgatttatcctattaaaatctcaaaggcccataataagtgttaaggataataataccacctcaggatttaagcgaggagtatctcaacctaaatagggagttattagaggctccctgttgaccggttgaggtgggagtcggaaagccacacgcgcgcgcgccgggccgagggcgtggcgtggcttggctggctggctggcgtcacgtcgctattcttttgcaaccacgatcccacgttgcttctttcccgggtgttagttcttcctcctccgcgcctgtcctgttctcgcctcctcgcttctgatcacttgcgcgcacaagagatcggaaggagcagggcctccggaaccacaccttcgcctgatatctgcaccgggtaggcgggtgatcaggtttttggggagatcggaaggagcatggcctccggaacctcaccttcgcctgagatctgcacctgttctcgcctcctcgcttctgatcgcttgcgcgcacgagagatcggaaggagcagggcctccggaaccacaccttcgcctgatatctgcaccgggtaggcgggtgatcaggtttttggggagatcgaaaggagcatggcctccggaaccacaccttcgcctgagatctgcaccgggtaggcgggtgatcaggtttttggggagtgcttcccgcacgactgctcgtccaccatgtctgcgcctggagccggagctgccgccgccgccgctgctgctggagctggagatggcgtgcctggagctggagccggagccgttgcgaacgtcaacaccaacagaggcaattctgcctcacaatccagcggagggccattctcggggtatatccttctcctgctgttaactcattcgtttatagcgctgttagtcctgttagtcgcaagtcaattgcagcttttggggagtgcttcccgtacgattgctcgtccaccatgtatgcgcctggagccggagctgccgccggtgccactgctgctggagctagagatggcgcgcctggagctggagccggagctgttgcgaacgtcaacaccaacggaggcaattctgcctcacaatccaacggagggccattctcggggtatatccttttcctgctgttaactcattcgttcatagcgctgttagtcctgttagtcacaagtcaattgcgttcttgctatgttcatgttcatgatgcttatgatacctttagcatgctactggttatgctacatgttgtcactagatcacccaacactgtttatgccatgattattgtcttaacattttagattaaaatataccgatatatgaccatatttccaacaatccaaaaacctaataggtcattttcggtagttggctttgctgctgcactgaaaccacatgcttttgatggttctaactataagagatggaaagcacgtgcactattgtggttgacagcgatgcaatgcttctatgtttcacggggcaaacaaagtgaaccacctctttctcctgaggaagaggctaagttcgaggcttcggattgcctgttccgtggagcattgatcagtgtactcgctgacaacatagtggacgtgtacatgcacatgccttctgggaaggacatgtgggatgcacttgaggccaaattcggagtttccgacgccggcagtgagctgtatgtcatggagcagttctatgactacaagattgtcgatgaccgttctgtagtagaacaagctcatgagattcagatgctggctaaggaacttgagaacaacaactgtgagttgccagacaagtttgtggcgggtggcattattgccaaattgccaccttcttggtcggacttggccacttctctaaagcacaagagacaagagttcagtgtttctgatctcattggctctttgggtgttgaggagaaggcgaggacaaaggacgtccggggcaaaaaggttgagggaggttctagtgccaatatggtacagaagaagaaccctcatgcatcccacaacaacaagaaagtcaagcctgatgtcaaacccaaggctgcaaccaactttaagaacaaaggcaagggaaaggcaaagggagactgctttgtgtgtggcaagtctgggcattgggccaaggactgtcctgagcgcaaagacaggaagtctgccaacatggtcattagcgagggcggaggaacatcggggtacggtaaaatattacctacagttctctctgtttttcactcacctgattggtgggtggatactggtgctaatattcatgtatgtgctgacatttctctattttcttcttatcaggtcgggagaggttcctccttgttgatgggaaacgggtcgcttgcggctgttcatggtgttggtacggtcgatctgaagtttacttcggaaaagaccgtgcagctgaagaacgtgcagcatgtcccttcaataaagaagaatcttgttagcggctctctattgtgtagagaaggttttagacttgtgtttgaatccaataaatgtgtcgtatctaaatatgggacttttgttggaaaaggttatgacagcggaggcttgttccgcttttctttgaatgacatgtgtaataatcataatgttgtgaaccatattagcgaaaatgatgagtctgatgtgtggcattcgcgactctgtcatgtgaatttcggttgtatgacgtgcttagctaacatgagtttaattccaaaattcactttggtcaaaggttctaagtgccatacttgtgttcaatcgaaacaacctcgcaagcctcacaaggcatctgaggcgaggaatttggcacctctagaacttgttcattccgatttgtgcgaaatgaacggcgtgttgactaaaggggggaaagaaatatttcatgacactgatagatgattgcactaggttttgctatgtgtatctattgaaaacaaaggatgaagcattgcatttctttaagacctataaagctgaggtagaaaaccaacttgaaaggaaaatcaaacggttgaggtctgatagaggtggggagtatttttccaatgaatttgcatccttttgcgaagagtttggaattattcatgagaggacgcctccctattcaccccaatcaaatggggtggccgaaagaaagaaccgtactctaactgagatggtgaatgccatgttagacactgcagggctttctaaggaatggtggggtgaggcagttttgactgcgtgtcatgtcctgaataaaattccaatgaagcataaggaagtaacaccattcgaggaatgggaaaggaagaaattaaatctctcatacctacgaacatggggctgtttggccaaggtaaatgtacctatagccaaaaagcggaaacttggaccaaatactgttgattgtgtgttccttggttatgctattcacagtgtgggttataaattcttaatagtaaactctagagtacccgacatgcatgttggtacaattattgagtccagagatgctacattctttgagaatgaatttcccatgaaacatacacctagcacctctagtcaagaaactatcatgccccatgagcactttgcaccgatagaacacaatgatcaaacgcctgaggaaaatcctgaggaggacaacattgtagatactcgtaagagtaagagacaaagggttgcaaaatggagatgact

SEQ ID NO: 22617 - DNA, 676 bp, Oryza sativa
aacaaacatgaggccagcaaggctctactagagttcaagcatcaaaccaagcacaacaaaacaaggtataaaactatataacagtagcacagaaaaaaaaaatctatggacaaggcctacccagtacccacctcaccctgccctgccatccccccttgtgatgtgtgaatgtctctatcttacttgtgatagccagtatcctcacctcacccacagcccaccaatcacagcactcctttgtattctctctcctacatgcactcccctctacaaaaccacaaccagcatttttttcttttttcacaatccccttgacagcacagaggcaacagcaaaacacactctcatcagtgtcaggtctccacaccacacccaagtacaggtacacacaagacaatcctcccactgaactgaatcccatccactcctttatcatcatcaccatttccctccttcccttttcctcccctcatttccatttccagttgcagcaagagctgcctcctagctctcttcctgccatccatggcaaatgcttccctccaatcctttcttcttcaccaccaccattctttccttagcaatggtatccatgagggctccttcccttctataattctcaagctcacaacaaacagcaacagcagcatttcattcaagctcttctccaacacca

SEQ ID NO: 22618 - DNA, 670 bp, Oryza sativa
  unsure (1)..(670): unsure at all n locations
caacacggtgaatatacaaaccacccattgctaattgcatactaactattcccctgtccatagaaaatcaagccaatctggacatcagcattatcttcgaaatgcaattttgactgcaataatttctattgcaacaatgtctgtgtaaaatcaaatgaactagtacaatactacacaaaacaagactgcactttgtagaaatcaaatctacacatctatgtaactcgcatgtgtccaatttttaaatgttttagaaatagctatgcataaattttaaatgtgcccacatttgatttgacaatatatacctagctggtgcgcttcttcttgggaggcctggaggacgttcttggcggcgggggtgaacttgatctccatggggaccatgccggggcccctcccggccatcttctccacctcggcgcgcgccgccttgaggctgagcccggcgcccctgagcaccttggcgccgatgccggtgccctccccgatgacgccgaggaggagctgctcgctgccggcggcgtggtgccccagccgccgcgccttcttctgcgccatcatgatcgccttgatcgccttgtccgtgaacatggcgaaccccattcttgccaccacccgcgccccccttcttcttccgccgncgncgttcgcacgcncgtacgacgcc

SEQ ID NO: 22619 - DNA, 848 bp, Oryza sativa
ccccaaagtccggaatattgtcgtcttccacttcatcttcttccatttcaacaccttgctctccgtgggatgtccaacaattatagcttggcatgaaccccgactcaaacaagtggaaatgaatagtcctggatgcagaatactccttctgattcttacacttattgcatggacaacaaataaaacccctttgcctgttagcttcggccattctcaaaaaatagtgcacgccgtcaataaactctttggaccgccggtcagcgtacatccattgccgatccatctacatgagtcaaaaaaaccgcacacaaataattattcttacaataatgacagtcatacaataattataagatatctttattcatacaaaaatcataaaatattacaccaaataattcttaaaaactatttgtaaagttttaaactaattttaatgtgttttacttcttttaatttttattttagtttgttttctattatttaatattaactttcactagagttttccttctcaactattttataaaaccttgtttagcaaatgaactaaatttctatatattctttcttccccacacacattttctctctcatcaacttacaactaaattttggagacaaaaaaagtgtgcaaaacataggtgcaaatgtagtatgacaaaaaaaacattggaggatgaagttgcaaaccttttaggcacctccgatttgtatgtaatcaccaaaataaattcaatagaaattttggcatgacctcccctcttttttgaagaaattttgaagcttgctcgggcagctggaggaggaagaagacatatatataggggtgggactttagtcccggc

SEQ ID NO: 22620 - DNA, 5635 bp, Oryza sativa
gttggataccactctggagttgttgcaatggaaggcaaggaatggggttagtgacaaggcatttggcgatttattgaaactcgtcaagaacattcttccggggggaaacaaattgcccgagacaacgtacgaggctaagaagatagtctgcccgttaggactggaagttcataagattcacgcatgtccgaacgattgtatcctatatcgcggtgaggagtatgagaacctagaagcatgccctgtttgcaaagcactacgatacaagattagacgggacgatccaggagaagttgacgggcagctaacaaagaagagaattcctgctaaggtgatgtggtatttccctataataccacggctaaggcgtttgttcaggaacaaggggaatgctagaatgttgcgatggcacgctgaagagcgtcaacaggacgggatgctgagacaccccgccgatggttcgcagtggcgaaacatcgacagaaaatttaaagaattggaaaggacgcacgaaacatacggtttggtttgagtacggatggcatgaatccttttggagagatgagcaacggccatagcacttggcccgttacgatgtgtatctacaacctcccctcctggctatgcatgaagaggaagtacataatgatgccgattattattcaaggccccaagcaacctggtaacgacatcgacgtgtacctaagaccactggtcgaagatcttaaacagttgtggaagaaggaaggtgtccccgtgtgggacgaggacaaacaggaggagtttaacctacgagcgctgctgttcgtaaccatcaatgattggcctgcacttagcaacctatccggatagtccaacaaggggtacaaggcttgcactcactgtatggatgaaacagaaagtacgtatcttaagcactgtaggaaggttgtatacatgggtcatcgtcgattccttgcagcaaaccacccggtacggaagaaaggcaagcacttcgaacataaggccgaccaccgtacgaagcctaaacatcgcagcgggaaaacagtgtttgctatggttaaagatcttaaagtagtgttcggaaaggggcctggaagccagcatatagagagcgaagatggtcacgcggcgatgtggaaaaagaactctatattttgggagttaccatattgggaattcttggacgtacgccacgcaatcgacgtgatgcacctcactaagaacctttgcgtaaaccttcttggcttcctaggtgtatacggaaagtcgaaagatacactggaagcacgtaatgatctgaagcatatggaacaacgcggcgaccttcacccggaaccaaaggagaaaggaagccattacttgagtccagccagctacactcttagcaaggcagagaaggaaagtatgtttgaatgcttggagagcataaaggtaccgtctggatactccacgaatatcaagcgaataataaacacgaaggagaagaagttcacaaacctaaagtctcatgactgtcacgtgttgatgacacaactgctaccagttgtaataaggggtatccttccagacaatgtccgggcaacaataacaaagctatgtgcattcatgaacgcaatttcgcagaaggtcatcgatccggatagattagaagcccttcagaatgaagtggtgcaatgtctcgtcagttttgagttgatatttccaccttcatttttcaatataatgacgcatctgctttgtcaccttgtgaaagagatccgtattctcgggcctatgtacctacacaacatgtttcctttcgagaggtacatgggcgttctgaagaagtatgttcgtaaccgtgcttgtccagaggcaagcatcgccaagggttatggaacagaggaggtcatcgaattttgcgtagaatttctcgaagaccttcgcccaatcggggtacctgaatcacgccatgaagggagactacggggaaagggaactctcggaaggaaagcaataatgacggtagacaacaatttattccgtaaagcccatttcactgttctgcaacactcttcattggtagctccttacatcgaggagcacttggctctagttcgcgccaggaacatcggtaagtccgatgcatggattacacggcatcacattgatactttccccgcgtggctacgacaacatctcatgggtaacgagtcgatcaaccaacaacttgccttcctggcgaggggaccgtctgggtcgatcgcgacattccagggatatgagatcaatgggtacacattctacacgagagcccaagacatgaagagcacgaaccaaaacagcgctgttcgtgtcgatgccatgggacacgatggaacaactgccacgtattacggtgccatcgaggacatatgggaacttgactatggtcctctcaaggttcctctgttccggtgccaatgggttaggttgactggtggaggcgtaatgattgatgacagtgggatgacaactgttgaccttaacaaggttggatactcggacgaaccttttgtccttgccaatgatgtaacgcaagtctttttcatgaaggacatgtctagcaaaggaaagaagggcagagggcctgatgagcctaagcgtcaagtggttctcccaggcaaaagaaaaatcgtcggagttgaggacaagactgacgaggattacgatcagttggatgggcaaccccctttcacggtgacgattgaccctagcatcctcctatcaaatgaagacaccccttactcacgcagcgatcacaaggagggaacaatagtgaggagaaagtacgtgcggtcaaccgtcaccgccgatgtaatgccgtaattattgtgtacacgatgtaaactattttggatgtattgattatccatataaatcaattgatgtatggcatatgttaattacgcacgattattagaggtttcaacaagtttaaatcatgtatatgttagttatatgtgatacttacaatttttaaaagttttaaatcacacaggtggcaatttcatatgtatgttaattagagtttttaacatttaatttactagcattcatatgctaattataattgactagaggatttttaaaagttttaaatcacgcaagtggcaatttcatatgttaattagagtttttaacatttaatttactatcattcatatgctaattataattgactagaggatttttaaaagttttaaatcacgcaagtggcaatttcatatgttaattagagtttttaacatttaatttactatcattcatatgctaattataattgactggagaatttttaaaagtattaaatttaatatatttttaaaactatcattcatatattagagtttttcacaatttaatttactatctttcatatgctacttatatatgactattcgaatttttaaaaggtttaaatcatgcatgtggcatttacatatgttaattagagtttttagcatttaatttaatataattcctacgctaagtacatatgaggattacaatttttattaattttaaatcatgcagtatgtacattaatatcttaattagagtttttaccaatataataatatcattcatatatatgctaagaatatatatatattggaatttttattaattataagtcatatatttgcttttacggtttatccacttaatttattacagacaaaaataatttttcgaagtaattgtcatcaatctttgtactttaaataatgttaatgcattaacttctattttataaacacatatgtaagcgaaaatcatatgcagtgctataatctttagtcccggttcttaaccctaaccgggtttaaaaagaatttcgaaatagcgggaaaagatatttactcccggttgttgagaacaaccgggagtaaagatccaggggtatatatattcccggtgcgccctcgtcttcttcaccaacacttaaacgttttcggccgatcgatctctctcggcctctctccttcgccgccactgcctagggcaaatccccgcgccgacgccgccgtatctcgccgtcgtctcgagctcgtcgtcctcgccgccgcctccgcctcctccgctgccgccgcatctctggggtgagagccgccgccgccagatctcccttcatgcatctcgatctctccgatctcgatctctctccgtcgcgccacccgccacgagacgccgcgccacgacgacgacgcgccacgccgccgccttcgacgccgcgcaacgccgccgccgcatgccaacgccacgccgccgccgccgtcgccacgccgccgccgccttcgccgccgcgcgcgcaatgccgccgccgccacgccacgccgccgccgccacgccacgccacgccaccgccgccacgccacgccgccgccgccacggccccacaacgccacgccgccgccgccgtcgccacgccgccgcgccaaccgccgccccgatgccgccacaccgccgttaacgaacgagaacgagaacgatcgaacgaacgagagcgagaacgaacacgtcaacgtacgttgccgcgacaacgtgaacgagaacgagaacgatcgaacgaacgagagcgagaacgagaacgatcgaacgaagacaagcgagaacgagggaacgaacgtgaatgagaacaagcgaacgaacgtgaatgagaacgagcgaacgaacgtgaacgagctagggaacgtgaaagagcgaacgaacgaggacgatcgttaacgtgaaatgcaatatatatatatacatatatatatgtatatatgtatatatatatatgtatatatgtatatatgtatatatgtatatatatatatgttacttcgtatttatcctaatacatttttttgtatcttgcagaaaagacgtgttgtcggagtcgtccgtcaagcctgaatggaacagctagccctagaaggaattggagcaggcaagtgacgtaataatataaatgattgttatatttgtaatgcaattaattaagattattagacctgtaattagacttatcatataagattgtgtagtgttctaatattatttgagttttaatataagattattttattgcaaattagacttagtatgacattattgactacggaattggtgcgactcctagcaattgactattgtagtcttaattagacttagcatatacgcacgaaacacttagcatacattactattttagtcttagcatgtaatattatttgagttttaatataatattactttatttgtaattagacttggtatgtaattattgactacagaattggtgcgacaagtagcaattgactattgtagtcttaattagacttagcatatacgcacgaaacacttagcatatacatgactattttagtcttagcatgtaatattatttgatttttaatataagattattttatttgtaattagacttagtatataattatttactagctagggttgtataatatacctcacctagacttagcttatatcacgatttgtaattagacttagcacgtaaggttgtgtagggttctaatgtacgacatttacacttagcatacatgacttagattgttaaaacataaatgtctcgtgacttagcaga

SEQ ID NO: 22621 - DNA, 2275 bp, Oryza sativa
gacgtcctagtgccccggccgaagccgccaagaactatgtacgtcacagcggttgggttgtgcgggataacgtgcctgtcagtacggtgtactggcgaagaacaagggcacgcggagatcatgagagctttgtcccagattcgcagaaagagatgctgtggaccacaatgctcgagacattcacccttcctgcgggtacagaggacaaagtgaaaaggtggactctgaagaaaatggcagtacagtttcagagcttcaagggagatctgtaccagaagtatatactgaaggggcagacaccgaacttcgacacattcccaaagctaagggatcactgggacgagttcgttgcatataagataggtgaacaagggcaggcgatgatggaaagaaacaaagaaaatgccgccaagaagaagtaccatcaccacttggggtcaggaggctatagcgtcgcgatgccgaagtgggagcagatggaggctagcttgattgagaggggtatcgaaccggcaacagccaattggccggaacgatcgaagttctggtactatgctcacggtggaacgctcaacccagctgatggctcactggtcttcggctatcagatacaagaggctgcgcgacgactaacagatgcagtggaagcctcctctcagggcacgttccgaccagacagagatagggacgagctgacactcgccctgcagactccagagcatccaggacgaacttgagggaaaggggtgattccttggaagattggtttcaaggaggacatccacacgtacaggagtcggatgaggagcaagagagataccgaggcgaagattgcagacctagagttccgggtatcgagctacgaactcaacatgcaagaggaggtggcaaggaaggttgatgaacgcatggccgcacatcggtcccatgatccccagccgaccattcctcctgcaatggtgagcccgtcaggaaaccgtagcagctgcgcctcaacggggcaggtaggatcacagagcatggacgccatgcaaacacaggacgaatcgacctgtcccgttgatgacatcactcagcggacaccatgtgagctgcatattcctttgaagaacttatcaataaaggtaagatttagccattccgctagttgctgcttatatatgttgattactaataaataatctctcacaacatgaaggtggcgtcgggcatggccatcccaacggacccttcaggtacttaccactgcaggccgattccagcaggatactccaaggtcgaagttgagttggtcgaaggcgcgtacgaggacctcgagctggattaccctggaggagacggtgagacgcatctacgagacacatgccatgccattattctatggcgcaggcggtacatcatcctccctgggcgacaagcggcgtctcgtgcaccatctcctccggctccgccatctcctcctcaggatcctgcaccgtctcctcctcatgctccgccagcaccgtctccacctcaggctccagcatcgactcctcaggatcctgcaccgactcctcctcgtgctcctacacctactcccccgcaagctcctcttccggcaccttcaaagtcaagggcccccccagctccaccgcttgcccacataagggcaacaaagaaggcgaaagttgacgccgccaagaacaaggacccggggtacgattgcacgcaagaggagcttgacgcttacgttgcatcagaagtcaagagacaattcaagcctcgaagtccagaaaagaagattcctatagaccccagtgtcaggaacttcttcaggggtatgtctgcatctgtcaaggaggccatcaagctatcggactatgagcgaacgctgaagaaagcatcttctggaaagtccaaaccagtccctcagcttggagagcaaccaaaccaggagatcgagccgttggtgacccgataagaaatgacgatagaacaatttattactgacaccggtctaactacggatcaattgctaggagtcgcaccaatcgaaaaggcggaagtgaaatacatgtacgaactcggtaaaccgcttgtcaagcctgagctgctgcagtccctacccacacaaatgtacaagttccatcagctgtgtcggtgatatgggaccgggagtattgcgcccggaggcttgaggcagattgaatcgcccacgtggcctggcaccctcggggacgtcgggcccgagggtgaggtgtccgccctcctcctgatttccccgagggggggtcgg

SEQ ID NO: 22622 - DNA, 2924 bp, Oryza sativa
acgttgcgcctgtctccgccgggagtggaggtaggtgtgggctgtcccatcgaagtgtcattcggacggcaaccataccaatctccgtccataaagagaagaaaagtccagtttggaaaggaaagggtacatgtggtatccccttaagatataaaaggaggaccatgcccacaaagagaggggactggattttcccgggagaggagagggctggttgatattttgtaacttgctcttacacagatccaccaaaaacacaggagtagggtattacgcttcccagcggcccgaacctgtatacatcgtccgtgtctcgcgtttcttcctggcacgcgatctttccacatacagagagagcttgagatctcaccctaagcccccggccgaactggcaaaggggggcctgcgcggtctcccggtgaggagccacgagctccgtcatctggcgcgccaggtagggggctcagcgtgtgttttctgagctctcatactcttccgtgtgcgccaagtttcccttgttcagcctaatggccgagcaagcaaaggcgcacgacctctctccgagtgtgagcggcgacgacggggagccaaacccacgccgtcgagctcgtacgcccccacctcctccacaacaaaatcctaagcagggggaggcgctcgagagggtcgaaaaatccgcagcatcgccagtcgcgggtggtgcagaagaacggcgagatgggaagcgtcgcctcctcgtctacggcgacggcagcacgcctcaaggcgcgcttcaggctgttggcgcgctcctacgtcacccgcccatcgtccctgacccggagtctccggcccagcgatggctggacgacgtggccaacttggtcatgacggcacagcagcgcctgagtgctggtggacggtccgccaccaccaggacctccggcgccgccaccaccggctctgtgtcatcaaggcggagggcgcggcgagcggcggctgctgcacgccattcggctaccactccctcgtcggcgcctccgactcgggaggatcagcatgaagagccggatgcccgcctcgacatcgagcgccgacgtagtgatcggcgtgctccccgcgcaacggagggtgcctcttcgtccagggtgtcacctcgacatggacgtgaggaccagccctccgtgcccccggttggtggtgttggctgtagagcctttgtggcgagtcttcggaatgtccgttggcccccaaggttccggcccaccatcaccgagaagtatgatgggagcgtcaaccccaccgagtttctccaggtctatacgaccgggatcgaggccgctgggggagacgacagggtcatggcgaatttctttcccatggccctgaagggacaggcgcggggttggctaatgaacctgccacccgcgtcggtccactcctgggaggatctgtgccagcagttcaccatgaactttcaaggcacctatccacgcccaggtgaagaagcggacttgcacgcagtacagcgaggggatgatgaatcccttcgctcgtacattcagcgtttctgccaagtccgcaatactataccttgcatccctgcacacgcggtgatctacgcgttcagggggggtgtgcggcacaaccgcatgctcgaaaagattgcctccaaagagccccagactaccgcagaactttttcagctcgcggaccgagtggctcgtaaggaggaggcctggacctggaacccctccggttccggtgtggcagcttcggccgcccccggatccgccgctcagacagggcggcgtgacaggaggaggaagaaaaggtcggtccattccggcgacgagggtcacgtcctcgccgtcgagggcgctccgcgggccacccgaaaggggaggcctgcgagcgacaaaaagaaagaggctggtactcccagcagggagcgcccagccagcaagtggtgctccgtccacaacacctccctccacgatctcgcggactgtcgcgcagtcaaaaacttggctgagcgaacgaggaagtgggaggaggacaggaggcaggaacgccgtgagggcaagtccgcggcagttccctccggtaaacggcgaagtgaggccaaacagaaggcccccgccgttgacatcgatgacggtgatgatgacctaggtttccaagaacctggggccaccattgccactgtcgacgggggagcgtgtgctcacgtttctcgccggagtttcaaggccatgaggcgagagcttctcgccgcggcccctactcatgaggcgacgcgtcgggcgcggtggtcggaggtggccctcacctttgaccagaccgaccacccaccgtgcgttgcccggggagggcagattgcgatggtggtttcccccaccatctgcaatgtgaagttggggcgtgtcctcatagatggaggagcggctctcaacatcctttcccccgcggcctttgatgctatcaaggccccggggatggtgctccagccgtctcaaccgatcatcggtgtgacgccggggcacacatggccgttaggtcacatcgacctaccggtcacctttggtggatcagccaacttctgcacggagcgggtgaacttcgatgtggcggacctcagtctgccctacaacgcggtcctggggaggcccgcgttggtgaagtttatggcggcggtccactacgcctacctccagatgaagatgccgggccccggtggccccatctctgtccgtggcgaccttaaagtcgcgctcgcttgcatggagcagcgcgcggaccacctcgctgctgcgaccaagcccgagggtggtgacgagaggcttggcacctccgcccccaccgccccgaggcagcggattgccacatgcgacgaggtcccggtcaaggaggttgccttgggcgacggcccatccaagaccaca

SEQ ID NO: 22623 - DNA, 14591 bp, Oryza sativa
taccatcagattcgcatggctagggaggatgaggagaaaactgcgttcattacccccgtaggaacctattgttatacatcaatgcccttcgggttaaagaatgcaggtcctacttttcaacgtactactcgaatttctttgggtagccaaataggacgtaatgttgaggcttatgtcgatgacttggttgtaaaaacgcgcaaccaagaaactttactttcagatctagcggaaacttttgagaacctccgctccgcccgcataaagctgaaccccgataagtgtgtgtttggtgtacctgcgggcaagcttctcgggttcttggtctctgcccgaggcattgaggccaaccccgagaagattcgagctatcgagcggatgcgcccccccagcaaacttagggatgtgcaatgcgtcaccggttgcatggccgccctaagtcgtttcatatcaaggctgggagagaaggcgctacccttgtttaagctcctcaagcgctcggggccgtttacttggacggaggaagctgaacatgccctcactcagttaaaggcatatctcagctctcccccggttctagtcgccccggagccaaatgagcccctgctactttacttagcggcgaccccccaagtagttagtgcagcgttggttgtggagcgcgatgaagacaatcctcatttcgtgcacccccattctgtgctaacttggcccgggagcgagcggggaggagaggcccccgagtcggacggtggcctacggcccctgacgaccggagccggccctctgcccgcttgtcagacggtgctaggtgcccccgaccctcaggagggccccaaggccactgcgggaaggccgcacttaacgccctttgaccccgaggctaaccctgtgctgactcgatccgggaaagagcagggagaagaggcccccgagccgaacggaggccagaggcccctgacgaccggagttggccctttgcccgcttgtccgacgatgccaggagcccccgacccccaggacggccccgaggccactgagggaaggccgcccctttcatcctccgaccccgaggtcatcggcacagaagacaagtgcgccccgaaaggccacttgaacgaagaacgccccggggatacggcccctagcagagaggatcggccccaccgaagggtgcagcggcctgtctactttgttagtgaggccctccgggacgctaagacccgataccctcaggcccagaagatgctttacgctattctgatggcctcgaggaaactgcgccattattttcaggcacgtagggtcactgtggttacgtcttaccccctcggtcaaatcttgcataatcgagagggtacaggacgggtggtaaaatgggcaatcgagctttctgaattcgatctgcactttgaaccacgccacgctatcaagagccaggccctcgccgattttgtggcagagtggaccccggctccagagaccgtctcaatccccgaggccagcacgaacccctcacagctgcctcacaccacccactgggtaatgcagttcgatggttctctgtccctccagggtgccggtgcgggggtcacgttgacctccccgaccggagacgtccttagatatctggtccgcctcgactttcgagcgaccaataatatggcagagtacgagggactccttgccggactcagggtggcagccggactggggatccgccgtctcctggtgttaggcgattcccagctggtcgttaaccaggtctgtaaggagtaccggtgctctgacccgcaaatggacgcctatgtacgccaagtgcggcgtatggagcgccattttgacgggatagagcttcggcatgtgcccagacgggataacatgatagccgacgaactctcacggctcgcgtcctcgcgagcccagaccccaccgggcgcctttgaagaaaggcttacccagccgtcggcgcgacccgaccccttaggggagacggatgcgcctgaccggcccccgaggcccgtcggagtccaggcctcgggacccgaagggagcgctccaagctcccttagattgattgcttggatctctgagatccaaacatacctcacagataagactctacctgaggaccgcgaagggagtgaacgcgtacaacgcatttccaaacgctatgtgctggtagaagggaccctctatcggcgcgcggctaacggaatcctcctgaagtgcattcatcaggaacaaggcgttgagcttcttgctgacatccatgagggagagtgaggagcccattccgcctcgcgcaccgtggttggcaaggcctttcgtcaaggattttattggccgacagctctcaatgatgcagtcgatctggtccggcgatgcagagcgtgtcagttccacgccaagcaaatccatcagccggcccaggccctgcagatcataccactgtcatggccatttgctgtctgggggcttgatatcctgggaccgttcaaacgggccccgggcgggtttgagtatctgtatgttgcgatcgacaagttcactaagtggcccgaggcttatccggttgtcaagatcgataagcactctgctcttaaattcattaagggcatcacggcccgttttggagtgcctaaccgtattattacggataatggcacccaattcactagtgaactcttcggcgactactgcgaagacatgggcatcaagctctgcttcgcctcacctgcccaccccagaagcaatggccaagtggagcgcgccaatgcagaaatcctcaaaggccttaaaaccaagaccttcaatattctcaagaagcacggcgattcatggatcgaggagttgccagcggtgctctgggcaaaccgaaccacaccaagccgagcgaccggggaaacgcctttcttcctcgtctacggcgcagaagcggttctcccatctgagctcaccctgaggtctcctcgggccaccatgtactgcgaggctgatcaagatcagcttcgtagagatgacctcgactacttggaagagcgaaggcggcgcgcggccctccgagccgcgcgctaccagcagagcctgcggcgctaccatcagcgccacgtccgggcccgatcactctgcgtcgacgacctcgtcctacgccgcgtccaaacgcgtgctggactgagcaagctctcaccaatgtgggagggtccgtatcgagtgatcggcgtcccccggccgggctccgtacggctggccacgggcgacggcactgagctgccaaacccgtggaacatcgaacaccttcgtcgcttctacccctgaggggggggtcgggtgtcaggtttcgggctcgggctaaccccgcacccccctcgggtgtgcagggttagccgggggctaccacacatgcacagccttacttttcttatttcagcatttcaataaaagcagtttcaatttcctaaaggttgtgtctgtgccgtttttccttctgaagaatcttaacttgaaataaggtcactcgtgctcaaccttgccctcgggggctcggttcggtcagctaaaatcgccaagcggggcccagaaccgagccgtgccccggggcgtggtgaactccgggggggaatcggcaaaaacccacaatcgggtcacccataaccctcggtcaccatgttcccggcctggccagtctcgacatgtggatctccccaggcactagccccgacccgagccatttgaggatcgggacttgagcacgagcccttaaatcaagctaaaatgcaaaaggaccacggcacaaatcatcctcaactcatatgcatagcaaaataaagttaacatagaaatttttcatcatttttgattgcagattaagttgatctatacaaaaagaagaaagaaaaagaaaaaattggagattggcgggggcctgggggctcattccaatgcgcccgggtcgccggcctcgtcgccaccgtcgtcctcaccgctggcgtcgccctcctcgtcggagctgggggcgaacgcgagccgaggggccgacccctcgaagctttggacgatgtggttggcggcatcccggacccgcgcgcgcgcatcgtcctcggtcccgggagggaactcctccagcgccatccatggggagaagccggggtccctggcctggtaactcgctaacacgagttccaccgctccttgggcgaggtccctcgaggatgacttgatggtcttctcgagctcctcggggagttgttggacagcccaggccatcctcctaaggtgcggggcgaggccttccagattgatggagcgcgaaattgtctggcctttccagaggcccgcttcccgaccggcgcgatccagccgggagactgcatcccaaagcatgccgggccctatctcacccgacaagcggagggcctcggcttccccggtggatgagtccagggcgcgctgcatgtccgcgacggtgtgttcggcagctgcgaggcgggcgactaagtcgctttcgcccgtagccgccccgccgctgcgctccctcgcgtccagctccttttctcgcgcctcgaggttagcagcccgctgctccagcgcggctctctcggcgcggacgcattccagattgcggcgcgcctgctcctcctgcgttgcctcgcggagggacaggctgtccgccagccgttgtgtcgcggcctcggactcctcaagagctcgctcccgctcagcaagcgcgtcctcgcggagccggagcgcggactcctcttcggcgcaggcggcctcgtgcgccgccagcgtcgcctcccggatagcggcggcggcctcgcggtccgccaagctggtctccacggcgccggcatgatcttccagcgccatggcacgggcttcaagggcctcttcgcgccgccgggacgccgcttcagcctccgttgctcgctgctctcgggcagcggcggcgtcaaggaccccctgggcggcgtcgagctttttctttagctccgcctcccagctcccgtgttgaaggcggagggagtcctgcgcctcaatcatcgcggtggtggcgatgagggcggcctctcgctcctcctccacctctcgggcgatctccgccagcgccgccttgcgggcttcaagctccgagatgtggcggcggtgagccttacggcccacctccaccatggcgtccaccgagcgccgcccctcctcgacgcgcgcccatgcggcctcgagctccgctcgttccgctcgcaaggcctccacctgggcgctgaatccatctagcaccgcggtgtttgcggcggccaaggcttgcagaaggggctcggcactcagcggggcggcagaagacgaggagaagagccgccttggagaaaatgcgacgcggctcggcccgccagaagacgcactgagctcggggatgtcccccggacccgtttggtcctgggcgtcgcccgagggagcgggcccaggcgatccgcccgcggcctcgtcgcgagccgccccggaggctgtcgcctgagcgtcgcccgagggagtaggcccaagcgacgcaccagcagctttgtcgtgggctgcctcgaaagacgccatcgcctcagtttggcgggcccgggcggcctcctcccgagcggcttcctcggcttggcgggcccgggcggcctcctcccgagcggcttcctcggcttggcgggcccgggcggcctcctcccgagcggtatcctcagcctggcgagcccgggcggtttcccgggcggcctcttcagcttcccgaaggcgatctgcggcctctcgccggtcagattctcgcctccgttcctctgcggccgccggatcttcggcctcggattggccggacttgggatggcgggaggaacgtgacgggacatcactgaagcagaaagaaaaaccagaaggcaaacaggatgggtaagaaaaaacttgcttttggaatagaagaaaagacggtcgcaatgagcgtgggacgaacctgcgagggggtcggttaaatgaccaccttggaggggaaattaggtttccccgggatggttctgtctcccccatcttgcgcagccgcttcttcttgcgctccccctcgggctgcgaggttggcgcggccccctccgggcgcctgctgctggcacgcaccgccccgccccctcggggaggagatgggggaggtgttcctcccagtttcctcttcccccgggcgtcggtagggcggttgctccccgagcccccgacgcggggcccagaagcacgaccccctccgggggtagattgatccccccggcggctcccacctgcgctgtcatggcccttaggagcctgctcctctgaggccccgaccgccgtcataatggttaagatggaggcgcgatctgggtcgctgcagagggggaggataccgtgggggatgagagacacctccacggagttgagatttagcacccgttggaccagtatcttgaagtcctcgggggcccaatcccatctgactccctggtgggtccgcatgtagtcttcgggcccggtgtactcccaggcggcccgagcgcgccgctggagcggcgcaatccgacgacggaggtagtcgccgtacaccatggcccctgtgagcccctgagatcgcaggcccgccaggcggtcgaggacggcgtcatagtcatcccccagatctactggcgcccgccagctggagaccggcgccgggggctggcttgggagtcggaggcgcgcttcgttggcaaggggggtgtagaaccagtcgctcttccaatcgtcccacttcttgcggagggcgcaggggatgtagcggttcaacaccggcccccgcggctggaagtagcaaccaccgaccaccgacggcggcgacaccgactgcacggtgaagaaccaccggaacagccgaagagatgggcgcaccccaatgaacatctcgcacaggtgcgcgaagatggccaaagtcatcactgcgttgggggtgaggtgcgccatctggagatcgtagaactccagaacatccataaagaaagaagaaaaaggaggaaccaacccggccattgcgaaggggaggaagaagatggaccgccccgggtaatctggtgctgggcgcgcctcgcccagcatcactatctcccggccggtggcagattccggcatgaagcggcgcggcagcccagcctgcctctcgctcacaatgcgggaaggcggtagtacgctaccgtcgagcagagcggagccccgtgccatgtcgtcggagaaagagagggttgagaacgagcgtgtgtggcgaaggtgaggcgcagcaaagagagagtttagggcgcaaacggcgaaggaaaggggaatagtggcgaaaggaagggagcaagtcctttcctcgatggctttatacccttgccatcgctgagtccggctcctcgtttctcgtgcccactatctcgctccctcgttactcgctatctcgctccctcgtttctcgcgcccacgcttccactaattccattcgcccgcttgcggcgcatgaggtggatatgcggttgtggcagtcgagatagatcgtatcgtgtgcgcgttaattacgctcgccgaccgaagcgacgttaccatgtctccagacgaaacgaatctgcacgcccagattcgagtgctgctcaagtgatgtggcagtcttgaagagaccgcccatgactgacggccaagacaccgttaccgatatgcgtggtttgagaccgttgggtttctgcccaatcacggagaccggtcccacctgtcaccaggctttatgagtggcgtcatgcccgaccgcttcccttgagaaggatgatcgccctgacataacgccgggggctactgtcggtgatatgggaccgggagtattgcgcccggaggcttgaggcagattgaatcgcccacgtggcctggcaccctcggggacgtcgggcccgagggtgaggtgtccgccctcctcctgatttccccgagggggggtcgggttgcccctgccccggccccgagggccgaggtgccccgaccccttgtggggtttgcactatgtacataggttgggtgaacacggtagggctcacctaaccgcatttattgcggtctggtcaagcgtgtcacgctgcatgcagcgcaatgcagcgcgctcttttatccggtctgtgaccagtcacagaccggtcagatcaacggttaggtggcgactggcggtctgacgcacgcctcgccccgttccgtcaagacgagagcctctaggcacacgtctccagccggagctagcgtgttacctcttagagatggcacgttagccctggttagatgaataccaggcttcatcccaaccattacaggcaagatgctacaaaaagaagggtgatcatgcagatcgctgaactgacgcatagaggacaagaatgaccgatctgtgaccggtctgacactggtcgcgtcagcaacagacagccacgatcccacgttgcgcctgtctccgccgggagtggaggtaggtgtgggctgtcccatcgaagtgtcattcggacggcaaccataccaatctccgtccataaagagaagaaaagtccagtttggaaaggaaagggtacatgtggtatccccttaagatataaaaggaggaccatgcccacaaagagaggggactggattttcccgggagaggagagggctggttgatattttgtaacttgctcttacacagatccaccaaaaacacaggagtagggtattacgcttcccagcggcccgaacctgtatacatcgtccgtgtctcgcgtttcttcctggcacgcgatctttccacatacagagagagcttgagatctcaccctaagcccccggccgaactggcaaaggggggcctgcgcggtctcccggtgaggagccacgagctccgtcaagctgtacatggagatgagcgccaccggtagagagatgatcggagcgaggatcagggacacggacttcttgcaaggagatgacattctctggatcaatttcaggggaatctacgaactataccagctggacgccctcgacgtctctattatgagttgctggattttgtaagtatatcgttcagttagatttcttactatacgtctcctttaattaattaggtccttgtatataagtagaccatagaaaataatatactcccttttatcgttgtagaatggagattcaaagggcccgacggcggagggttttcgatactggattcatcgaccctcggaaagtaaacgtcgcaatgctcgaccaatatccacaagaaacagaggacaatctcgtccatctcctgaaggcgcagcattacaagacgttcatactgttgccatacaacacagagttagtttaattttactgtcttcctacataccaaatttcattcccgtacgaacttgctaagtgtttcatatgtaatgcatcccacgcacattgcagattccactgggtgcttttactcatcgacctggaggcctgcaccgtcaacgtatatgactcaatggataaaaaagagtctacgtttgacaaggttttcgaacttatagacaggtaccgtcataagttcctttgttaattaagaaaatcttgttatgttaattgctactacgaatcatagctttaaactccatgtagggcttggtatcggttccgtcatttggtccgcggcaaatggagagaaagacttaggcggaagttcaaatttcctgtgagtacacatgctctacatttatatttctccgattcaaatacatacaagtgtatattaattagatctctcgttgtttgtcatttatttgtagtgcgcaaagcaaaagcagggaactaacttgtgcggctattacgtgtgcgagtattgccactgccttgcagaccaaatcatcaccacaagagagctcgatgtacgtacaaataaattcaaaatttcattacgtagcgatttcttgtttaattactaatcaatttcatacattcatatagtttattcgcatgagggataacctgaccacacacaaggaatttatcgcggcggttcaagaacaactcatgggattcatcaacgaagaaatccttgatcccaagggtgaattctactacgacggaaacacaattcaccggtccttagcttctgagctagcagcgagtactactacgtcgaaatcgtagctagctaggacatataatggattgtaattaatacatgactacatatgtttctatatgcatgtgtacacattttctataatgtaaatatattttgttcatatatatatctatatacatatgcatttgcataacatatatatgtataaatacatatatatatatgtatgcatatatatgtattgaaacatatatatgcatggtttatatatatatatatatatatatatatatatatatatatatatatatatataaaccatgcagcaacaggggcatgcaaaaaaaaaaggtcagctctatctttagtcccggttggtgttaccaactgggactaaagatagatctttactcccggttatttcacccgggactagagatagcgatctttagtcccggattggtactcccggtttggaaaccgggactaaaggggggttacgaactgggactgcaaagggtttctccaccagtgacacatgattggaatccaggacatgcctcaactaactcaaaaatgaccatcacatggaaccaaattagaaagtgtgatcagcacttttcaaatatatgcattgtatatttttgtcatacacactctctccaagcagtttcaatatttagatactttcaattgctagcaaggcttgttttctttagtttgagagaaacatctgccatcatatttttcattattattttttatatttttggtaatacgtgatgagcagagcatcctaatatacataataaaagatgtttttagttttaaagcgcgcgcatagagtgagtgtgcatctaaatatacactatcaaaacctgatgattttgaagtgtaggcagatagcgagtatttatatgtttatgtgcaactaaatatacacgtcaaaaaatgaccgcacagaccatgcaagaaatggttggcgctaatccaaatatttactaaaaatatatatctagacttgttttttcaaagttatcattctggatcactgattaaaatataggtgttcaattcatgatcatgagcacgtgttgtttgaactaaaggcaaacaaatttgcccttatcatgacaacgaaatggataatgatgacctaaggaaaaaagaagggagtatctgatgagcaatttaggcattttaaggtttgctgccggagaagctgctggccgtcatgattccaagcatgcctctttgcccggtcaaaagacggcaccggtcttcaggtaaaaaaccaagaagggcaagcataatcaacaaatggatagaataaaccatccaagtaccatcatttggttggccatttggcatgctaatcactgcctgacattctggagatgctgaaaggaaatgttcctgacattctacaacgaatcagccgctacaaaacttaaaattttaaaattaattttagagctcattttaagttgtttttaatgaagttttttttcagcattgcttttaagtcactaagaacgtgtataagttttatgccgttacagcttaatgtaacttataatcagtgttacaagaaagataggatgtacagatcagatcatttctaccgtcagcagagattatcatgcatggtaaaatcatacaaggaaaaataatttactgaccacataaatcacaaaaagaaaaggttcatcagtttggcaaaaaagatggccaacctgcccctacttgaatagttccattatcttataacattccagttcataccatgttttgtgttacatttcaagtgcaactgctacagtgcttacctaaaccaaaccccaagtgcttcccagcaacactagtacagcacagttcacatagcattagcatgtcctctcatctcacactgcatcatccattgtggtttcagattttcagtgacctgtcttgcagttgcatgcaacaaaatcaggcaggcagggacagtgaaaagagcaaggaaaaaaaacaacaacgcatcaatgtttcccagatttcttgtgttcatgttcagaaatcagaacaagatggagtgctactactgtttccctcatcacattgtactacagtggtcaactgctctgaaaagtgcaggtactactgttttgccaatctttattttttgacaatttttattctgaaataattacttcctccgtctcataatataagggattttgagtttttgcttgcaacgtttgaccactcgtcttattcaattttttttaaaattattatttattttatttgtaactaactttattatctactgtactttaaacataactttagagactttggagggagtaaaagttactaggagtaatattctgcagtgcacagattctttcccagtgatcattgatcacttttaccaactctcctcgtgtcttttgctgaaacattactccaaaaagtttgttcttgcagtgagaggctcccagtgcagctgaagatctgacaacacaagccttgcagcaatccagccccagatacagatacaagcagccttcaccagacaaggctcgaggagtagatggagtaaatactctgaatattttaaacatgcagatttaaagacaaggatttgattctccatttaaatattttaaagcatgcccatgttgctatacatttctcagatgagagcaaataacagttatatgtgagtggtttaaaaacattgcattgcagcacactggatagtattttactcccaggttgtatgataattatgtctaaagaagttactaagcacaagaagcaaacaggataagaaaagaactgtcatgtcagctgttcctgtccacctaattaaaccccaatgggggagcagtaaacattaaacaacaacattattagtaccaggcttgcaaccgcaagtgttttaattactgtttcttgtttcttgcagcattcagattgagccagtttcttaagagagcctcaccaaccagtgtgtgctgccatttatcttcagttattgcaaagctagctaacatgaacaatatagaaaggcaaagctttattgcaaagcagcaagcatggaccaatagaaaggcagcaaagctcaagacagaggattgctactggccatgtctgaaggaaacaggattacaagagtatcttacacaagattcttgttggttcattaatattaatcactgctcttagccattatcttagttcttaaatctaaatctagagatatcctttaggtatttgcaactatatccccatatcattgttcataactacttcctccgtttcataatataagtcattctattcttcgtttcataatataagtcattctagtattacccatattcatataaatgttaatgaatctaaacatatatgtgtgtctagattcgttaacatatatatgaatatagatagtgctagaaagtcttacattatgaaacggagggagtatatcctttaggtatttgcaactttacctttatcagaaatatttatgttggcaattttctccagaccaggaaagtgtactcctttgttcttctgcaattgtcatccagcagtagcatgctgaaactaaagagtagcttctacttgggctaaactgggatgaagtttccccaagtttaataacaaatttgaaccaaataagatagaaaatctagacaaccaaactactttaatccttgcttcccatgaaaagcacaatactttcagttcttggattctttccactataatatttggtagtgtcaccaactcaccaacacaaacagtaatcccaagaacaccaagcagaataaaaaaaacaataataataaaccatttctttggcattcaacacttgcatcaccataaattactacaaaagagagatcaaacagcccattaatccccttttttctatacaaaaacgaaagtcaaacattttatcattccatgccttcttggcttcttgcaactaccatacatacttactacttctaattactcattactaataaacacttaaataagccaaagccatgaacagtagaattccaagaaacagcagcaagagcaagaaatccatggcggtggcagcggcggcggtcagggcgtcatgacctggacttgccggcggcggcggcggcggcggcggcggcgccggagaggcgggaggtgaggccgaggcagccgaagagaagcccctgctggtacggcaggaacgtgcgccgccgcatctcctccacctcggctcgcctcgccgcgtacatccgctcgtgcgccgacctcctcctgccgcccctcgccgcggcgggcgccggcgaccgcggcggcgcgatgggcggaggcggccgctggtccttgcccccgtccgagccgctccggtggaggagatccttcaagaatctccatctgcgggagcttctcgacgaggaggaggaggaggaggaggcggagg

SEQ ID NO: 22624 - DNA, 9391 bp, Oryza sativa
gtcggcggaggacatcgccgcgggagcaggagacgggaaccttgacgagaaatcgaactcgaactcatactcctccccgtcgccgccgccctcgccgccgtggtggtggtggtggtgggcggggctcgccggcgcgctgaagaagccgccggggaagggggcgtcgcgggcggcggggctggacggcgcgctgacgaacggggtggagcacgcgctgtcgcccccggtggcgaggtggtggtcgtcgcggagacggtgtccgccgccgcggccgacattgcggcggcgagtgggggggagtgatggggttggggaggtaaaaaggaagcagcttttaaagcgcttgtccgacgcggtcggttactggttgttttgcggtttagtccctgcagaaactggaaatttgtaaacattcataataatggtgtttttctaaggagctactacctgttttttattttattttgttattttttttgcggggttattttattatttttagaaacatagtacaaaagcagacgcttataatgtatgcatactcatccctataaatatacacatgcacacactatctctatgagcatctctaaaagactaggccggtgtatcttggaacgtgaatatctttgtttagattcgtaagatcatgatacattatatttaataataggttgcttttattttatggcgagggaagtattcttcatccaacatagtaaaaatatattttctgattacatggaagataacgaatgaaacatataagtggtggagccgtggcggagaaaaacagagtcaatcataggctacaaagaatgtttttactaaatatcaataattattattttcctgtgttgccctaagaaaagatgataggaatattatcgacagagcttcgaccagcttgaaagttggttccaccaccgaagcatatggacgtactccatccgtctcataaaaaattaatctagaattgaatcaatctagaattgaatataattgaatgagacattatatagtttgtccagatttattatactatatgatttcttatccaatcttatattaacttttttggaacggaaggagtacatagtcacccttacaaatcatgtattaattttttccatttttcttctttatggatagagggaaggataagtgggatgttaccggggtttataaaaccgccggtaaccacacgattaccgtggttattgggcttaccgcggggtacggtaaaaggaaaaccacggtaacctccttaaattcaaataaatttagaactttttgaaattttgataaattttacacgatttcatacggtttgccacggttaccgcggttgctgcgtggtaactgtgtttaccgccggagcacggtaaccccgaccccagtggtttgggaaaccctggatgttactcatgaatggtgcgttctctatatgatccttaatttcatgcttgtcatgaaatggaacaatactcgtttgcaaatattaagaaagtatacttgtgacttcttcatagattttcttgtcatactgtaatttcaaaaagaacaacaactattatatggatttggtagataatttcatgaatggaaattcaaggagatgagcaaagagtctcgaaagattaggcatgtcgacgccgtatgtatgtacgtatgcaagaattttgtcaagctagctagtacgtacagctacatgatatttctgccaagtttttcccatatgtatatatatttatatatatatatatatatatatatatatatatatatatatatatattgaggaagtggccccatgtttcgcttattcaagggcatatttgcaaacgaaaaataatttatgaataaaacttttatatacaggttattagcgatccaaaagtaaaagctgaaaaataaacttcgatgaaaaaaacccctgaaaaataaactttgataaaagaacctcaaaatcaaaagtaaaagttgaaaattcaaaatttggctgataagcataagagcgaatactatagtaggctacaagtcgattgtaaaaaaaaaagatagaaggatagcgggctatacatttgtagccaactgcgttgtgtgtgtatgagaggtggcaccatatattaatggtttattgataactatcgtatgaatgagctattaaatcggctatagataatttaaagctagtagttagatatactattaaacatgctctaagaccattcccaacccaataattaggatggtgtccatagtattaaataagctgctatctaaaataaaaaatgatatggcaagtgaataaatgaggaaagagaaggaaaccatgtcttgcatgagatatggtttctacacaacatccaagacatcatgtgatataagtaccattaaattttaatatgaaatagtagaggctgtttggatgctatactaagtttgccaccattcactatactttttatgccacacttgtctaagttgtggcttaaaaaaaaatgagccacaccttaactagcaaaattggattgtgctacactttagtgagttgatgacatgtggggccctaatagatgacaaggaatcttgccataagtgtggctatgaaccaaacaatatgctaacttagtcaaacttgcctaacatgaggtgtggcaacctttggcaaacattgggagcaaaccaaacaatcccgtagtgtttgcattggaagagtagtgtatagtaccagttttttttgatgacgtgaaatttatggaaactatgtcaatgttttgagttaggaatgacataagcataagtggaaagatgaggccgcgtatgtgagcactcagctcgatggggaagcgtgtgcattcatcgatctataactccatgaaaaagatcagcttttaattttctccgtgcagcacgggcgtttttcttgtatcactggcttttattaagcttgctgtttgactggctgataagtatattgtatatataccacatatcactagaattacttaattacgtactctcccggcttaattccatatcatagttttccgtatcagtatttattaacgagtactcatattctttccttcataattaactgaggtcatgtccttcactaaaacacttatactagtattttgataaatctcaagaaagctaaaacaaatctcaagtgtgttattttttttacaaacctcaaaagagagcatggagaattcgctttatattaaaaagaaaagagttgaccctttagagaaaaaacagatccaaaaacttcacaactccattgttagtttagagaaaccgaaaaaaatccatatggagaggcaagacaaaaaaacttgcaatagcacaactgctgcgatccaatacaagtcatttttcccgggcttatcacaagacaagcagctccgatatgctattgcgattgacggactcaaccactactcaactccgaagcaagaccttcgaagtgaagccttcaagaaaaaaataacatcaaagacgctgacaacgcctgtttacaacattcgactaggtttttacccaaaggaaaagaaaataaaccatcagcacaacgccaccaagaaggaaaacggctcctacatacgtcaacatcactatcaccagtcaaagaccgggcagggcttacgccataggctcctttaagtgttgatcacaatcgcctctataattacccagctcgctacacctagcgcggcagcttcgactccattgcaagacaaaccgctggtgcaagcagaggctagcacaccaaaccttcccctcgcggaacgatcataagcttgtgtgttatcgttgtccagctcgtcactcccagcgcagcagcttcaactccggcataacaaacgcagctgcatcgcaaggctaccaatcgcacgttcaacttttcttagctgtcacaagatcttctagcgtcgtgccaaaaaagttataactttttcgcgagataactttttcagctacttttagcaatcacaaaaaagttatccggaaaacgaaagtgaaaataaattgttgaaagtattttgtaatcaaactaaacacaaaatcaccttcgaatgctaatcctgatcgagcaaagtattattagttttccactagtcgcgcatgagcaaacagttaagctctagcgtgatgatcaatagaaaactaactcttcctcttcttcctattatctccatcgcaaaatataacaaattattggacacggttattaaaaaaataggtagaattaaatagaatgaggtttttttattgagaaataaaaatgggtgagaaaagtaaatagtgaagggttataattagttagaagaaaatgttgcttaagaagttgttataatgtgggataataacttctattaagttttaaaagttgttacattttaggacaaggaaatatatcttttcttctttggaagaattacaaatataccactactttcaccctctaattcaaaatagccattataaaaccatcaattacaaatttgccattaaaatcggtgcatgtacacggcgtatgccattgccgtttagtttggtgcaattaagagggaaaaaattataaaattaaagtaaaaaaaaggcaacacgataagactattttgtccttcccagattcaatcccctatctgctctctctctctctctagaagccagaaaggatcccctctccctcgatgaaccctagaacccaaatcccttcatcccttctaaatcaagagctgatcaatcgaaaatcagttgcaatgaagtaagagatggcaatggaaaaactcatgaagaagggcgtcggcgacggcatgcggcgtcgtcgggtgttgtggcagcaggcgacggcggcaaaagcaggcagcaacagcgaccgtagcagcaccagacggcgtcggcggcggcagcaacagctgcaccaggcaatggcggcagcagcaccaccacgacagcggcagcaccaccaccaccattatcgagagccgacgccggcaacaccatcggcagcatgcggcggcggtagtatgtagcagcaacactacatcaacagcagcagcaacaaacatcaaggaagactatggaactaagagattgtattttacaaccctcatgtcaagatgatgccagtaagttcgactattttcttgctgccttaggtgctctaatgtctatgccaaaatgatgtaaattttgcaattttgtggcacgggcatccttgtcctaatttttagaaaaaccaaccttctaacaccgttagtttaaactgtcagtccaatggcaagtatattgggctcaaggtggcaaatttgtaaatacagtttttttaatgacaaattcacaataccggttcaatccagtagcaaatatacaattgaccctttctcttttcagatagcagatggagtaaaccactgttaccgaaaagtccttggagtacttcgagttaacatccagctctatcggtaatcagcagtgccgtatggctcaccgacagtcgtccgtgcgagatcgtacggctgatcttatcttacacacgctcacagctcagcacagcgcgggcccatctgtcagacttttgagaaggaaaacaactggcaagtccgttgtctccattaaaaacaatgaaaattttgatattgtcctggaaattttggtttctggcactcctttgtttcttcttgggattagttggtggcagtatgtatctggcgcgttggcatgattattattttgcccatcaattaagatgggaaattaaatagagtaggagagttccatgggaggaatccgatccaaactagctgacatgctgaagccgaaattcaaattgtgaagcctaattttaaagttgattttggtgtctttttattaaagtttattcttcgacatttgcttctaatatcctaaggctttgttcggtagatgaaaaactctccattccgcattccgcatgtacgctttctaaattacttaacggtgtattttttttgaaagaaatttatacgatagttgtttaaaaaattatattaatctatttttaaaattaaaaataaataataaccaattaattatgtgctaatggcttacctcattttacatattttctcaatcttatatttttccctcctctcaaacacacgtaagattagaaatataagttttaactaaagttattttctgttatttgtctatttccctaaggcttaccaccattactcaaacgaccaaaggctcaaaagttccacacaacacaagcgtaatagcttactttttgcaaaccaaaactggcccattaaacaaggagcccaaatgcataatcctttctttgcacataattggtatccactactgttataaaattatcttttttaactcattatgtcatcaacattatattagtcattcgatcaatatgcacaccattagatctttatttataaaaagaagacccaaattgatggacaggcccagctagacacatcttcactcccgcacatctctccaattgacgcacgccacacaaggattaccaaattaccacggtgatctccatctcaatgcatgtattttgtatctacccaacaaaagatgagttgcattattctttcttagtcctctcacaccggtcatacatagggcctgtttgggagatgtttgggagagtttctacttgttgcagcttctcccagaatcagaagctcccctaaacaatccagtttttgatttagattcttagaaactgtagttgtagaagtcaggaaataaactagaagctaaaaactggaaaacccagcttttccagatttttaaaaactggctaccaattagctgcttctcaaaatcttaatcccacaaacatgcccaaagtctttggccactactctctccgtcccataatataaggttcatccctctaaaatccattatattatgggacagagggagtacctagaagtacatttgcagaaagaatatatctctctttacttctgatccaactggttaatttagttaaaagaaatatttgatagaaaattacttttgagataaaattgtatttttgcatttctggttaaccaccttatttccattggaagtaattcagttatatctcaaggatatttatatctcttcgaatgtcttgctctgatgccccaaaaatgtctttcggcttgaagcgaatttcctacatatttcggcttcatacatatttttccaaccatttccttgatgtttgaagtaccatggaaaggaaatgacaagctgaatggaacactgcaatttgcactatgtacgaagcctaaatcaataaaactctacataccacagcacagtaccacacaacataatcaatttaatattttaaaattagattcgatgtggatctaaaataaaatttcatcgaaaaaaagacgagagaaaaaaaatctgaccacaacaatagaagattctctcttttttctccttgcctatctctaaaataaatcttcatcaaaaattcaggtagttagaaagtttgttactaaggccccgtttggcacaactttagctcccaactccaacttacctggagcgggagctgtgccaaacgattcagattcacctttttttggagtggagttggcagagctactcctagaaaatgaactacgggggtggagctgggtttttgctgctccacagctccactccaccccaaaagacccactaccctctaatattttagtgtatttacacgaaaatgccactcaactaccctttcaccccttctttcctcccgttctctctcctcccccaatcttcctcccaatcccgagctagtgcggcggcatcggcgggctgcggcagcgttgacggcgacgggcagcgacagcggcgggcggcggcggctgcgggatgacgacgggcggcacgcacgcgcggccggaggctggcggcggggggctgcggcagcggcggggagcggctgttgggggacgaggacgggcggcgcggcggcgaggccagcaggtggcggcggcccatcttcttccccatcctccgacgacggccacaaccggttgtggcggcgtctgcgttggcagcatacgggggcagcaggctgcggcgcatcggcggcggcaggcggtggcggcggctgcgggcggtgttgcggtggccgcgacaggcggtggcggcggctgcgggcggtgttgcggtggccgcgacgggcggcacgcggcggcggcgtcggcaggcgactcgcgtgcgggggcgtcggcaggaggcagcctgggcgacggcggcggcctgtgcggcggcgcttgcgcagcggcttgggaggcggcggagatgcgtgggcttctcggcggcggtggctcgtgggctgactggctacggcggcaacgtcaaggcgacgcctagaaggtgttcgatgaaatggcgacaaaggatgtagaaatatggagctgagtaatctagccaaacacttttttacctacctcagctcctagaggagctagctctcactggagttggagtttggagttgggagttggagtcaggagctctaccaaacggggcctaatattttgagattcgcaaaaagataaagaagaaaaaaacctttatatatactgcctcctgtatctctcgcgagtacaaaaatactgtagcttcggaagaagaagaagaagaaaggggtttcccttccgtacaccagcagcagcatcagcagctgctcctccccgcccaaaaaaatccaatctttccccatggcggagcccggggaggatgcggcagcggcagcggcggcggcgtcgaccaagtacgtgctcatcaccggcggcgtcgtcagcgggctcgggaagggggtcacggccagcagcgtcggcgtcgtcctcaaggcctgcggcctccgcgtcacctgcatcaagatcggtccgtgtgtttcttcccccattctttcaactctttgctcatctgaatgcgatggctaaaaccctaggaaatcgagtgtggtttgggggagtgcggagatggcgattgtatgtgattgctggttgaattcgaatttatggcatttgttgtgcttattcttgatgaaggggtaaaatattgccgccttgtgatgaatttggtaggggttagggcttttttcatatctttcttgatttgggggtgtgtcaaaagcgtcggcttgttggtttatgtttggagggaggtgaaaggtggccgctttcttgtttatggtaatggagtattgaaaaggttgcctattattgattcagccttcatggggggccatgattgtgggtgcattcttgtcttggttatgttttggtggtgaaaatgctatcatttttctgtagaaaaataatctatcaatgaa

SEQ ID NO: 22625 - DNA, 3166 bp, Oryza sativa
agagtttaacttgcttggaggtttctcagtttattgatgtatcattagtcttacactcttactattgtccatcacctggtgttgcagatccatatttaaacacagatgctggtacaatgtctccttttgagcatggtgaggtctttgtgcttgacgatggtggagaggtatggcttctttgatgcttccatgtgatgttactctttatgacctgtgcacatgagcttgtaatgtttgaaatttgtaggttgacttggatttagggaattatgagcgtttcttggatgttactctgacaagggataacaacattacaactggaaagatatatcaggtgatcatcccttcctagaaaatgcttgctggttgtcacatgagtttgtaatcaatggcttttgttgttttcagtctgtcattgagaaggagaggaagggtgactatcttggaaagacggtccaggtaattcccttgtggcatttttttttggcaatggtcacatgcttatggaatacccatatgacaaactaaaatcttatggctgtaacatgttcaggttgttcctcatgtaactgatgaaattaaacagtggatacagtcagtatcttctgttcctgtggatgggcagactcgtccagctgatgtttgtgtcattgaattgggaggcactgtaggtagggtttcgaggcatcttatggtatagttattactattataatggatgaactaaattttttcttgtttcaggtgatattgaatcaatgccattcattgaagctctgcgccagttgtcattttctcttggtacagttggattttcttcttgtgatttcaaatttaataggtcatggttgctgagaaatatgttgagttcaatgggctacgctgactctctatcatttcacaccatttttctctgtttatttctttggaaatgattgggctgtagattaggtatccactttattcggtccgcaccgccttcctcttttgtgctaaagtggcaagctgatagtcacatgctattgttgatatgttgagaagacatgcagcgttgttttaaaaacaattctgatttgttagtgctcattgttggatattgtacccatcattcttatatattttgcaggtaaggacaatttctgcctcatacatgtgagccttgttccggtattgggtgtagttggtgagcaggtaaataattctcttcaatcatgatttctgctgatgacatcttgacctctgacatgagacaaaattgcattgcaatattcaagtcttatgtcaggacatataattgctaagattgaaccctgaatctgtcatttccatttttgtagaaaactaagccaacacaacacagtgtacgagaactaagggccttgggtctgactcctgatcttctagcatgccgatccgcacaggtaatgcaaacaacatagaataacagaacactcttaagatatgatatctccattgattctagcatttgatgttgatgttccctattttattatcatatggaatacttctctggcagtcactctaatatgtcttttcctgtcttactctggacatgactgtccatatctttttggtgcttagtctatattttttcttgtctgtaatggattgacataattttttgcgatctgaacattcagccactaataggatctgtcaaggagaaactttcacaattttgtcatgtaccggtatgtttttgcttctaagtttgaaaagagccattttattctcatgttttcctacttacattctatcttatctcttacaggttgagaatatacttaacatccatgatgttccaaacttgtggcatgttccacttattcttagagtgagttatctttggctcaaagcttaagtgttgactctgtagagaaagataatgagtatgatttatataatcattgcactaatactttattttgacatgtgttattttccagaaccaaaaggttcacgaggctataatcaaacaacttaaccttggaaggtgagccagacaattactgaatatcagtttcttgtcaatgtttggaaataatgtgcccaagtgtgtgcctataggaagttttatatttgggatttactacctttgaaaatcatgaatagttcattattatgttacacttgctatttctggtctatatttgaccccttttcagttaacgtgaatggacttgcttgatcgttgtgagatttatgagttcgggcagtaataacaaatctgttgtactttcctggcattacttattttatataaggtgttttggttagtatgttgaatcaattccataccttattctgtaggtctgctggaccccctgagttacgagattggacacagatggctgagtcatatgatgacctcaaaaactctgttagtattgttaagttgctctaatatcttgactttgcattgattattttcaagtgcataattaattttgatggacttcaatgccatgcaggttaaaatcgctttggttgggaaatatactaatctgaccgattcctacttatcagtggtgaaggtgagttaaatcaactttttaatatagaattgttatttattcaattatgcatccaattggtgaaaatgggtcctttttatttatgttttgcctgttgtgccattatttccctccattagtgcctactgcaaatgcaatcaattcctaagagttgtgtttatgcaaggagatttttgaactacccactactcttgcagtgctactgatttaattcttattgaaatattatagtattatacatgcaaatgttgtttcaaattcatgtgtatacaaatatgtttcaggctcttctacatgcgagtgttgcatgttcattgaaaccttctatccagtggattgcagcttcagatcttgaagatgcaactgcaacaagtgtaagcccgaaactctttgttcataatatgatagggagtagttctactggattacgctacatctcttaacacagttgtaatgtttaaaccaatgctctgttttatgtttgttgccaataattatctcagggctaaagatcatttttattcatactagtctactaacttaatatattctctattgaaagcaatgtaacactcctattatagttgtccttcctgctttgtgttatctta

SEQ ID NO: 22626 - DNA, 27895 bp, Oryza sativa
tcttgtttgggcgactggatttatgttcttaatttcctggcgtggatattggcaggaattaattgagactttaggtcttgtatttatacccataggtgtccccttgtccgagtagaactagggagaccaatatggatacaatccgagtagtactggttgtttccatttagaactctggttgtctttccttatccggaactcctcctatatccgcaggttgtttccgtataggacatggtatgtggtgggtcctgccgagatgtagtcgactactattaggtatgtggtatccataaccctgacagtagcccccgacttcaatgcaaatgaacgaattcatattctcaactgcgtgcagacattggagtaactgttatcgagctgatgtgaccgttctcggtgagtttagagataacgttagacttcctttatcagactcgtgcgggcaccgaaagggtttgtctaagtcaatctctgatgtcaaccaaggaagtacagagcagacgactaagtctcccgtcttgctgtaatcgagaatttggattgaagtcaagaaattttatctcggcgggtacaccatttcttcattctgtattccttgtcgagatccagcaatcgttctcgagcgatcgagaaggcgtagagtctgcgacgaagccttgtcaacattggtcgtactcgccttagtcgatcttggtgtagaaccatagagacatggagtcttccataatgtcgaatagaattttcctgaaatcaatactcagaaaagaatatcaaatagaaatagcccccgagcgaacgctcaaagggtgacatgttataatatgtatggaaaactaaaaatgaattaactttaccgaccaatgttttgtgtatgagcgtcttctctcttaccgacttcgatcagtcagtttgtagagtcatacactctccctagtccccagccttgtcgtcggagaatcgttctcagaggataaggctcttggacccttgacctgccttagttgaacaagcactgatcctagcccccagccgtgaagttggaaaactcaatttccgatcacacggcttggttaatacgcacgacgagaactcttacacgaccaggtcttacatggtcttttgtctctacaggatccgacaaggccttatcggctctgggcatccccagccaaagttcccttaggttcctcggaggccttgtcaagatgacgtaaagggacagtaggataggtttcaacgctaggtgtcgtcgtggtaagggatctctgggtaaaacacttggcgatattgtatacctgctatcaactttgttgaagtagaggtagtaggagaaatcgctacaccgctggtcgaggaccaggtagtagtcgtaactcgaccacttgaagtggaaatagtgggagaatcgctacaccgctggtcgaggaccagggagtagtcgtaactcgaccacttgaagtggaagtagtgggagagacgctacatcgctggtcgaggaccaggcagtagtcgtaactcgaccacttgaagtggaaatagtgggagagacgctacatcgctggtcgaggaccaggcagtagtcgtaactcgaccacttaaagtggaagtagtgggagagacgctacatcgctagtcgagaaccaggcagtagtcgtaactcgaccacttaaaattaggcgagagagatcactacgctttactggttcgagaactaggagtaggagtctcttaatcacctataggggcgctaaagttggtttattacatgtgcatatcatgtggccagcatgactcacatacccaacttatagcatatccggatgtctgctcgcaatcatgttgggtgatcaagccaacggcgtttgcgaggaattatccgttgacaaccttttctcgagtagtccagccatggccggtgctatgagataggtcgtcggtcttcgttggtaagttgggtgcgataactccgcatttgtcgagaatgttctcgataatggagtgtactcgaccataacctactcgagtgctcaattgttcctgaaaaatattttctagaaggcaagatatatagcagataatatcgagtatgtactcaaaaaactgcatggatcttctagtattatcaggatataacgagcagatgtaattatcaggcattatgtaaaccgtaaacaagcatgatttatacagaagaaaacagagcgagcccccagcgttagaccgtagttggcctaacatcggaagtactcgcgcaatatatattgtataaaaaacatgctctaagtaaacgtaataaattatagatctgacaatactgtatgatctgaataggtacgataaattgtagataaaatattgcgtatctttgtagatacatgccggatgtatctacgaaattagtagattaattttaaaaaaataatcttactaattaccttaattagccttagtagccaacctaaattgttctctggtcacacagtgactagcacacgtatgggtggctcgtatgggctccacaatgtgcatgctaatacacgtgtgcatgacaatgcaatcggtcggcttctcgtccgctcggttgtcctgctgctgcacgtgaaatctcaaccaatcgggttctgattccagattgtattgattaagcttgaataatggatgttgatcctgattaagcttgggtcttgggaaccgcgcgctgcatgcaaccgtgcgtagtagatgccgatcccgatttgatctgtcagaattccggcgatgtcgatttggagatggtcggtcggggacgaaacctcctgatcgataaaattaaatcgatgtcttccgcggtggcgaaaatcttgaagccgatctcgccggatcgaatagttaatgacgatgattccaatctcgtcgggagacgtactccgatcagattagatcttttcatggtcaaagttgtcgagtagcttgttgacagaggatccatctcttaaacccatctcgtcgaaatcctaaagcaccaaaatccccctacctggcgcgccactgtcgacgtttgatatcgcggttctagtatttggacagtatggggatcgttggtactaggatatacgcgagactgaggtaaaagagatggagacagggatttttatacaggtttgggcccctgagttgtcaggtaataaccctacatcctgttggccgaagccggagttgctttttattcaccataatcacaccagtacaatatgtggggtagcttatctaactgttgtcgacatggcggtctgaaaggctgactcgtagtcgacaacagggtagccttcctcctcgaatccatgtccggcgagatcagagatagcgctttcgtctctcctgacggtatccgaagacaccgtaggggaatagccatgcctatccctgaagtcgatatctggcgtcttgtcttggcgtatgtaggcttgtattggcttctgttgttccgtatattgtggtggttgttgattgtagtgggtctcgatcgtggtgaccatgttgatcgtgtcccctctcctcgtagggggtcttgtatttatacccataggtatccccttgtccgagtagaactagggagaccaatatggatacaatccgagtagttctggttgttttcatgtagaactctggttgtctttccttatccggaactctcctatataggacatggtatgtggtgggtcctgccaagatgtagtcgtcgactactattaggtatgtggtatccataaccctgacacatatcctttttaatttcattatttgtgtgaattgggaaagacaatgatttcatatgtgcgtcaggcttcgatatccagaggactttgttcttaaggtgccttcaatagttcttgatcccaatgttgcttcttccaggaagatattaagctgtaacagtccatctgcagtaaaaagaatcatccagtaaaaaaaaaagatatgaagtacgctatttttttataactagttttgcagccttgctctatgtttttttaaccaaggatatgtcgtcatatcatgttagattcaagcccactagttgccactttatgaagttattgataacacaaagacaaagtaagatagaaggagttgcatggttgttaatgttaaacacacaaccaaacggatataacaactaatgcacaacacactttatagttaagttagcccaaagaaaataatggttaacgtcatatgaaaaacatttttttcttggataaaatcaaatgaacaataccaaataaacaaaaagcattagtataatggttcttgcacaaaatgtgatccagccaataacactagttttaaggagcatgattggcatttattttttccttgaaagaattgtcgtatgctttacttatttagatggttcatccataataatagttcatgccaaacatgcttttttttctttgcaaaccagaagatgtttacaacaacatttagcctgagtttttgttttgagctttaccaactcaacttcctcgttgttcgcacacatgcttcccaaactggtaaatggtgcgtgttttgccaaaaaaaaagaattatacaaaagtttctttaaaatatcacattaatcaatttttcaaaaaaaaaccctaatacctaattaatacacacgctaatggactgttccgttttgcatgtttgaagggagagttcccaactccaactaaaacccatccttaagtcttgtgcttttcttccttttcaactaaatttgtttgtcagttatgcaatacgacacattcaagaaaagaagttatgaaatatgacaaaaataccattctttacataacaatgcactgccttacaaaaaacagacaaacaaagagacttgtctatggtgatagttaaagtgtgtgcgcacaacatgaacatctgtacttgtaaagtgatttacctgtttcctaagtgaaatttcctctatcagtcttatcccggtggtagtcattccaccttgagttgtagctcatggcaaaccttagtagcccttccaacacaaacacaaacttaaaaagaacactttgattcaaaagagaaaagataacacaattagatgaatcaacagggcaaatgttacctgcttgttcagggagagatgcccatttccaggttccttcttcattctcctggatgaagcatgtgaacttccctctaaggcccatttcaatgttttaataccactttccatctccttgattttttgtgggaggtcaaactaagtttgtactttgcttaggaaatgtgggttgtgtgtgtgtttgtgtgtttactcacgcatacacacagggacaaattaagagatcgagagaaagatagagtcagagtcagagtcagagagagagagatatgttttcctcccatatatcttcattcatgtctagatttaaggtttgtgttattagaatatcatcaacaataggtatggaatgttaagagagtcttgcatttgaggtaaaagggacgaatatcgaccttctccatatatatcgacctttcatccagactaatgcatggctccttaaatcattagggaaacattctggtagtagccaagttttgcaagcataactaatttatgcatgtggtgtctgcatatcaatgctttgcacaataaaatttaagaaagaaaatccaataagcttaggacaacctctaaatggaccatgattctacacagccaggtgagtacactacttcaggcttttagtaacatgtcattctgtcaattagctgaaaacaaatgtgttattgagttcttggaaatgctgtagaagtaatgcatgtacaagggaaaggagtaatacatgtaataatgtaaagaatcacaactcatcgacttatgaggtagtgtggatcatttatcatagcacacaagagcatctgttcagtttcctaagacgtcgcttatatttccgaaatcaaatatgcctcataaagttgaacggagggagtatattcaatacttgcttaagagaatgcgtgcgatagagaatgcgtgtgacataaagagtcgagaatttatagtgtgttagtaggatatacattgtcacgtaaccgtagtcgcggagtgtgtgtatattgtcacacaaccagtcgatcatggtggttggtcaaatttataatttgttagtggggtatgttattgtcacatggactttcttctagtttttagaaaagaggaattgtgagaagccgactatcctttagtactaattttgagatttgaacccaggtgagttgggcgaacaccctcacaccacaccaactgagctatgctcagttctcctttttcatagtttctaccagttaatagaacataaaaaaaacatgtcaccagtattaatccttacaaacaagaatgcacaatcttatataaaataaaacaaacaagcatgttcatctatagcgataagattcttgtattgcataaagaatactaccgaacaatgtacctgtttgaaaacctccttggtgaagtttcatctcttaatgccatccctcggttagtcattctacatagaattgcagctctttgcaaacctcaatatcccctgcattccgaattaacacagaacaaggaatggagaatagaataagcgaaattcacaagcaaaaaagaattccaaatgaaccaacaattcccctatccttcttttctatatagttggtacccacttagagttatttactgctataaagctgagatttggtgaagccacgtcatcctatgaaatagacggtcggattgattcaggccagcctttgtgtcaccgttcgattcctctccggtagtgaaactgtcgcaataaaatggcaaccgatggccgtgtttaatgcattttaattccttcacctaacgcatgtttttattcatcaatcccggtatatcttcatcgttgataatgacgcactcaccatgggtcaccagttcagtgcgacctgtgcggctgccccaacgcccaagaacaggtacttgcccttctgatactcatgtctcatgtagctgatcatctttgctgctactttgtttcaggctacttatgagattcgttttttttttgttgtataattaatcctttcgtacaacctgctcacatatattactgtcctatctgattgattaaataagatgcagtgtttgggcaccaagaaatatttgttccatgctttacaaagtgatttttacatttttgcgatgtttttaccgttgattatctcctacattgccctaccacagctcacttatgaagtgcacttccagtagttgcagtggtaattaagcagcgatcgattccgctcatgaaaatggttgcttgcataagccatggtgagtttccttgacgatccatgtttcctacagtttacacgttaattgatccctaccctaaaaccttgactcttttgcaacctttagtctattattctgtactctgtacatgcatcattaatttactttagagttcagccaagtttttcaggtgaaggatatctatggatccaaaatatatgtgttccttggccaagttttagttaggtggctatgtttctctccgacatttatgctctctgaaaaaaaacacactccatatttaattagcaattctatttgagaacttttattaacctccatgaaacttgaaacttggtagtttcttctgcaatgaaattatgtgatgagttttcagctatatgatcctgatcattgagattaggtaacttctctgtaggatatgagctgaaaaccttctaaaacagggtactgaaatttgtctaattacatctgtaaagacaaggtccaaacatatttttagttttttactatgatgcttgatccaatttaattataacagcctttgtttcattaaatttggtttgcaatttttacaagtttatgatttttagtaaatgatgcctttattttgttaatatctatgtagaaatttgtttcttttatttgaaacattgacggttttgtccttccaattggaggttttggccatcagctgaatatttcatatatacaatcatatatttttgtgaccataattattttaagatatattctaagcagattataagcaactttaattatattgtttgcacaaatattacgtaccgagaactactcttttatgcccgcaacaatgcgcggggcatcaactagttaaccatgataaaccatgataagaacaattacctgaccatttcaggtaatctttgagggattgatgcattaatgaagcagatcaacttctcatcttcctccactgaccttttcagtcgttctagacatattcttaatttttattagtgaattaagtttaaaccttactttcgggggtgcgtggagtgtgtgccagagtcagatagagccttgtaatgttttagatgaatgaagagacaaagggagcaatggcaagcacttccccacattccttagctttatttatatccaaacttgaaggatactacctccttgaaggattctacctccgtttcaaaaagacttaacttttcaacatgaatatcgatggacaagagatccatgtaaaaagataaagtctttttggatgaggatagtatgttatctgccagtaatgtcacaggaaaaaaatgacaagcatataactcctaaaattaccacgcactactttatgaaaaatacaaacttgtccaaatgtaaggtttatgttatttcgacgagtttcttttgtcatttatagaacatgtcaaatgaaaaggttaacatgtcaagaatcacactcaagcagataaattgcgctgcctctctaatttgtggcattgtgtcagcttcctaaatagcagagatcaaaatttcacataccccttaatccttccttataatctagatattttgttaacctgtcatcagcatctgtatatttgctaaattaataggatataatccacattgtaaatagaaacaggaaagcaagaatatccacacagaaaacaaaatatcaaacagagacaagagaatagggttgaatagttttggttcatgaacttataataaactggcgagaaatgcgtggattctgtacattattttaagtacaactaatctcgagtcgaatcattgtacacgtaaatatatttgcaagctctccaaatgaggctttgccacattaatattgtgatgcaatcagatctgattcaactgaatgttggtcaagggtgtttgttcacttcacatctcaagcttgctagcaaggtaccaggaatgcatggctaggctgccgaatgacatgatgttggccaaagacgagagcccgtggatcatcccaaacttcttgttgattgcggcaagggtagggttgttttttgccacctgaacattcttcgaccacccaacctcctcaccaatgctcaggtccctctcaatcttgtgcctcttcttcatcatctgcgaggatcaaacaaccaaatattatcgtcgcactaggagatgaagagaaaggaaggggatcttctaatttgtttaggcatggttaccataggtcttggttcatacaaaaaggcaaatgattgacatatcatatacaactaaatattctattaaagaaaagcattagtgttgctgcactttataagagaatcataaacatgttttgctagagtatgggtagttaaatatcattgaatataaaacaaataggggatatggcaacgtatcactgtcaactactcaactgcacatcactttacacaaaaaaatgactggatagaggcacttcaaaggattaggagtttcagtacttgaaaggaagcagaaaatagcacaaattatgaactaaattaagaatatcagcagtgagatagcttactagtaatcaaccaaaataaggatgcttgtgaatttaacatatagattataagtacaagtgactatatatagttgcatcaacaagttaatatgcaaagtataatttatgttgcttaggaacaacaaagataacctactactatctgatacaatcttctacatccatgatgaccatcatgtaatcaccaacactatggcatcacatatgtgcttattctgaccaataacctaaagtaacacatgagatctaacagggatgaaggagtctaacgtcgatcaacattcatacatccataacaaagtactaaaattgcacacttcatatgccatttaatgaagaaaaatcttcaagaagatattaaacattttaatggaagagttatgtcatggtaaacaacaccacactgaagcatagttgcctttaaaaacttggcattataggttatagcaatgagcactataatgcagctataggaggtctcaatttggtaaagcaattacataagcaatcaaaataattaaaggtaatgctgatgctgttctctaattagcaacatccctacccacataatcaagagcatccaaaattagattcaagttagagtagcacaaatatcaacctctcaactctggaatccactataggaaaagaagcctgcaacccaaaactatcactatcccgcaactaaaagttactagtattagccaatcaacaatcaagcaatgcaagaaacgcttgttaactaccagtagagttgattatgtattgttgcgtcatgtctcgccattttctaacaaacttccataacaggtgaagtattatttatgctgattaggatgatatatatgaagaataaatcatctactattgctaatttgccatcaccaaccctaaactgacagcttgtagtaatcttgtacaaattaagtaatagctgacctcgatggtcatgggggtgaacacgagcaggttggagaggtcgaagccaagggcggcgaggaggaagccgagctggtagcgctcgacggtggacgccgtcttccacgggtggaggtaggcgaaggcggcgacggagacggcggcgcaggcggagatgagcatgaagtaggccgggaacaacttcccctgcaggttcccgaactggtgcctcggcagattcctttccaacacaaacaaacaaccattcatccaatcgaatccaactctcggatcagatttgaagtaatctcagatttgaagcaatctgggttcttggaattgggggaaaaaaatcaagaactccccaaggtttttgggagtggtgggattacttgaacatgatgatgccgccgatgaaggtggcccagagggcggcgccccatgaggtggcgaagcagaggaggtgggccaccttggcggccgcggcggcgccgccgccggagccggagccggagcgggcgccgaggaggacgtcgggggcgaagacgacgcccgccgcgaagaagcagaccgccgccaggaaccgcgtcgcccaccccatcactctctctctatctcgatctcgacggtctcgaggaggcgccggcggcgagggggaagcggcggccggagacgaggaggaggtgtcgagatggaggagggaaggaggtagttggagagaagggatggaaaaggtgggttttttaggggaaatttggcccttctagaagtaacaagggtatattcgtaaatttaaaccgaatttggaaataaattccaggcaatatactacatgactttgttattgaggccccattcagtttaaaaaaagaaacttgcatcgagtgttatggtacatgtatggagtattaaatgtggaaaaaaaaccaattacatagttttcgtgtaaattgtgagacgaatcttttaagcctaattgcgctatgatttaacaatatggtgctatagtaaatatttgctaatgataaattaatttgtcttaataaattcgtctcgcagttttttggtggaatctataatttgttttgttattatacaatgtttaatactttaaatatatgttcatatatccgatgtggtaacaaaacctaaaaattttccccaactaaagatgaactaaattccaggcaatataccgcatgacttgtttactgagtagagaagtcaaaaaatcgtggtttgatttcttgagactgccaaattagactgttgttggttctttatggcaatatcaaatggttactttccccgtcctcgatgagcatgttttttaaccactaaacgggttattttgtaaaaaacttttttttattaaagtctctttattttttaatttatataataagtaataatcggttaattatacactaatggttttttctcgtttcgtttgctccaaaaatttcagtccaaacacaattccgaacgaggccttattcctactcttcaaatcgctgtgaatgtgaaactacagaggctaattgatggacgtgcctggtttaggtgggaaaaatttttaggtttgattgtcgtattggatatacggacacacatttgaaacatttaaagtttaataacaaaataaattacagattccaccagaaaactgcgagacgaatttattaagcctaattaatccgtcattagcaaatgtttacttagcaccacattatcaaatcatgacgcaattaagcttaaaagatttgtttcgcaatttacacacaaactgtataattggtttttttccacatttaatagtacatgcatgtgttcaaacattcgatgtgatggatgaatagtttttattttgggcactaaacataaacaaggcctgcgaaagggcctgtagcctagtggttacaagagcatcagtagcacatgaggtcctgggttcgactcctcataggagtgaatttttcaggatttaacggcgttgtgcttttagttgtaggcaacgtacccgtcgacagcgatgcacttgtagcttcgtcaatctctccagaatttgccggcccagtcttcctgtagtgacttcgtcaatctctccaggatttgccggcgttgtgcttttaattgtaggcgacgtacccgttgacagcgatgcacctgtagctttgtcaatctctccaggagtagtgacttcgtcaatctctccaggatttgccggcgttgtgcttttagttgtaggcgacgtacccgtcgacagcgatgcacctgtagcttcgtcaatctctccaggatttgccggcccagtcttcctgtagtgacttcgtcaatctctccataatttgtcggcccagtcttcaaagatgctcataggggtgagtgtgcgtgagttgcgtcaatctctccaggatttaccggcccagtctttaaagatgttcataggggtgagtgcgcgtgagttgtgagtgtctgcagtacgtagcgtttagtttatatcaggacaaattcttttttttttcttatgccggagcggttggccgtttggaaaaacgatatttgaccgttggaaaaccgttttttcagtagtacgttagacgtataacttagtggattatacggaatataagacaattactaatgtttttgatgatgaagatacttatttgagttgtacactaagataaaattaatattagtggtaaatgttgtgttaaaaaaaaaaccatgataccatatgtagatgtccaaaacaacatattttaacaagggaatagattctcaattgtatttgactccgaatcccagaggctatcattgataaaaatacataatatataaaaccctgtttcatggatctttgtcatactcatgtaaaagttgaatcatcaatgtatacttgcaacagttctagagaattttcactttgttgcgggtggatagaacctctatctaaaattctgagctcccttatcacatataaatagttgatgtttagttatgacaagatttggtcaaacttttaaatatttcacaatcaatagcctttcaaatgactagttttttaaaaatgatatgcgcaatttttcctttaaaagtactacaattattgaaaaattactttagcatacgaaattgactgaaaattcccttggaccgaatcttgttaaaagtgtcaaatatctttcgactagagagagcaaacttagttaaaaaagtatacatcggtaaatatactggcagttaaaaaacttgcgaatgtaactataatgtaaatataatatactaaataataactacagtataatttagtttataacttttaaatagttaacttatgtactccctccatttcagattataagacgttttgaatttggtcaaagtcaaactactttaagtttgatcaacttcgtagaaaaaagtagtaatattttcaacccaagacaaatttattatgaaaatatattcaattattgatttgatgaaactaatttagtattataaatattactatatttgtctataaacttagtcaaacttaaaacaatttgactttgaccaaagtcaaaacgtcttataaccaacctgaaacagaggagcatgaaattacatatttctttatacaaatgcagtttttagaaattcttttttcatatcactatcttcccggagaggtagcagaaatgcgagaagagcccagccgccgagatgacgagggccaccgccgagaagctgtgcgccacccagaacctcgcattctcggcggcgagggtgctgctgctccttgctgcccgagcattctgccgccagccgacgaacgagccgtcgccgccgatgccgaggcttctctccactttgtgcctttcacgcatcgcctgatcatcgaaagatcacatgaacaattatttaatttcgccatgcattttgatatataagtacaagggatttctggttggtgatatattgacgatacagaaatctttatatttgcagaaggaattaattgatactgtatttgtggatggaggaattaataattactacatggtaaataaatctcccaaacagtttattgactagccattaatttgtacacctccattgtttgctcgttggtttatatatatcaactgtaatcaaaatttaaaatttgaaatgtaagagttgattttgaggggattttttatcacttattttttttcagctttagattttaaattttgttataagaaaataaatataaagtttttactcatagaatagttttggttgctatgtcaattttctaaccgcttatcggttgtagagcagggtgtgttcgttggagctggttcccaaccagcacagtacgcacggaaaacggagcgatctattagcgcgtgtattagctaatttttttttaaaaatggaataatatgatttttttaaacaactttcgtatagattttttttttaaaaaaaacgcatcgtttagcagtttgggaagcttgcgtgcggataacgagtcggagggagctgggaaccagccctttcaaatacacctgtgttcagcaggtgaggttgggaactcacctcccgcgcatgcaaaacagagtgacatattttcttatgattaattaagtatttactaattttttttgaaaaatagattaatatgatttttaaagtaacttttgtatagaattttttttttttgcaaaacatacaccgaatatgaatatggaggaagtaataagtactccatccgtcccaaaatataagtattttagcacagtgacaagtcaaatatttttaacttttactattaataaaaaaaataaaaaagatcaataatgtaaattgatgttactagatttgtcattaaacaaactattataatatacaacttttttttattcaaaacattttatttttatagatattgttgatcaaagtagtatctcgaaaaccgtgtcagagcttaaaattgttatattctaggagggagtactaattaaagactgtatgttaaccgtggtgttattgtttaaaactggcatgctgcgtgcgcccttttagctttgcgaaaatgtttctagaacctacaggtctgtaatatttaacgcgtggtcaatgctcactgagtcactgtcgattgattattatttataattcaattataatatttatggccccgttcgaaaccacataggatgtgattaaggttagacatgaaaaaaaattagtgcctgattaatttaattattaaaacttgaaaataattttattaaattttttattttaaaaaatttctatatagaaagttttcgtacgaaacatgctaataaaaacttttgtaaaacttagagtgaagtgcatgagcggtccttaaacttgtacgagtgtgtcatctagatccatagaccctaaaaatacatttgcgtctccaaacttttgttggctgtcatatctaaatgggttccaacccgttccatgcgatgatgtgacatgccatggtgtcgcctacgtgttagtcggaccacatgtgagtcacatagaataaaataaaaacatattttctcttctttatcttagaattattttttaaaattttattttttcctctctttataagaggataaaatatggtttttaattttatttatatatatgagtaatatatgggttcaactaacacttatgcatcaccgtagcttttccacattagcgtatggagcgggttattagaaacccaaagacactaaagacaagtacgaaaacccaaaatattttattatagaagtttataaacctagattatatacccatataaatttaagtaccgcatatcgcatatgtacttggctccaaaatttatgtcttcgatctgaaaagaatgtacctcgagtgtcctaggggtgaagataagcaggttggcgaggtcgtacccagcggcgacgaggaggaccgcgagctgccggcgctcggccggcggccacggcgggcggtggagccacgcgaacgccgccgcggaggccgccgtgcacgccgcgttgagcgcgaagcacgccgggaacaccttcccccgcagcctgcccatcgcgtgcctcggcaagttccttaatcaatcaattaattaatccacgtgagcacaatgattaattaaactaataaagcagggttaatctctcttactgattaattaatcaatccacgtgaaagacgacgattaattaaactaataaagcagcgttaatctcccccctaattagttattctctctgtctcatctctatctctactattataaaaattaaagatgtttttactagtattttggtacgccatctgtgtattagtcggttttaagttcgtttgcttttggaaatccatatccatattgtggtttttaagatcgttcactttttttaagatcgttcacttttgatagtacagaaggaatcatataagaaatctgtttgataaaactcgcatgctaacttaagacgatcggatcctatttgcagctcatgactttctaaaaatatatatatgtaagcgaactcacacagtgaattttcatcttaactaaaccatataacaataataagattaaattaggcttcatccgttgctacgcacgggtattttttatagtaatatataaaattttcgaaggatataatacatttaatactacgaatctggaaattaaacagaatatacaaatctctccaaaataagaaacgcccagcggttttcgccagttccacaagatggttgactaaccggctagtctgagtttgaggtctcaatcctttctatttgatattagttcattctctagtattcgtggtttctatatatctctttaaaaaaatttaaattataagacggaggaaatacattgaagctgcagggagaaaatgtgtagtacaggaacatgatgacgccgccgacgaggatggcccagacggtgacgccccaggaggtggcgaagcagaggaggtgcaccgccttcgccgccgccgccgccgtcatgccgagaccagcgccgccggcgaggaggaagaagacggcgagcagcagcagcagcatttccgaccaccgtactgaatgcacgtaaataataggcaccgagctggttgatcggcttacagataggagaggcaaactcgggaggcttacagatatgtttttataggccccgttctttggttgaatgaagtaaaaattaaaagaccaatttttgcgactatagtgcaaattaatgccattattataaacacaagattatgagttagcacaagattatgagtttttagaagatactccttccgtcctattttttaagtacagccataagttttcgtgtacaattttaacagttcgttttatttaaaaaagttgacaaaaattaaaaacataagtcacacataaagtattattcatgttttattatctaataacaataaaaatactaatcataaaaacatttcaaataagacggacgatcaaagttggatacgaaaaatcatgactacgtttaaaatgagatggagggagaatatgtttttttctagaaaatatgttatacaaatagctacaggcaatcagcaataatagtttttaattacacgcacgtcacgcacacactacagataactaacatcttcagttgagacagcgatgatatgaatgtgactagttggtggtctataactaataggaatggacgaattaaacatacagtaaatagtttttaaaaataaatttaactagctgatcatatatattccccgaggaaaaaaattaagttccaaaaaaaagtgatgtctatcgttccacaaaaattaagttccaaaaattaagtttggagctaagattcgtggagttgtataaatatgttgtataagtgttgtcaaattttttcataatcatttttaagcaaacgagggaacatctcctcaagatcaaaatagtttcccaattccatatactctgtttaacagaccttgagcatagtatgtcaccaacctaattgatcaaaagtaaatataaaattacctagtcataactaacatagtcatttactaggaaaattagagccccatcgtttggcctaaacagccaaagaataagccaaaatttgaatttttgaacttgattttgaagttgattttgagatgcttttaacataatttttgttagtgttggcttttaagtcgctacgaacaaatctataaaagttttacttataaattaatttttattttctaataagccattaggcaaaataggcaaccgatgggagccttactgatgtaatggggctgcacccattgaattggggatttgggtagtagccgtccctgttctagaataaataaaaattctagtcctcctccccatccctagggtgccattttttttctttgttgtcggctccatgcaggtacaagaggcaaaagaaagtctgggaggcacgcaacaagccaacagtagagctaatatggggctaaaaacttttaagtctctatcacatcagatgtttggatactaattataaatattaaaaatagactattaataaaacctatccataatcttggactaattcgcgagacgaatctattgagcctaattaatatatgattagcctatgtgatgctacagtaaacattctctaattatggattaattaggcttaaaaatttatgtcgcgaattagcttttatttatataattagtgtctaaatatagagactaaagttaagtccctatatccaaacaccaccttaagttacgctgtcaccccaagggagcgagtaaggagcaatttgtgattatgcaatcggaggctatagctagttttcggtgtatatatacatatatacagtgcgcctaggaagtagggtttatccggtccaaaacagtttgtctgaatgaaaggtcttacgagggaaccaagccatgagggtcgctatttccggttttttccagtatagttccgagtgttcgttgtatataggcaaaatttgacttcagacactgaaaaattgtgtaattagctgtgagacacccgaaagacgtgaatttacccgagggctctaaaagtgtggtaatttgctgcagaacactggacgcattaaaatataatatccactgaattgataagagataaatcatataaaatgacagttttgccccttctcttcttccctctctattttcttgtcctttttctctcattgacacaccctctctctacttctttctcgcacgaaggcagcacagcagggcgcagcagcgcgtgagatcgaatgctgattggcgcttgcgtgggttcaagtgcttggcgtccttgtcattatcgtcgcccacgccgccgcccatgtcgccgcaagagatgacgtcgaggtcgtcgctcctggaccgacccaccttgttctccacctccgacgcatccctcgccttcgtgcatcctcctccaccgccgctatcccgggctactaccgcgtccgcttgcctccgagcgaggaggacccgccacagccacgccctcctccccaccgctcccgcaccgcgtggcatacggttgatgagcccggcgacagcggcttcgatggcggcaatggtgacggaggtggctgcggccaggcagtggcggcgtcgatgacagtcggcgagcgcggcggcagcggcttcgacggtggcaaatggcgagaggcgctgagggcaattttgtctttttgaaatttctctctcatcttttttatcagaaatgatacaatattatctcaggtgtcttacagcaaattacatgaattttgtggtgtccatcagcaatgacacgattttacggtgtctcacggccaactacacaattttttggtgtcccagggcaaattttgcattgtatatattatgccaaacatgaattttcagcacctctcaaatctacaacgctgtagccccatcatcaattattagaggtccagaaagttgagaacaacacaaacttctgtgttttagtgttttcgttttcaatttgtacagtcatacttcacagctaacacgcaaaacaaaaaatacactcaactttttcttagcttatggcttgtctttgccggtattcacaacatcaaaacagtgacctttttactaagtctgtgattcacgcaaaattaccagaacatgtgaaagtgttcaaaggaatttaccaattgatttgcagaggggaaagctaatccatatcattttgaaattcaatccatgatactgagttttaatatctcgtaggcgtcggcaaggtaaaaatacttcatctggaaacaatattcaacatagagaaacataagcttttgttaccacgattatatgcaactgaaataagaaaaataaattgagaaagtatcaccaaaagtctaaaacgattatgtgcagatactgtgttgatctaatgtaccttaacaaagacgagatctcacgtgaccttcaattggtttggtacccatacatggacggtgcataactaacaggatatggcaaattaaacatacattcaacaagttaaaaaaaaaacattcaacaagctgacgatatgcagctctaattgtcactgttctttcaatctcaattcaaaaaatatatagctggcaaatatttctctctctctctctccagatgtcactttgttcttggcagttggcacaagtaacttttagcatatctcaaatctacaacactgtagccggttagccacatcaccatgatgcgaaataatcactccaccgataatgttgctagatgtttacatataaacagcagcaacaaatgtacgcgcatgtgtggatcagtgttcttcacctccagaacacagaaatctaaaatttataatagagaactcaatatcaggaggaggcagctctttacttcatgtgatcattaacatgaaaggaaattcctttaggtttggactttggaactagtgtgaagggattagagcactgataatctctaacttgacagtgagctttgaaacagccaagaaccactggtcctcagcaagggaggaaccactcagctttttgtttctgtatggtatttgtttcccaagagaaaagcattgcacgtataccgttcataagccaactgccctgtaaaaacaataaaaaccaattagtaaaccaaaacaaatggttcaggaagttgagaacaatacaggactaatgaatgcaacaacaaatcaggactggaggaccactgtacctatcgaacctacaatgtcagaatgtacaaaagagcaatatcaagctgaaatccctgctgctttccagtccatgtgagtataaaagcatcattgtttccttcccagccaaattctgtgagcaagttctcaaagttcattggaatgcttagttggtgttacatctttagtgggggcatgttggtagactactgatcgtgatacactgattttttccagtgactattttctgttcacaattattttaaaccaaaatctttttgaatgttttcgctttcaatttgtatgatgatgcttcacagctaatcaaatacaaggaaaattacaaatgcagttaagtttttcttagcttatgtcttgtctttagcagtattcacaagatcaaaaatagtgaactttttatgaagcctatgatgcaccaaagttaccagaacatgtgaaagtgttaaaaggaatgcaccgatttgttctgcaattgtttcctgagtagaaagcttaaatccatataatttttgaaattccatcgatgccatagagcttaatatctctatggcgttggaaggtacaaatccttcatctggaaacaatattcaacatagagaaacataagcttttgttaccacgattaggtgcgattgaaataagaaacagagtgttgagaaaatattgcgacaacagattatgtgaagcaattattgaggtgttgatctaatgtaccttaagcaaagatgaggctgttttgcacctttcactgaggatagggcatcattcatgtgtaaattagcatgcagtcaatagatcacacttcacgcattgacaacttgaacagcaacttcagactctatgctctgattagagccacaactcgactgagcatttctactgaggtatttatccattaactctcctgcctcactgaattgacccatttttgcaagtgcagcaacaattggccaatatgattgattattgctcgtgctgcagccactgcgctcccttgcaaatagaatttctttggccttattgactctcctttcatcacatagagcttttatcagggaattgtatgtgtaactgtctggaaccacaccaaatctcaccatgtcattgaaaatatcttcagctttatctaccttcctcatccggcaaaaactcaagatgagggcattgaaggaatatgcatcaggagtaacgccatctattttcattttattaagaagatcaatagccttgttaacatgccctgctgaacaaagtgtgtgcattaatacattgtaagtctgagcatttggtctaacaccccactctgccatctcttcaaagcaaacaaaagcatcatccagttgatgggtattgcacaggccatcaataagagaggtaaatgtaatgatatctggcatgaaaccatgttccataagcatcttaagaacaacctttgcattatgtacattccctaattttgaatatccacttattagtgtgttaaaggtgacaaggttaggcaagaaacctttgtcttgcatctccttgacaatctcctctgctttatcaactgccccggccttcacgaagcaatctatcaccatgttgtaagacatcacactagacaagagtccctttaaaaccatgtgccccaaatagtggtttgccttcgaaaaattcttgcagttcagcaaggatttgattaccataatatatacatcaaatcctggattcccgccattcttaatgaaagaatctagtaactcacatagatcactcacctccaggcatttcagagcacaagacatgacaatgccaaatgctgtgctgtcaaggagataacccctagcactcatcctcttctcaaactcaactgcctctttggccatgtccttcttcgacaggcaatacagcatcgtgtggcatgcgctcgggtgaagggacgtctcatggcctagccaatcactcaacatcctgtatgccttgtctctctccaagcagcgaaacacgccatgaaccagtgtcctgtaagtggcctcgctcggcgccacgcccttctccttcatcttgtccagcatacggaacgcctcctccaccctgccggcattgcagaacccgtccaccagcatggtgtacgtgaacacgttcggcctgatcccctccccctccatctgcctcaccagccggaccgcctcatcgacgatcccgcgccggcacacgccgtggacgagcgagttgtacgtgaagtggtcgggccggcacccgtcggcgggcatctgctggaacctgaggtacgcggtgtcgacggcccccgccctcaccgacgccgcgatcagcgcgttgtacaccgccgtgctgggcctcagacccagccgcggcatttgcacgaacacctcgtgcgcgtagcgtgcgagccccagcctgccccagctctccaccagcgcgcacaccagctcctccgacacctcgcacccgcaacccctcacctccgccaccagcctccccgacagcaccaccggcccgcgccgccacagcgcgcccacgagcgcccgccgcacgccgccgtcgcgcgcgaagtgggcgccgaaccgcgacgcccacacgtagagccgcacgcagagcagcggctcccccaacccctccctctccgccgccgcacgaagcgcgcggacgacgaagcgggggccgaggcgggggagcgcggcggcgaactcggcgttgagacgggggaaccagtcatcctcggccaagatcgaggcggcgcgggcagggtcggcggggtccggtgggttcgcggcggatttggtggagaggctggatctcggtggggtttcggggcggcgatttgcgccggagaggcggcggcagcggcggcggcggaggaggaggagattggggtgatggatgctcctcatttgcggtttgcatccaacaaaaatcgccgcctttctggtctgggtgttcactaatcactactgcctctctggctctctgaagcaaggagaagcaaggaggtagacctggccaaatgggccgtgccaagacgggccggcccgagcacggcagtactgtagccggcccaggcccggcacggcacgccagcctgtgggccgtgccggcacggcccgttatcctgtgccgtgtttgggccgatgcctcagcccgtgggctggcacggcacggcacgtttactgtagcgtgccggcacggcacggcccaggcatggcacggcccaccggcccatttatttttcctacgattttctaatttttcccatatatttctcatattttttatttttttccacattttatcctatttgtaccatatattttatgatatatttcctaaattttcctcacatttatcctatatttatcatttttttcctttatattatgttttttctgccttttttctttttttcccttcaaatttcaatttttatgggccacatgtactagtgggccggctaccagcccacgtgccactacagtagccgtgccggcccggcacggcccagcaccttcttgggccgtgcttgggccgtggccttggcacgtgggccggcacggcacggcccgctacaggagccgtgcctaacgggccgtgccctagtgggccgtgccgtcggcgtgccgtgccgtgctgggccgggccgcccgtttggcctgctatacaaggaggagcaagtaagtttttttttttttacattaaaatatatgacgccgttgacttttttccaacgtttgactatccgtcttatttaaaaaatttatataattataatatattttattatgacttgattgatatgaaatgttttttaagtatgacataaatattttcatatttgcataaaaattttgaataaaacgaatggtcaaatgttgcttaaaaagtcaacggcgtcatacattaaaatatggatgaagtattttctccatttcacaatgtaagtcattctaccatttcccatatttatattgatgttaatgaatctagattgatatatatatatctagattcattaacattaatatgaatgtgggaaatgctagaatgatttatattgtgaaatagagggagtacataataaaaaaatctaacttaaaaagagaaagaatgccaccctcctatcctagtacaacgaatttgaataaaatattctttagattcgttgtattgagtttttttttacaaaggaagtactgttttaggcaaagagtatactgtccatgaaaaacttagctgagtacacacttcatcccataataaatcaacttctagaaacgtatttttaggaagtattgattataagaaatactttagagaacgatatactccattccaactatataggataatcccaaaacgtcttattatataaaactatcataagaatataaagtgtttatctatattcataactaagagcttagtcggtttgaatgaaaaaccgatgattttggattcttaagaattaatttctagaagtgacatttaatttgtaggaatgatgtataggaaaaccaaaaaaaatcctcttggagagaaaacatatgaaattttttatccactcatgcgtgcatgtattcctattcttccattttttttcttattgttgtgggtcaaaaatcctcccaattaacaagcatataagggagtaatatggaatggatgattcggtcttttatgtatgccttagtgacaaatacagttatactcatcagtcatcacacgattttacttctattgaatggccttagcgtgatatcagtatatcacacgccatataggatcaattcatctatacattcataaggcatgacaattagatatttagatagcctatttagtttacatgcagtgtatagtgtggctttgcactcctctctcctcttatatatacacacatttttttttgttaaaaatgatataaataatgtttctctgtgccatcttttcttccaactatgaaaagggtgagatattgaagtgaaccaatgttataaaaatgtttattccaacaaacggactatatatgatttaaggtttaggagatatggagcagatagatattcatacagcgagatagaatgacttcattcagtgtcatttagtgtcgttcagtgtgattagttattttactatgtattcgatccaataactcatcgggcactacaagaagcaggtcatgaagaaaaggttcatttcatacatcgtaaccaagttagcttcacagcatcaaacctaagtagaggaatatcacaactctagtatatgattgatgtgagatgatgggtatgaagtattatattgtttttcgttatcactacgagaatgatgctataagttataagtgctatgaaacaaaacactataaggcttaatataattgtgatgtccattttcagtgacaatacatgtcaaattttataaacaagagtaaatttgacaaaactatatgaatgttgatcaaactatcacaaaactatatatgtaaaatgatgtatcacaaaactacatacttaacatcaaatttatcataaaagtacagatttaaggccaaattaaagcatcacaaaagtacagatgtgataatattaaatttgtcgcaaaactacagattttagaattcaaatccctagcaccattgttatgttggagctataagtgttgtaattttgtgactaaattgtttctaaatatacagttttgtgataattttggtactaaaatataattttgtgacactccgtcttgaatgtgtagttttgtggtaaatttgattttaaatttatagttttgtgatagttttattattaaatattccctccgtttcaaaatgtttgac

SEQ ID NO: 22627 - DNA, 23739 bp, Oryza sativa
tatttttagttaattattatttttccatatctatatgcacgtgtctggtcataaaaccaaaaatatttgtgaatcctctttagagaaggataacatttcttactattagcttattttaaaaccaatatatataatagattaactataaagttggctataatatatttcttctctctctatctctcatttatatatttaatatatttgtcttgtagcttgtgataagctaactcttgaatgagagtcaatacccttaaattttttgggttcatctcagcatggaaattgttttgcatcccttggtaacaaatgaatggtatatacagtatgtgcagtagtacttttttattatttttattttttttaacgttttcccgtctcttgggctagtggcccgactctctcatccctccggcttccggaatccccaccgccgaacgcacgatttcttcccgacgctgtcacttgctctccccccacatcggcggcggcggaggcgcggcggttggcgtcctgcggctgcggagcgagcggagaagccaaggtcgtgtgttgggtgaactcccagcctcggccgctcatcggggagggcactgctgcacaagggaagcggtttcttggttggggtttagtgtctgcattggatatgagtcacgggttcttggttagattctgaagaggttcttggttagattctgcgcatgatccaaattccgtagaaggataaacagattcgttgagtggcaaagaagaggtggtaagcagatgggtgtggtgacaaggggcaagaagaggaggctggatgatgaatccagcaacccacaactggcgcctcgaggaggagaagacctgataagccgcctcccggacgatatcctcaccggcatcatcaccctcctccctaccaaggacggcgcctgcacacagatgctctcgcggcagtggcgccctctctggcaatctgcgcctctcaatcttgaggccagggtcaatggctgcacgttgggaaaggatgtggccaccatctacagcacgctgctaacccacagtggtccggtccgtcgattctccctcagctagggatgtgacgactgtaatggtcactttcccgtcgccgattccattgttggatcccccaggctcgaccacctccaggagtttgaactgttctatgatagcgttggcgttcaaaatcctccggttccaccgtcggtactccgtctatcttctactctccgtgttctcaggattctttcaacgtgtgacacacttcagtttcccatggagactgcttgcacgctcgatttcccacacctcaaggagctcaccttatcccaagtcaacattgcagatagcattctccatggtattctttcacgatgcattgtcttggagagcttggtgctggatgcgaacaggggttgtagtcgtctccgtatcagctccttgacccttcaaagccttggtgtgtcagatacttatttctctgtagagggaatgctggaggaagtcattatcgaggatgccccgctcctggaaaggcttacaccaccagttatatggcatgaaggctttgttattcgggttattcaggcaccaaaactgaagacattgggttatctaagccagaaaatttccacacttcagcttggaaacatggttttccaggtagcttcatacacatatactgcaggcatttctttctcttgatatgttatttcttcacaacatttcattcaccatatctatttcagaaactggtgcctgttagtctgtccaatgtgatgcgcgctatgaaaattttagcccttcacaccgctcctgatctggatgttgttattgacttcctaaaattctttccgtgcgtggagaagctatacatcgtggtgagagttttttctttgttaaattcagtgagtacacactcattttgttctattgtgccatgccatcggccctcttcttgaatctatggttatatcatgtttctttcaactctcttttctccttgttaggcattaaatcagggaaacttcaagaatgtacggcgatatgtttcacttgagtgccttgatctacatctcaagatggtggaatttattaactatcatggaaacttatcagatttgaacttcatcaagttcttcgtgttaaatgctcaagtgctagaatgtataaagtttgtagcctgtcgtgacaaatgtgatgcaaaatggattaaaacacaacatcagaggctacaactttattccagagcttcacgaggcgttacacttgattttcaagctgattatggggtggatagtttggtacacgtgaagcacatcagtgatttgattacagatgatccctttgatagatcgttctgtagatgccgtgatgaggaaatatgaattcctttgaagctgtttatcagttgtatactttggtaagtttgaagcgcatttttagtttacacgcctaaaatttattattttggcatattttgttgcaagcctggaatatttattgtgccaaagaaggtgaatgacattgatctattttagtttcattcctctttctgtgtggtatgactctgtgttcctctcctattgtacacaaaactaggctaggttggtgttgttattgtagttttaattccactctgagctacatcattcattcttgtttttagtacctcattttggcatcaatgcagtctcacaatttcattagaattttggtttctgttttgaggtttttcgtcactggtttaatgctgtcagaatattgttttatgtgctgtcagaatatcgatattggttcatgaactttacgcaagtgccggtttgatacacactatattttcacctcaaatggatacaaacaagttgtaagtaactgagttatattagcaaatttgaatggtcaagaaataatagatatttacttttaatttggttttgtcatggaacatttatgtaacgacctagtccaatggcagtaagcacggaaggagattctgaatattgaatccattgtaagccaagcatcaacattgttatttttattgttttctttttgtgccacacggggctttagtgagacttcagttttaagttaagatattcgtctgtaagtttgagattccctttatagaggattgatgaagacactcgatctaaggcctctgcattctttaccaccgaattatgaaagcaatcctctcaactgtactatttgtgtatgtaccagtagtaagattgcaaatttgtcttgttttcatgctatgtgtggtacttgaaagacctaattgcagtattattctacttgcaggtgtatggtcatattgtcatattgatattgccaggcagaaaagactgctactgctacggagacaaccgagtgctgttttgtattctgttagacccaaggccaccttttggacaattcactggggatttaagttgtgacattattgtactctatatatagtaagtaagtaagtttgtgttttctctcaaatcctgtggccatgctaggactcatgtttagactgggaataaccacttaatgatcagtagtgggtagttttaagttgcttttatggacaacttagtgtatgaatctgatggattagtgcgttaaatactatcggttcaacgaaaacggtaacctccttggtatgatgggattaggattggtgacttgcaaaagatgaatgtttatgctccttggtatgatgggattaggcattggtgagttgcaaaagatgaatgtttatactgttctaacttgcaaaaggaaaaatcctcctagatttcctaacctgcattttggatcatgtgcgtgtagcatattaggaatttccgtgatattatttggtaagcggtaggccagtttaagaaaaggaaactagaaaaatatatcctgtgcattgctgtggtaattacagttagacatgtctaaagaaaaaaaaaactaacgcatgaacagatttatttttcatgatctatctctcctcttaattaggacccatctatgcaacccactatggatgctcttagtgcgtagtaattctatcagtgttgctgtcatattttgttcgcacgaacacagttcaaatatcaatccatttcgagatccaaagaaaagaaaccaggagctaggtataaacgaataaaacatttctcgtgacgcttcaatcctaatgaaattattgttgaccacaggtagagtcctcaattttttttcccgaatgttactcgataaataaggagtttccccgaaacagaatcatctagatctgttacttgataaataaggagttaaggagttaagctagctgcatgctttttcattccttaaatcatatgacatccttgttccctcacacaatatatataaacctcgttcttgttatatatgcttgtctccatgatcagttcgttgcacattcaaaaacgcatgatgactatatatattggtttattacgcatgatgactatatatcggtttattgcttcaaaaactcatgatgactatatatatcggtttattgctatgatacatgtgatttcttgataggtaaacatcatatttagcactacgatgagatattggagaggtaggatgagatattggagaggaggtcatcatatttagcactacgatgagatattggagaggtaggatgagatattggagaggaggttaccaatagatattggagaggagggtaccaacaagctttatttaacagtaggatgctatgtttatttaacagtaggatgataaacagtaggatgctatgtttatttaacagtaggatgatatgaaatattggagagagataatggagggaggtagtaggagatatgagatattggagagaagtaggatgatatgaaatattggagagagataatggagggaggtagtaggagatatgagatattggagagaggcaaagcaatgcccgcatacaatgtgaattataccgacattcattttgtttgatgttcttgcagatgcggtgccgcatataatgtgaattataccggcaatcattttgtttgatgttcttgggtatgcggtgataaaattactgtcgtttgatcctttgatagattatattatgataagttctgtattgattataagtaagaaaagtataaacaattgtacatatatgctgaaaatcaccccaaagagaaatgtccaccaacctttatatattttctctaaatttgtgaaaaatgactcaaatttgtgaaaaatgattctaatgtgaaatctagacaagatatgtgatatagtctctctcccttcatgaaaatttatactcagactgtatctaaataaacgtatcgtattagtacgagaagaactgaaaaacatattattacgagaagtatctaaatcaatgtatcgtattagtacgagaagaactgaaaaacatattattacgagaagaaagaagaaatgaaaaacatattattacgagaagaaacaagtacgagaagaatgaaaaacatttctaaaagaaccaacccacgagagaaaagagaagtaacccatgagagagaagaactgaaaaacatttctaaaaaaacatttataaaagaaccaacccacgagagaaaagataagagataaggaagaaaagagtatccaacaatggagaaaagataagagataaggaagaaaagagtatccaacaatggagaatttgttattcatttacagatattatttaatccattgatccatatatgttctaccgtacttgcttttctaagagaatctgtaccatctttaaactcaaaggttaatttgatccgtgtcattgcaaatgtatctattctgatgaatagcataacaattcgtctatttgtagccgtgccacttaaattttacaaaattggaaccataccatcgttgtcacattttctatcttcttccccatattgcacgtaggacccaccagtcagattccatcttcttcctcatcctcccttatcttcttccttcgacgggaggagtggtggggtacagtcggtgcggccgcgcccacatgtgcgggctcccccaacggacagccaacacgggcccccaacggcggcgcgggtcgtcaacggcgcggaggaagcgctcggccttaggggtgaggtgagcccacaggagtggctggaccgacccgttcgggctatggaggcaccggagcgcctgcacgcgttctagcaagtggcagagttggtgcccatcgcgcatgcgcgggggcggccgtcggcagcgcgcccccctcttgctttgttgtgtctccactcttcatccacgtcgcgttcatcgagactgcctccggctcagatgcctcatgctcctgctccaaccccaagcctcagaagaggccgacccggactcctcgcctccacggcagcgatgggacggcaccagccaaggggaggacctcagcgggaaccgaggaggctgatgacagcagcgacgctaccttcacctctgacatgtatatgtcggggtcctcttgttcgaggtgcggtgatcgagataaatgcattgttatttctccgcatgcactgcttgtcatcggctcattgctgatttcatgtctacggctgttgttgcagctgttctatacgttcgagacgatggaggagaagatgcgagcaatggcgaacctaccgcagtgcgtcttgcctccacagttgttgctcaagtggcccaaggaagcatcattctgtcagttgttgatgcaccctgtgccggacacctgaccgaaggaagaaggtaaagaaggatgaggaagaagatgaatctgacgggtgggtcccccagtgcagatggagaagaagatggaaaacgtgatagcgatgacatggttctaattttgtaaaatttgagcgacacagctatgaatagacgaattttaatggtatttatttgaataggcacatttacagacatggatcaaattaaccctaaactcaaactgtttagatctagtaagtcagagtgttttttcactctgaggatgcatgacacctgtccgggatatacatccggcagtccaagaacatagatgacgatggtaaagcttaaaaattataatgagtgtacaaattaaaagatgcgatttctttgtacataggttagacaacaagcatgcagtagaatatttacagagggcacaaccaaattgatcgacacaaatttgtatcgtacacccgcccactaacatatatgagaagaacgatgatcgacacaaatttgtatcgcacaccagcccactaacatatatgagaaaccatgtttccggtctcagtggcgcagctagggggccagagggtgccaacacccccctatccaaacaccaccacctagtttttactctatattaaagttaactaagataggtatttatctagtttatttgtatagcttgaaagtattatcagtttagttagttagcaagtctataaatattagcaagaaacatgatctataaaattagtttgtgatttctcatctttttcaaagtaaaatagataatacttatttgtgagattgttcaatagtttacattgaaagaatttagcaataaaaactagtttcaaactttcaatgatattattaaagagctaaaattcaagtttattttaaaggactagtttacgtattgattgttattgatggttactatttgacctcatttgctatcaatattagttattcggtatcatggcttatgctcaccccacacccccctattcttaaatcctggcttcgcccctgtctggtctaccaacttatcagaattactataacgtatatgcattttcagcgcacttttttttcataaatgaaagttttcttactttcatataaaagttctttgatgaaaggctttcacataaaatttttcggacgaagtgtgtgctagggataaacctacgctaaacagtagtaccccagcttattattggccacttcataagtttacgaagtttttttttaaaaaaaacaatggtttactgatagtagaaagcatggcgcatcaagcctcacacaaaaatctgatactcctagttcccaacggtaggctataccgcccacagacatcaggtcttgggcatcatgcacgaattaatataagtatgctttcggtggtacttcctccattttataatataagtcattctaaaattactcatattcatatatatgttaatgaatctagacatagtctaaatgtggacaatgctagaatgacttatattataaaacggagggagtagcaatcaaagtcagtgacaaattttgatagtaccaacccactaacacaataactctactggtgtagtggtgtggttctcaacttatcatcacatacatatagaatatacgttcactttgccatcttattgtgattcatcatgcatgaaattaattagatactagaggaagccaaaaccatatccatatgtcctacattaatgattttgccaattacaagccatgagaaatatactaggggcggaaattttatgagatcatgtaggatcccctttgatgttcacttgatattaaaagaaaggatatgataacgtttgagctgctaatcatgttaacagatgatattttgatgatgtatagctcaatcgcttatttaaattaaacagggtgtacggagagagagtatctatgctcctttcaaaaactttagtttatgtaaattgacccatgatattttctgatattacgtaattaatagtcaaatatttggttcagtcaaataaatagcataagatatttttaggcgaagttccatttcacctaaaatggaaaaaaatggtatttcaaccagtcgacatcgtttgaaagtggcatttcaaggaaaccacactgtgaagtggcattcgagcaaaacccaatctcgaagatggcaaaaatatcaattttctcctctctaaagtaaggagtaaagtaattatttttactattaattactccgtaatcaatatagacaatgggcttagttactgccttagaccaggagtatattgttcatgaaaaattatcctttgtttataagaaataactacctccatctcaaaatatatcaacctagagctggatcggacatattctagtccaacgaatctggatagccccttgtccattggactaggatatatcatctctagtcctaaattgctatattttagaacggagggagtactagacaacgatactccatttcaacaatatatgataatccaaaatgtcttatcataataatatgaaacagagatgattctttcttttatgtaggagtatatcttagtgacctttacgagaaactagcatttggctcttgcgttgcaccgagattttgattaaagaaattatcattaatccactatatcatctgtgtgctgcatatatttgttaatagtatgcgaatcctttagcctcaaaatatgttccttttgcttaaaaaaagagtttggtggggtcgatcgattgacacgcagaccctctagcatccagtccctttttcgtgaaaataaagcaaaaagttgataatggagtggcatgccaccctcttttaatagagatatcaggtatagaaaatatagctttactcatcacacaattttccttctattcaatggcctttctttcacacaagatgagcccactatcacacgccatataggatcaattcatccctacattcataaggcatgagaattatatatgtatgcatgcagtgtattggcgggtggttttgcactcctcactcccttatatatacacacatttttgttaggtaaatgatatgaacccatgtttcccaatgctatctttttgatttaacgatgacaaaaaaaaagagatattgaagtgaaccaatgttatcggtaacgctattccgcgctgtattagttcgagtgccgcacagcgtcctctgtttttcccttttttaccacctcatctttcctatgcatcccaccttttctcagttcgtttttttcattttttaccacttcaccttccgtgtttcttcttttccatctcattctttcttcatcaatgggcccaataaaatatcaaccatccagatttttctatttttcgttccttctatatagtttttctgttttcgcggttttagtaccgtctagtttttctttctgagttttctgttttttatctccgcacgtttcagaataacaaatttactcgtttttcatttactcccagcctcccacatttcctcattcagaagtaacaaatttattctcattcagaagtaacaaatttaatcgcatggatacctccacatcgtatgacgccatgtcgtaaaaaaaatactattaccttacaacactagtaattcttttaccaatattataaatattgtttagatttcgtggtctgtaagtaaaacaattactaccttcctctcgatatagcgcatgatctcgtagccaccgtgtagtattatgtttactgatgtgttcaatacataatataagagtaaaaactgagatttcgtggtctgcgaataaaacaattaccaccttcctctcgatatagccatgatctcgtagtcaccgtgtaataatatgtttactgatgtgttcaatacacaatataagagttaaaattgatactaagagtattgttgatctgtatcacaaaatagtcatatgaatgaaaaaattacaggctcaatcacacacaatcaataaaattactcacaggtgaatcaaactagaaaaaaaaatgattcagtcaaaaatccatttggtggctttattggatcttgctataaagatgaagagcacagtctgtgtcttgtgattggtagtggagagggcaactaggtggcaagcagtagtcggccatggaattatggaaggatgtagtggtgtggtatagagatgagctcgacgttgcacagtattagccatccatcatctagcaagcacgaaaaaaaatacaaaaacattctcgttcatgtcaatagagatgacgagtaaaacaaaaatagtaaacaacatccatcaccggcggactccaccctatcctctgcgcccagccacatggagcacgatgtgcaaatgtaggacctgtgcagcccatcaattgagatcaggtaacattggagattgcacgttaatttgatttgcaaaaaagaaaaaaaaatttgggcttcatgcgtgaagttgaaggagagtatgcagatgcaaatcagagtgtcattttcttacttgcttgttctatcaatgttggcgatgtggagcagccgctggttgttgctattggcctaggtaaacacctccttgctggttaaggtgctgcccagcgtccggcaacgaggcccgaagcagtgctttcacctcaaccgccaccggccaccgccatcaaccgccacggtgttgtcgtcctcctccatggtgtgtcgccgatctgtgggctggggtggtggatcgattcagatccgaaaaaaaggaaaaaaatgaagtgggggcgagagtggttggttgggtatgggaaaaatagaatttataccggaagcagagaagttgtttttatcgaagtaaatcatttactccgataatggtgggagcatgtggggttggatcggaagcagggagttgtttttattatcgaagtaaatcatttacttgaataaaggtgggtggttgaggcgcgcgatacgagtaaatcgtttactccgactttggtaggagtgggatgacaggatgtggggtggggcgggcctgggttgatgcatgtttgacgcttggaatattaggagcacgctgcgctcctactagtagttctaccaatggtatataaatatttattctaataaactagactttgatttaagatttaggagatatgcaggagataggctatctgcatgaattatgatgggtttatgggctctaaattaaccaattatgaagaagaaatctattccatacatagtaaccatttggagtcacacacaagtagaaaaatatcatatgcacatcaacagtctatatgacatgagagatgatgtagaccaaacagtgaagaactaactatcaagttaacaagtctacatgacatgagagatgatgtagactaaacagtgaagaactaactatcaagttgtgccattgtcactttgattcttacagctactgtggttttgttgttgttattttctttcccacaatgtgataaaacactgttgatactaagcgctataaaataaagcttaatataaaagtggtgtccacatcgttatgtcaaattcttcgtaattcgataggtattgtacagacacaaaattagtaacatgggtaaaaataaacattttaggagaaaaaaatgttttgcttccgtgataataataataataataataataataataataataataataataataataataataataataataaacggtaagttacatttttctacgtttccatctatccgtgatcttctgggccagtgggctgaccactggaatccccaccgccgcacgcacgatttcattcccgaagctgtcgcttttctctcccctcatcggcggcggcagcggcggcggcggcggaggagcggcggtggtcgtcctgcggcgaaggtcgtgtgttgggtgaactcccagactcggccactcgtcgatcggtgatagggcaccgctgcaaaaggcaagcaattttctcgttagggtttgctccaaaccatctcgaatttcacatgtctatatggatcgagagacctttttttccactctaaatctactaccgcagaaatttgtttaatttgccccagttggcattcttgcatttccgaacctgcaggggtttacagtctagtgtctgcaatcacttcaacaaaattaaacaagtggttcttggttaggttctatgcctgatccaaactccgcagaaggattcaagatttgggtgcccaattttttttgttggatcacaagaaggaggtggtaaacagatgggtgtggtgacaagggccaagaagaggatgctggatgaggaatccagcaacccacaactggcgcccagaggaggagaagacttgataagccgcctcccggatgatatcctcatcagcatcctcctcagcaaggatgctgcccgcacacagatgctttcgcggcggtggcaactgctctagcaatcggcgcctctcaatcttgaggccatggtcgatagcagcacgatggggaaggacgtgaccaccatcgacaccgtgcttcaagcccacaggggccgtgttcgtcaattctccctcagctggacattggactacaaccacttcttcatcgtcgattacttgcttggatcccctcagctctgcaaactccaggagtttgaactgttctattttaatattgacgctcaaaatctgtggttccgctgtctgtattctgtctagcgcatactctatgtgttcttaggatttgttcaacgtgtgacacacttcagtttcccatggagactgattgcatgcccaatttcccacacctcaaggagctcaccctatccaacatcaacatcgtcgatggggagaggggaggggcagctcgcggtgggaggagcggcgttgccggtggggagtgcgggaggggcagcacgcggtgggaggagcagtgttgccggtggggagagaggaggggcaccaccggtaggagagagaggtggcctgcggtggagggagggaggggaaaaatgaattagggttatggattttttttgccccggcggttttgatggattcagaaacgatctgagccgtccataaaaacgaacagctcagatcgatcccatgtcgggctagcctccattgtcgggccgcatcactgctgggccgcgcacacttcatgggccacgcgtgggccgacggtccaacaaaacacttaggttagacattcggttggagaccacacaacagtgaaaggagaagtaggaggagcccaattagacttcatgttgggctgaacgctttcttgcgggctgaggcggaggaaggagaaggggaaagcgggccgactcaattgcgggctaaagaataaaatgggctgaaaaaggctcagagagaaaggatgatttttatttaaataaatgctgaaataatgtttgtattatcaaaattagcaattaagctatggaaattccaataaaattccaaagagcataattaatcatggagaatttaataaaattaaatccaaccatatcattttatttctcacacttactttacttgtaaactaatttaattatacacctacctacttaaaaaatacccaaatatttcagaaaatttgtatttcaattaattacataatgtaaatctttctcaacttttcctcaattttctggtatttacatttctcgttgcaatgcacgggtacttttgctagtacgtagaataacatatataattcctttctctatccgtttatctcatgacgcaactcaaacaaaggatccaaaatgatccagatatgttctctccgagagtcctgtcctttgcatatcatgcagtattatgctaggattggttgagagaacgtgtgcagtgtgtaacaccaccggtcctagctcgatgtctcctattaggacccttctaattaaatgcaacccactatggtcgctcttagggagtagtaattaaatcagtgttgctgtcatattttgttagcacgaacacacatttcaaatatcaatccaattcgagatccaaagaaaataagaaaccgggagctaggtataaacgaataaaacatttctcgtgacgcttcaatcctaatgaaattgttgttgacaacaggtagagtcctctaaatttttttcgccgaaacagaatcatctagatctgttactcgataaataaggagttgagctagccgcatgctttttcattccttaaatcatatgacatccttgttccctcacacaatatatacaagcctcgttcttgttatatatgcatgtatccatgatcagttcgttgcacattcaaaaactcataatgactatatatcggtttattgcttgaaaaactcatgatgactatatatttactgctatgatgtgatttcttgataggtaaacatacatctctctcattagagagaaaggagggtaccaacaagcctttatttagccggatatttagcactagatgagatattggagggaggtaggagatatgaaatattggagagaggcaaagtaggcaaagcaattgccgcatacaacgcgaactatatcgacaatcattttgtttgatgttcttggggatgtggtgacaaaattgccgtcgattgatcctttgatatattatattatagtaagttgtctattgattagaagtaagaaaagtataaacaattgtacatatatgctgaaaatcaacacaaagagaaatgtccaccaacatttttatattttctccaaatttatgaaaaatgactcaaaatttgtgaaaaattattcttatgtgaaatctagacaacacatatgatatagtctctcacccttcatgaaaatttatactcttatcagactgttactattatctaaattgatgtatctcattagtacgaagaactaaaaaatatttctaaaaccatgccaggaaagaaaagaacaagagcatccaacaacggagaatttgtttctcatttcatcctatgagttagagtttttcaccaaggatggtcaattataaaaacaaagaatattcattttgcagagattatttaatccattgatccatatatgttctaccgtacatgcttttttaagagaatccgcaccttctttaaactcaaaggttaatttgatccatgtcattgcaaatgtacctattcagatgaatgccataacaattcatctatttgtagccgtgccacttaaattttacaaaattggaaccgtatcatcgccgtcacattttctatcttcttccccatatgcacgtaggacccacccgttatattcatcttcttcctcatcctcatttatcttcttcctttgacgggaggagtggtggggtacagccggtgcagccgcgcccacacgtgcaggatcccccagccgacagcaacatgggccccgaacggcggcgcgggttgttgacggcgcggaggaagcgctcggccttgggggtgaggtgagcccgcaggagtggctggaccggcccgtctgggctatggaggcgccggagcgcctgcacgtgttctgctaggtggcagagttggtgcccattgtgcatgcgcaaggggtggccgtcggtagcacgcccccgtcctgctttgtcgtgtctccacccttcgtccacgttgcgttcattgagtccgcctccggctcggacgcctcaggctcctgctccaatcccaaggctcggaggaggcccacccggactcctcgactccatggcagcgacgggacggcaccagccaaggggaggacctcagcgggaagacgttaaaggaagatggtaaaggaggatgaagaagaagatgaatctgacgggtgggtccccagtgcagatggagaagaaggtggaaaacgtaatagcaatgacatggttctaattttgtaaaatttgagcgacatagctacgaatagatgaattataaagtcatttatctgaataggcacatttacaggcacggatcaaattaaccctaaactcaaactgttgagatgtagtaagtcggagtgttttttggttctgaggatgcatgttacctgtccgggatatacgtccggcagtccaagaacatagatgatgatggcgaagcttaaaaattataatgagtgtataaattaaaagatgtgatttctttgtaaataggttagacaacaagcatacagtaggatatttacagagggccaaattgatagacacaaatttgtatcgtacaccagcccactaatatatatgagaagaacaatgatcgacacaaatttgtatcgcacaccagcccactaacatatatgagaaacaatgtttccattctaccaacttatcgcaattgctatttaacgtatgtgtattttcagcgcactttttttttccataagtgaaagttttcttactttcatataaaagttctttgatgaaagctttcacataaaatatttcggacgaactttttgaagtgtgcgctaggaataaacctacgctaaacagtactagggtccccagcttattattggccacttcatacgtttactacgaagtttaaaagaaacactggtttactgcgcatgtagtttccaacggtaggctatactgctcacagacatcaggtcttgggcatcatgcacgaatataagtatgttttcggtggtagcaatcaaagtcatcaacatatataaatttttataaattttgatagacactatcccactaatacaataactctactactggtgtagtggtgtggttctcaacttatccttatataatatagaatatacgttcactttgccatcttattgtgattcatcatgcatgtaattaattagataagccaaaaccatatccatatgtcatacattaatgattttgccaattaattacaatctatgagaaatactccctccgtactcgtaaaggaagtcgttttggacagcgacatggtctccaaaatacaactttaacttcttgtttctataaaaatatttattaaaaagtgatatatgtatacttttacgaaagtatttttcaagacaaatctattcaaataatttttatatttttaaactcaacaacttaagagttattcatgatttatattcccaaggtttgacttaaacattatcctaaacgactttctttacgagtacagagggagtatattggggacggaaattttatgacatcatgtaggatcccctttggtgttcacttcatatttaaagaaaggatatgataacatttgagctgctaatcacattgttaacagatgattttgatgatgtatagcccaatcgcttatttaaattataaacggtgtgcacggagagagcatctatgtactcctttaaaaagctttagtgatggtggcagtaaatatgccacattttaatagtttatgtaaattgaaccatgatattatgtaatagtcaaatatttggttcagtcaaatgaatagcataagatatttttaggcgaagttccatttcacctaaaatgtaaaaaaatggtatttcaacaagtcggcattgtttgagagtggcatttcaaggaaaccactctatggagaggaattcgagcaaaacccagtatcgaagatggcaaaatatcagttttctcctctctaaagtaaggagtaaattaaagtattttttactattaattactccatagtccatatagacaatgggcttaattactgccttaggtaaggagtattttgttcatgaaaaacttatgctttgtttataagaaatagtacctccatatcaaaatatatcaacctataattggataagacatatcctagtccaacgaatctagacaacccctcgtccattggactaggatatgtcagatccaatcctaaattactttattttgggacggagggagtactagacaacgatacccatttcaacaatatatgataatccaaaatgtcttatcataataatatgaaacagagatgattctttcttttatgtaggagtatatcttagtgacctttacaataacttagcatttggcgcttgcgttgcaacgagattttgattaaagaaattatcattaatccactattgctatttttttttctgcatgtatcatctctgctgcatatatttgttaatacttaatagtatgtgaatcctttagcctcaaaatatgttctttttccttaaaaaagagttggtggccgggttgattgacatgtagaccctctagcctcctgtccgtttttcgtgaaaataaagcaaaaaagttgatgatggagtggcgtgccactctcttttaacagagatatcagatatagaaaacatagctagtattactcatcacataattttccttctattcaatggtctttctttcacacaagatgagcccattatcacacgccatataggatcaattcgtccctacattcagaaggcatgacaattatatatgtatgcattcagtgtataggcgagtggctttgcactcctcactcccttatatatacacacattttgttaggcaaatgatatgaatccatgtttccctgtaccatcttttgattcaacaatgaaaaaaaagagatattgaagtgagccaatgttatataaatatttaggactttgatttaagatgtagaagacatggagtagataggctatctaattaaattatgatgagtttatgggtgctaaattaacttattatgaaggaaaagtctattccatacatagtaacaaattagagtctcacagtagtagagaaatatcatatgcgtatcaaaatatctgatatgagagatgatacaaaaacaaaaaggaagaactgttatgtcattgtcactttgattctcatagcgtgatcgtgtcgttatcattttcattcccacaatgtgattaagatattacaattataataataattgtaataaatggtaagtgcagcagtgcaattttttacgtttccatctatccgttatgttctgggtcagtgggctgaccctcttccatcccgacgctgccgctttctctcccctcatcttcggcggcgacggcagcggagggcgcagcagtgggagaagccatggtcgtgtacgtgttgggtgaactcccaggctcgtcgatcggggaggacacgactgcaaaaggcaagcaaattttcttgttagggtttgctcctaaccatctctcgaatttcacatgtctatatgcatcgagagaattcaccccctaataccgcagaaattcgtttaatttgccctattttacattcttgcatttccaaacctgtaggagtttagggtctagtgtctgcaatgatttcaacaaattaaagaaggggttctcggttaggttctatgcctgatccaaatttcgcagaaagattcaagattcaggtgcctgacttttctttggatcacaaggaggaggtggtaaccaaatgggtgtagtgacaagggccatgaagagaggctggatgaggaatccagcaacccagaattggcgcccagaggaggagaagacctgataagccgcctcccggacgatatcttcaccagcatcatcactatcctccccggcaaggatgctgcccgcacacagatgctctcacggcagtggcgaccgctctggcaatcggcgcctctcaatcttgaggccatggtcgatagtaggacggtggggaaggatgtgacaaccatccagaccgtgcttcaagcccacaggggccgtgtccattgattctccctctgctggacattggactacaaccacttcttcatcgtcgattacttgcttggatcccctcagctctgcaaactccaggagtttgaactgttctattttaatatttgaactccaggattagctccttgacccttcaaagtcttggtgtgtcagatgcttgttcttatgtagagggaaagctggaggaagtaattatcgagaatgccccactcctagaaaggcttaccccaccatgtatacggaatgaaggctttgttatttgggttactcaagcaccgaaaatgaaaacattgggctatctaagccataaaatttccacaattgagcttggaaccatggttttccaggtagctgcatacatatatgctgttgccatttctattttttggtatgttatttcttcacactctcatacatttcattcactatatccattttcagaaactggttcctgttagtctgtcaaatgtgatgtgcactgtgaagatcttagctcttgacagagctcctgatctggatgttgttattgacttcttaaaatgctttccgtgcgtggagaagctatacgttgtggtgagagttttttctttgttaaattcagtgagtaaacacccattttgttctattgtgccatggcatcgaccttttttttttaatctatggttatgtcatgtttcttttaactcgctttttttccttgtcaggcgttcattcaggggaacttcaagaatgcactgcgatatgtttcacttgagtgccttgatctacatcttaggatggtggaatttattaactatcagggtaatatgttagatttgaacttcatcaggttctttgtattaaatgctcgagttctagaatgtgtgaagcttgtagccgctcatgacaaatatggcagaaaatggatggaaaaacaacagcaaaagctacagctttatggcagagcttcacgaggcatcacatttgattttcaagctgattacgggtcaaatggttcagtacacatgaagcacatcagtgatttgactacagatgatccctttgatagttcattttgtagatgccgtgatgaggaattatgaattcctttgaagctgtttatctgtcttatatactttggttgtatcaaccgcatgcttagtttgtacatctgaaatttcttgttttgcaatattgcggtgcaagcctgggatatttattgtgccagagaagttgaatagcattgatctattttagtttttttttaactctttctgtttggtacgactgtgtgttgctcctcacctattgtagacaaaactagactatgatgttcttgttactgtggtattcattccactttgagctacatcattcttggttttagtacctcattttggcattaattcgatcccacaatgtcattgcaatctaggtttcttttttgaagtttctcatcaatcatcactggttttttgctgtcagaatattattttgtatgtttgaacatcttcctgtacttacgcaagtgccagtttgatacacactacacagtttcacctcaaatagatacaaacaagttgtaagaaactatgttagcatgaaacaattgaatggttaagaaatagtggatatttactttaaatttggttctgttatggaaaattatataactccctagtccaacggtagtaagcacgaaaggagattctgaatactgaacccgttgtagccaggcatcaacattgttatttttattagttttctttttgtgctacatggggttaagtgaggcttaagttttaagttgctaagttattatttttttatagtttatcttttggtgctacatggggttaagtgagacttaagttttagggctgtgttcttaagtccaagttcccaaccttactctctcgcttacagcgcgcatgcttttcaaactgctaaactgtgcgtgttttgcaaaaaatttctatagaaaagttactttaaaaaattatattaatctatttttcaaactgctaatcggtgcgtgtttttgaaattaatcacgcattaatccattacttcgttttccttgtcagaggtgagggttcccaaccctcaccaaagaacacagagttgctaagttattggtttgtaagggtgtgttcgctagtacaggttcccgggaatagtacgcgcagaaaacggaacggtccattagcacgtgattaattaagtattagctatttttttcagaaatggattaatttgattttttaagcaactttcgtatagaaactttttgcaaaaaacacaccgtttagtagtttgaaaagcgtgcgtgcgaaaaacgagggagagaggttaggaaaaggaggtgcggaacacaccctaagttgagactccagttacaatggtggaatacacatggaagctatatagcctatatatgatataagagtggaagctccaaaggtgaatcaggaatcttggtatgagatgatagtcttctttcccttgaaatggaaaattagaacgaaatattgcttttcttttttacttttggcaggatcaaatattaccatttttaagattccaagattttatagtttggcgtcttgacttttaactattttcatggcttaatccagctcactccgttagtgtagctcaactgcatgcttaaggttcatggtggtggaaactgcctatctatgttcaagttctaaacttggcgagatgcctgtggtaattttgtgaacctcaagatatgacgatccattcttcagatgtactcatatagatatagatagggagtgcatgtgtgtgttcgaaacacaatatatataagcgcctacgtgcgtactgtgtttcgaaaaaaatatcaaagtttgacatgtcacgagtttggatagaaacggtggcataaatttctgagcgatcaattatcatttctgtaaaagtagcacggtttctgaacgatttttaatcctaatgaaattgctattgaccacatgcatgcttcaaatcttgaagcatgcatgtggtcaaaaacaatatatggtataatggagctatgtaaccttactctaacaaaacaacatgggtatatataggaagaattattatatatatacggtagcataaaccacatgtaatcgtcatatgttaatcgttgttctctcacttacccaatatatgcctcgttcattttatatgtgtgatgtgtccatgatcagttcattgcatcgagtaacggggctgcaggaat

SEQ ID NO: 22628 - DNA, 24151 bp, Oryza sativa
  unsure (1)..(24151): unsure at all n locations
ccatagaaccgccaaggtatacaaacttttccatgtgcgttggcctaaccataagcaaaatacttctcgggagttctaacccaaactgccaaagaaaattcccataactttgctaattagatgtgtttatctctaatattcagctacaatatacactacgctgtcttatgcacgattcgaagttgtttgcagtttgaaccaacaacggcacatttttgggttcatgtcatttgataccctcgacacctaaggatatgcccgttggctaatatcaatatgatcatcaccaccaaaccaaagtcaaaatcaataatatattgagctttccttgttcaaaggtaacacggattctgaatttgtttttaagcttatgtagtttttaattttatgtcgtgctttgctaattttgtgcatttgttatgtgtgactcatcaatatttttcagcattcttgcaaggttgtttcacttcaaaatggtcattggcttagtcttgagtatgatcctgtgagggtgagttttgcatctgttcatacatttttagattggatctggatagggtgagctctgcatctgtttatgccttttacattggttatgaaagaggagaaaaaaaatgaatcaatcagctcgaggagtgtttttttctttcaagcaataaaatgatcgatctatacatttattcttttcctttcctgcaactaagaaacatatatggtgaaaacccataaaaacatgatctaaaagtttttcaattcatgaaaaattttactagagatatatagggtaaattaaaggcatgaaatatacacacaagatctcgagtccaaacttaactttatttgaaagtaacaaacaagacaaaatttaggtgaatagcatcatatatgatactatttacctaaattttttcttttttttatttctcccaaatattgaagtcgggtttggactttggagtttagattttgtgttaatgtatttcatgcctatatatagagcctatctctatttgtttcatgaaagaaaaaattactcttgttgaaatggaggcaggacctactttgctcgattggagctaaccacatacttttccttatcatatttatctcacagaacacatgacagcattcacgcccattgtacattcaaaaaatgcatgatactatgtgggttggttgctatactgtgatcttatccatatataaatatatattaaatatatattttcgaatggcctatcagatttgactggcattatattgatagggatcttctccatataaaaacatacatcttctcgtgcgagggaggctacatctgcctccatgtttaggtgccatcaaaccttcaaactttattcagcgaaggatgagatattggagagagccaaaacgatgcctagatccatagtgctcaagctaacaaaaccatcattattttaattcctatgttcctataatgtctaaggtaaatttttctacaggacatcacgacttcatggttttggcggtaacacagcgcacagggtgacttttggaaaagatactctcaaatattcaaatattcttttagggagacactctcaaatttcttttggtgtagacactctcaaatgttggatatttctctctatttcattaaaataataatttccggttgaagaggagagaggaatcgcctaaaatgtaaaaaatatcagccctcccatctatcttctcttctgtctctatcttcctcggcgcagaggcccggcgcgggcgtatgtgcaatgtaattttagtacaaatacactgtaaattttagtaaaaaaagaaggaaagaaatagagagaagacggcatcagcaagaaaacatgggtgtgtaaatcaaaatattcacatggccccacacagcctcatcgcccctcgcgccctaatccagcatgaaatccgcacaaatcatggtgtagaccctacggttaaaaaaacatcaaatacaaaggaaaaaatcacacgacagatatatagaaaattcgccacgtacttaaccctagatatattttcctctataaatgtctatgtacaccctctagaacaattgagttttatttagttgaattttgccaagtgccattcatattatctctagtcctcgttcgattagtcggcgactatagattcagagcctccaatagttggtgtgttgatttgctgggtcgattggatctaccacttcaatcgcaactattcctttatacttcatcaccaattcgcaatttttagattgcatctcactactagaaaaatgatttttgctagcggcctatggtgccgctagcatcaaaaggccagtgaaaataattcatttgtgctggcggacaaccaaccgcgaatgaaaatagggtttctctggcggcaacaacgactgacaacgaaaattggttttccctggtggcaatcttaagatacccaccagcaaaaacttttttggagcgaacaaaaatgaaaatccaggtccaaaatagtttcacaaattccaaatcattgtcccaaataatcacaatcccaaatccccaatcacaatccaacttgcaacatgttcagattcaaatccacatccaagttttcaggaaacaattcaaatccccatcaaaagagtttattagattcaattaacatgtaagtgtacatgcatacaagcattttgaacaatagcacaacattgaaaaaacagcatcaacaacagcgccacaggtttttgtggccgtcgccgaccgagcagcagctgagatggatctgatgagggagccatcggatttgggaaccctagccgccggcgaggaggtgttggcggcgagaccatgggattgtttagtctacatcacccgcccattagccttaccctaccctgttcatcacaccagtctgatcgtgacattttggttaacaaaatgatataaatccatgtttgcctatccatctcttttgacttgaacggcaagtagtccatagacaggggacaatttaggcattctacagggaggtgtagttattcactgctagacctttttattctcaactgttaccagaattcgggaatcacaaatgatatatagataacacttttttcttccatatatatcaaagatgcatcagcgatagatcacagttttttttatgcatgtttttatcagtgcctcgtatatatacatcgattattttttatacatgtttttatcagtgcctcacatcgattattatttaatttttgttttctgatcacagtattttcatctctttgatggttgttgaaaggtaagcaggaacatgttctgctcgattcggggctaaccacatgccttttcttatcatatcatgtacggttgttgtcccacataatactagatagaactcatgcacattagtctagctatattcaaaaacacattataactatgcctggtagatactagatagaactcatgcacattagtctagctacattaaaaaacgcatgataactatgcctgggtttattgctatctatggtgtgagtgataaacatcatcttcttgtaagtgatgagaggctatatatattctccatttctttcaggagccatttgaactagctagtatgatgagatgccggaggatgacaaagtgatacacatatgctacggcgcccatcctaatcattgctacgagacgtaatcttcactatctcatgtattcatataaatgaagacacaatattgtcccgggttatattcatttaaatgaaaactggattgttactatcttatgtattcatatatatatgaagacacaatattgtgccgagatgattattcaatggattattgtaattactagtagggtacctgtgcgttgctatgagaaattttgttgatcactggaaaaaaatcgggcaatccaatagacatccggaagtacggatggacggagtttggaggtggtttgacggtcagaccggcagggtccgagttcgagtctgttttcgtcgggtctcgggtttccttgttcgggaaggcttgtttcgtgtttcctttggtttctatcccgagtttggcatggagaagggcctgtagagggcaagaccaacccttatttaagggacaaggccggttcattgtaaaacccccgaatacaatctacttgaatcgttcttttactatgttttctattttaccctagtttagtccatctttgtcggtttgcgccgtaaaacatccgccgccactgcgagagtgcgatacctctttgtaggtttgtcctgaaaaccttccgttttacccacgagacgggtagttatcctcatattgatctaaatcggcctagaggctgattttgatctctaaatcggctccgctagccggtttagttgtttttctacaaaacccatcttgatttggccctttggctagatcgaggtggttggcgactctaggatcaccgcaaggcatttaggtgctgcgatcgtgcttgtcgacttgtcacaaaaagttgccaacacgattttgagatgcttatggctaagtacaagaaaggattagccggtcaacgatttgataatcaaactagtgattcaaaaataccaagatcatctcgttggaagagatttggtcaaacaccaaagcaatcggagccatcaactataccaactccatataaacctccagttgtgatgccatggtatccatatccaatgttactatatggttatccttttatgtattatatgccatggatgcctcaaccacctatgccgtgtcatcaaggattgaagcaatcacctaggacgataccaagtcattctaactcaagacaagaccgtttcccacgaaagaatcggtccggtcgatcaaaggtgaaaaaggtgtgggtgaggaaagaccaaaaagtgggacatttcctttcatgacgccttgatcggtcctaatgtattgtgtagtaatcacgttgaactcgttcccgctcgtcatagttgatgaataaattccttgattaaatccggccatataactcatagccgaaattgctgactgaatagattaatatacggtccttgatttccgtcggtatgctactgtgtgtatgtagcaaatatttagaaattgatgctattctctaagctagcaacacaatccgaaccatcacttggtttggctattccattattgtctaaattaataatacaatccggaccaacacttggttcggctataatggttgttgcatcattatctaagctagcaagacaatccgaaccaacatttggtttggctataatcgttatggcatcactgcacaaattattaacacaatccgaaccatcgcttgattcggctatacatgatattgcactatcatctaaactagcatgtaagctactgtcatccactcggctttcctgagccagagcttcattcaacacatgatcaacatcaagaaatatctggtcattcaatctctctttaatagaatcaagcaatccatcatatgcaatgttggccaaatctttgtcagttattttcaaactaaaacatcggtttttaacatccctaaacctttcaatataatcagcaacagattcattgtatttgtgcctaaccgatgttaaatcaaacaacctaagctcagtctcactagtgtggaaataatcatgaaatttttgttctaattgagcccaggaagaaatagaatttgccggtaaagaagtaaaccatgcaaaagcagtaccgaacaaagataaagaaaacaagtgcaatttacatgtatcccaattagcctcaccacattgcgctaaaaattgatctacatgctcccatgtggtcctactatcctcaccactaaacttagtaaattcaggaattttataaccacgaggatatgggataatatcataaaaattaggatacggcttttggtactccctagcacgattccttagctttgcgaaattctccctgatagtatttctaaaccaatcctccacagtttcaggctttggtggatctggtggtggacttggtggcctaaaaggtggttgttgcggcacaatattgttatattggccatacctagtatcgggaggatatcccctattaatatcattgtaggcattagggatatgtggaatagcatgactaacagtattaacaggtgatgaataataattaaaatcagtactgctagtcgtggtatgaaaacctggagaaactcccagggaaccggtctgaccggcccatggctcggtctgaccggtggtcagtggtgcggacagaccggccacaggaggtccgatctggccaaaatagggcacggtctgaccggctatggtaggcacggtatgaccggcataggatgcggttagactggtgtcatgaccggtcataccgttagctaggttttgcatatagccgattcctgtgtaatcggctgtataatcacccattgaacaccccccctagcattataagcatattgtataggagcaaaactagaagtagcatatgcatgtacacaatgattattaacgttttgaatagcaaaggacgggttgggcgaatcgaaggtgaaaaaggtaaagaaggtgtgggtgaggaaagaagctaaagctccggaggttgttactatcaaggaaaagtctcaagatgttcaagtacctaccggagatgcggcaaaaattatacaagtggagaagactgaggccggcaccgttactgtcaacattggcggtctaaccgagacagctggccggtctaaccgccagtctacggccggtctgaccgatcctcctgccggtatgaccgacggcttgcagccggtctgaccgggcccagaggccgatcagaccgaggggcattaaaggtgagcgggaaaattgagagcaacacaggagcttctacatcgaccaaaaatattaagaatcattgtttagctcctggaaaacaaccatagccgaagtggataccttccggcttatctcgctctcaaaagaggaggctacagcgtcttcgagccataggtcaaaagaaaaaagaggccgaagatgtaaagaacaaaacatgcaataatttagagcctcgaatgacacctaagcgagtgtggagacctaaagaagtaaaagttaaaagatcggtgatttcacggagtagcgatggattcaattcgatgagacaagaatcatcggtcattagagataagtctccttcacatgatgctatggatgttggtgcggtgttcgtcttgccttcgaaatcctgcaatcaagaaagctgactttgcttgggggcaagacattaatatgctcgtgaagaaaccaagagaagatgaacggcgatggatacaacatcacatctttgagccgccgtttgttggatgctaaggcaaggtatgggtttattgtgttcatcatcatattatatgcctatgccatgttagaacattgcttgatatttagcacatgtgtgttttgcttatcaaatccatattatacataaatgttgcaaatgccagttctaagtagtggaattggtagtttggcatataatttgtttcaagtatgatttggctcatgagtctttaatatttatttaaagccaaatcgtatgtgtttttatggatcaccatataagatatagatatcatatgtattgcaccatgaaagttttgcttattagtaattcggctaatgtcaatggtcaatgtgatgatttgttctagagttattttatttcagaacattggcattgttaatattttgcatacatgctcaagccgattacttacatttgtagtttattggaatctatgcatgtgatacatatgactttggtgattcattattgatcatacttcaattggctaagtgttttgatgccatgatgattattgtttcaaaagccatttgaattagtattcatctagacatgttagttggatgttatagtttttcatatgtctagagagaaggaattttggtccaataatttgatacaccaagcatctggctattatgtgaagaaaaattatataccaaaggccgatgcttgattttaaaagtttggacgaaattggcaaagtcatagaccaggggcggtctgaccggcattgcacggccggtctgaccggtggtaccggcggtctgaccggctctgcatggccggtctgtccgggcagacagggaggtctaaccggcattgcgtgtccggtctgaccgatctcgggcagagagctgggggcacgttataattgatttaaagaccgaattaattgtgaattcagacatttgtgcccataagtcagatagattggagaatccctttgaaaagaatatttgaaagatcctagtcttgggattgatcggaagattcggcggcaagcgctcaaatattatatcgccgaaaaataaatggagtattaattggataatgatcaatctgaagttgctaggagagtagtacatgaagggatttgtgaaattcatcaatcggcccgtaagataaattggttgcttaggagagtggggtttcattggccaaaaataattgatgattgtttcaaatgttatagagggagtgaagcttgttaacggattggcaatgttcagttagcgcctaccgctgtgttgaatcctatcattaaactatggccgttccgaggttgggctttagatttcattggtcaaatttattcttcgtcatcaaaagggtattggttcgtactagttgtaatggattacttcactaagtgggccgaagccgtgccactcgagaatattacttgtacggaggaggtaattgactttattttgaaacatattgttcatagattcggtattcctcaaacgttaaaggagcttctttatgtccaaggaaatgagaagttttgccgaatcttatgatattaagttgttgagttcttctctttactacgctcaggctaatggataagccaagtcgagtaataaaacattattgaaattgccgttttgccagttgaggtaaatcttgtctctcttcggtatttcaagcaagacgacttgtctgttgaaaattacaagaccttgatgggaagcaattttgaagacgtcatcgacaagcgtttgaagactttgaaggagatgaagacacttcaagatggtattttcagagagcaattaatgagagatagcttgaagaaatacttaccgagcatttggtaagatgcttaggaagtcctatggccggtaattggattatcgccctgagataacatgttctatgcttttaggttcacgtatgttcaccaaaaaggcagggggcatgtgtttacacccaaatttggcacctatgaacgaaatagggaaaattgccaaagtttggaaagtgccgggtttccttcactagggccggtcagaccacaggtatgtgggcggtctgaccggctagtaggaccggtttgaccgcaggtatgtgggcagtcagaccggcagggtccgagtccgagtctgttttcgtcgggtctcgggtttccttgttcggaaaggcatgtttcgtgtttcctttggtttgtatcccgagttgggcatggagaagggcctgtagagggcaagaccaacccttatttaagggacaagtccggttcattgtaaaacccccgaatacaatctacttgaatttttcttttactatgttttctatttctattttaccctagtttagtccatctttatcggtttgcgccgtaaaccgtccgccgccgctgcgagagtgcgacacctctttgtaggtttgtcatgaaaaccttccgttttgcccacgagacaggtagttatcctcatattgatctaaatcggcctagagactgattttgatctctaaatcggctccgttaaccggtttagctatttttctacaaaacctatcttgatttggccctttggctacatcgaggtggttggcgactataagatcatcgcaaggcgtttagatgctacaatcgtgcttgtcgacttgtcacaaaaagttaccaacaaagtgcttcggttgctgctgctgcgacttatttgataattgtaactaatcacgattaacatgatcgagccgtgccgtcaaaagcgaaacaatgaatccattggctggctggttgcttagttgaaccgtaacagtcagatgttatacgggccgattagacccataaggtccatagtttgtttcctttctcaattaatttcacgggtgcacagagattaggcccataaggtccatagcttgtttcctttcttaattaattcgtgcacataaccaagcaaaatattccatggcgggtgttgcagatctgctgcttggagtgccacatatctgatacagagagagcttcttggcagtgtgaagatctggaggtgcttgaaaatgctgaaaaaaaaaagcatgggaaagatccacgtgcaatgtacagtctcagccttttataccaagaaattggtgaaattagaggctggataggaattgaggagttggcttcttttagctcgaatactatctgctcagacacagtttgctgatgctaaaaccattattgatgcggctctcgatcagactgggaaatggagtcaaggagatttattgcgaaccaaacccagaactcaaggctgcacagggctaactcagggactgctgtcgagacatacaccaaacttctcgctgtcattcaactcagaaccaaaagtctcggtgctgggatcttcttggcaaaggtgctttaaaaattctattttgaaattcatcagagataatcaagtttcttgcacaatatcaattactcttacactaatagctcttgaaactctactgtttctgtttcattagttatctggtagcattttctaccagctgaacacacaatattctacgttcattttaattcccattttcatggcaagagaataattcctttgatgtaacctacctgatctcctttctgaaagcatattatctgtttaaaatgtaatcccgaacgatcacaattaagaaatcacatctcattttttcaaccagcaaacattgcccctatcaataaattgcatgatccacactttttatcagtaaaatcaactacagaaatcacaaatgccagcaacacttctgcaggaagacaacagagcatgttcaaccagtgccattggcaatgataaggaagcttcttgcgttgctccttccagtttacattcacatcaaggaaccaaacagctggtaatcagagtagtaaaacacagtactggctcatggtttatctgaatgatggagtataaagtaagtatagtgcactactcgtatacaatagcaattaatatttagcagaaaaagagtgtgcatataggtaaagaaggtatttctttgaattgtttaacaaattggtcaggaagacgtgtgaagaacagatcaaatgcattgtttcttccagggaattgattaagtcagatatgctgtagtaggagactttccctcctggtaataaccactctttccatgtattttagaaaatcgtggccatgtacacctatttgctctaaggttcatcaagataaaatgaagatcatcgtagcttgagcctgctgtacgcaagggccaggtgtttttccatagcagaacaaatgtttattgcttaaacaaataacagtgaaaattattcaaaggaaatgattatcggtcagtctagaatatcggaattaccacacaagcaattcacttgtcaatgtcaaaatttgaccagatgtattgcttataatatcaatttccattatgtcgaataatacactgttcatccaaggtgtacatatataacaataatgagatgagttggccttaccttgatgcaatgtagaagaatcgttcacttccaattggcacgttattaaatcagcagcactttttttggaaagctcgcaaagtggggctgttcacacgacgaaaaagtgaccgaagatactttttattagtacatatatatattacaactcaagctaaagcggatgctaaaagcaaaatattggatccttttaggtacttacctacatcactattggtagcagacttatttaaaacatgactttcctccttcttccgttttcttctctcacggtcattcttgttcctctcatcctttttctcctgggtcaatgatgcgtactagtttctagcacgctttcttacaactttagcatgggtaaggttagtaacatctccatgcgaacctgtgcacatgggcaaattgctgggtgtactgaaggacgtatcgcggtcatccgcaaatggttgactattaggcgtaactatacgatgcataactttatggcccacatcaaaagaatatattcagtgttggttgatacagatggatatatcaaattaaattaggaaacacacattctgatgaagcataccatttgaagcagttggagtgttttgttcagaggtgtcacagttatctcccctagcccgcgtatttctcgctccggaagcaagagggactaagaaaggaacacatgtgtgaaattagcatgcaaaaaaactttattgtactttgaaataaaaaacattaaaatttgctgcacattaaccagttaaaagaacatgatcagaaagaaaccagctgatgctttgagtctagcccacatcacacacatatagtctgcacattggtgttggtggatatagatggagattgaattaaattattagaaatcaaacaatctgataagtataccatttgaagcagttggagtgttttctttagagccgtgacactcttcgtcgtttcttcgaacaacacataacgacttggctctacccttgccccgtctattagtgaaaccgagaccacttgtatttgttatatcagcaagagggtctaagaaaggaacacatggtcgaaattagcacacaaagaatttttgcatatggctaaataagatgcacatagctaagctaagaaactcaaacatgatgttgtacttgatggtgcagcgcccccaacaaactctttcattttagtattccccaaaatctagttccgaaaccaatcattatggaaaaactaaaagcttcagatcccatagcaaagttaagaagggagcggtgaagaaattggtcgtaccttcaattcagggaatgagattgtgagggatagaagcagctcttcgcagtgatacgtgacgaggtgtgggcagtgctaccgtctttgtggatcccgcctactttatggtggtaagtaaattcttaagatgtttcaaaacaaatttaacaattcaacatggaattaatctagcgtcaatcgcaagaatcacttcaaaatatatggatgatactggtatcaccatgagtcatgacagctgatctgattcaaaacagaaaaacaatgtgagttggaatcctatattcctatatatatctatatagttgatccacactaagtgcaattaatttgattttcctgtgatatggttgctccacgtcactaagattgctttggatcgttcgattaaaattgcacggcaggagattaggtcgtttctgattcctccgttggtggaaaacacaacggatgacatgcagctccctggcttttctttctcggtcttccattctgatcgctccactaacccctgtaaccgatgaaaataatgcaacctcctagcgccctgacagttgaacagcttcgttctcgcctccatgctaattagcgtgccacaaatcaaaggaaaccgaagcaggcagctgagaaggccaccttaataacagccctgctttaacagctacatattcagtagctccccagggacagcttgaattttggggtccatctttctacttctgtagtatagcgcgctcttcctttcaacatctgcccaatttgctcgagagcttcagtttgcttcgtcatcgacggtgttagacaataattagaactcaattaatcacacgttattatcacctcgttttgtgtgaaacacttaatctttatcttcatcttaatctttaggagattcaaacaccaccataaggttctctcactccttcctgatagcagattatttttttatcagctgattttttttgtcccccacaaggtttagtatttttttcccctaggaagactctcctcttttacgagattatgcattcttacttctcattggattttcaatacatgtattttccttaatagccaccgagtttacaatacccttgctctcaatctttctactttatttgtttatcggcaatgagaattatgttgtcttttctcagattatggtactgtggttcgagaacatttgaagaatccactctgtttcctttttatagcacaatatcagttattatattcattcaatgatgtgatttgatcaaccatgataacaatctgcaacagtactacaaaggtactccttattattcagttcagaactattaacccgcttttatgttctcatgaggtattgttacttttcttgagtatagtgtacaagtatatgtgtataaactttttatgctttttggatcagcatttccttggttaccgattcaatgcatcaatcaaaagctgcataatttatttagttcatcaaaaagtaactttgcagggataatttcatctgttcacctgaaaaaaagtgcgcagcagtacagattgaggtaaaatcaatgtttcgtaatggtttcattcgttgaatgtcgcttcattttgctaaaaaaaaacgaacatatatgatttgctctatgtttgatataaaaaaaatttatgttgcctcatttttacagtttgcagctatttgtttctgtttctagggcatttagcaatgtcacatcatctatacaccagcttgctacagcctacgttatctttggctgatgtacctaaacttaagttaactattttagaaatgtatcggtgatccgcatgtttcagcaaataaaacctgataagcacttgctgaacatctttatatttccttccaagtgttttcagttaacagttgccttagttccctatcttacatatatatatatttatcgacaacattccacagcaacacgcactactacggaaatcatctttcgtggcggtcatttttggtttttcctagcggaaattgcagccgccacaaagcaaagttcagagaaaatatcaatcttcgctagcggttatcggccgccagcgataatcaattttcgctagcggctgtattataccggccgtcagcaataatcgattttcgccggcggctgtgttataccggctgccagcgataatcgattttcgctggcggctgtcttataccggagggagtacaacgttaatttgtaaacccctaattttttagatggtatacgtacatggaatcagtgttcgatctgcatccgtcgaagtgcaagacaataattatattttgtgaatttgccatgtgtgacttatcgatattttccaggcttcttacgaggctatttcagttcaaaatgtactggagtagttattattagcttaatcatgcggatggtgccatgaggctgtacgtctgttgatgcatttttagatttggatcgatctggatgccgcagagtcgaatccagcgtctgctcttgcgtttttagatgccatttttatttcacagcagacaaggctgcactcacagttttgttagttattcaccttcagaaacccaggcatgatcattacatgccctctcactatatatatatatatatatgcacctcttacgattttgagagagaggatacaattctatattttgatatgtcattttattttgatttatcgacaaaatgagaatttggagagaacctaattcaaatctattgacggattatacacgaacacttaataatatattaaaaaataatgatttttatacatggtaggcctctaatgtggataacaactttactccatgtattgatctgtcatctttgtcatctatgacacccagttaacaagctttggcagctcagtttgaatcttggcaccctacttttttccatataatcttttaatgtggcgtaagagatgatgcagcaaattgattttatcttatnnnnnnnnnnnnnnnnnnnnnnnnncaaattgaatgatgcggcaaattgattttatctgactcaatgcaccaatttaaatgtaattctcatgtatgcagataagcaggaggcaaatcaatctagattgatatcacatgcatgaaggttaaggccttgtttgttttagcttaatattattgcaatctagattattaaatcagattactctaatctgaattataataagctgagctgcgagctgtgtgtttctctggattattggagaatctaaagggattattgaagacatctaagggcagtggatctgtagccaccgtctgaaaaagctcctccagcagagattattagattatactggattatagattatagtaatctatttgtttatttcagcttactcctgataatccagattataataattctaagctgaatcaagtaggccctaaagcatcaaagatttttcatgcaaattagagagtccaagtcccaaacgtcaatttaaattggaactgaaacggagtactagacaagcctgtggaccgggcctcccttctaattccctcgtaaaatcgtacgcacgcacactttctctcccaattcccatctgcgcgggctgctgcgaattgaagcgagctaggacatgggagggagaggacgccacacgcacgcctgcaaagcgcaaggccggccctgggcctaggccggttgtgcgaccgcctagggcccaggccggtggggggcccatcaatcacaccccctccccacaacagcccagcccagcggctgcggcagaaacccagtgtgctgaacctgcgggctacggcctgctatttcgcgcaagcgcaagcccaggagggagagggagcgctttattttccgttttttttaactactttgctatatcttactcgaaagattttttcttatctcttactcgattttctcacttgtgtattttcttgtaagttacggtgtaatttatgaaacttacattataacttttgtaagttaccgtgtaatttttaaatcttcgcatgtaagttttcaaatttgtattggatttggtttttttttcttgaagatatggtaatttagtgctcattatggtgtttcttagttgctttttgtcttttactgtgtctatcagattttaatctaaagattaaaaatatgtgtgatacgattataaaaatttttcgaaagatgcaaaggtgctccctgtttataattgcgacttctttggcgtcttcgttttctttgtttgttttttttttctttccgcaaatcacgacgtactccgcctctggccctccgcgaccacgagcgactcgctgactcccggccaccgccagtcacgcgtcgcgcgcgcggccgcgccaacgacgtacgccgcacggccgatcgacgtacgccggatcgccggactcgcctctctcacgatctcggcgtctctcctggacctctcctgacagtggacgccgacgcccggggctacaggaggagggcaaactgaggttaaagacttcttgtttgttcttgtgttatttcttcaatttttcgaagaaatttaggttagcgacttattacttatggacttaggattttctcgcttgtatgattatatgatttttcgatttttccactctaaaagttaggttatagagtatatatattagaagtaaaaaaaatagcatcaccccttaagggcctatagtgtcgagttcgtctagtgccttccaaatgtcaagaccggccctagcaaagcggaaacggttttctggttagggttcgcgccgcccccatctatctttgcatgttgctctttctaatcatcaatttcgaattcctttataattaatcaatttcgaattcctttataattaatcctgatcgagagaacattatctctttttctcgtaatgtaatgcagcagaagtttcgtgaacattatctatttttcttgttgtaatgcagcaaaaatttcgtttctccattggactagcattaattaatttttgcattccattgccatccaaacttgatgcagattccacggaattttgctattatgggtcgcaaagaggcgaccgacggcggcagatttttctacgactggcagagaggcgaccgacggatggttgttgtgacgagggccacgaagaggaggttaaaggaggaatcctgcgacccggaactgagaaagatgaggagggtggaggaactgaggaggttgaggaggctggaggaggaatccggtgacccgaggctaggagaagacctgataagccgcctcccagacgatgtcctcaggggcatcatcactctccttcctaccaaggatggcaccagcacccaggtcctctcatgacggtggcgcccgccgcccgctctggtgctccgtgcctctcaatcttgaggcttaggtcaatggcgagacaatggggaaggatgtggccgccatccatgacacgcttcgagcccacgagggccatgtccgtcgactctccctcatctggagagatggccacgaccgttgctttcctgtcgtcgaatccatccttggatcccccgagcttgaccgcctctaggaatttgaactgttctatgataatgtttgctctcaaaatcctccagttccactatctgtactccgtatgtctgctgctctatgtgttctcaggattcgttcaacgcgtgatggtgcacttcagtttcccatggagactgcttgcatgcttgatttcccacacctcaaagcgctcaccctatccaatgtcaacatcatggatagcgctctccatggtcttctttcgcgatgccctgtcttggagagcttggtgttggttgggaacaggtggtgtcgttgtctccatattagctccttgacacttcagagccttggtgtgtcagatggtttttcctcggtagaggggaagctggagaaagtcactattgtggatgccccactcctagaaaggcttattattccacgtgacaaatggcaggatgactttgttgttcgggttactcaggcaccgaaattggaggcattgggctatctaagcgatggaatttctagacttgagattgggaccatggttgtccaggtagcaacatgcacatattccataggcatttatatttctcgatttatttttttcttcatgctcctcgctcatacatttcatttgccatgtctatttcagaaactggtgcctgttagtctctccaatgtggtgcgcactgtaaagattttggccattaacaccaatttttatccgaatgttgttattgactttataaaatgctttccatgtgtggagaagctatacgtcaaggtaggaattttctctttattaaaataagtgagtaaacacccattttgttctattgtgcgcgtcttggcattggccatcttcttggatcgataggcatatcatgtttctatcaactcttaatttttttccttggcaggtgcgctattatgcgtacttcaataatgtacaacaaaatgtttcacttgagtgccttgatctacacctcaagatggtggaatttattaactatcaaggaaatgtggaagatttgaacttcattaggttctttgtgttaaatgctctagtgctagaatgtatgaagcttgtaacccgtcgtaacaaatgcgacgtgaaatggattgaagaacaacatcagaagctacagctttatagtggagcttcacggagagttacatttgatttccaagctgattatgagggagatagtttggtacacatgaagcacatcagtgatttgactacaaatgatccatttgatagatcattctgtagatgccgtgatgaggaaagatgaattcctttgaagctgttgatcagtcatatatatactttggtaagtatcaagaacatgttagtttacacgcctcaaaatccttttttgttttggcatattttgttgcaagcctaggatatttatttttccaaagaagttgaatgacatccctattctgttttttttttcattctttctgatttgctatgactgtctgttcctcacctattctacacaaaacaaaattatggtggttttgctactaattagccaactgccggttagatacatactacattaattttcacctctaatgaatacgagcaagttgtaagaaaccatgttagcaaaaaaaattgtatgttgaagaaataatgaatatttactttgaattggttgttttatggaacattaactaactccctagtcgaacggcaataagcacgattggagattctgaatatcaaatcccttatagctaggcattaacattgttatttttatatttttcattttggtgccacatggggtttcagtgagacttgagttttaagttgttaattaagctattggtccgtaagctgagacaccagtataggggtttaaaaaaagcagatgctcacttattatccaaaattccttcatgacaaggagctgccttgttctttgttcttttacaacgaagaagttttttttcccctgcatgataatggcagcagaagtgttctgtctgctttaccaccgtgattcaagaaaggaatcctctcaattatactatctatgtgtgtatatatatatatagtggtaataataagtttgctaattgtttttgtttggataaaaaaatagttttctaccattacacctgttttttttttgtttttgctatgtatatatggtacttgaaagaaaaatctgattgcagtgttctgtttgcaggtgtatgcacatattataatgctgctactagatggaaaggagtgctactgctgctgctgctgctacagagacagccgattgttcttatgaattctgttaggcccaactatctactatttttgacgtcttttggatagttcagtagagatttaatcatttaagttatgtcattcaatgcactctgtttataaattttgttttgtctttcgtctcaaatcctgtggccatgatacgactgaggtttaatttgagcggaataaccacttgatgatcggtagtgggtaaatttaagttgcttgtatgcaagtgtagtatgaatttgatgggttagcgcttcaaatgctatcagttgtaagcttgcttggcacggtgggattacgctgtggtgagtactaaattatgtgctggacaggtcaagatcccatctagagaaatgaatttggtgagtactaaatttagtactttttaagctggacaggtcaagatcccgtctagagaaatgaaatttctgcctaaaaaaatgaaagtattcaacaattcagttcaatttacaaacagtacaattttataccccgtttgtaaagaaaaaccatgtgtcttgaaaactaggagtgaaataaaaatacaattaactgcacaaccttaccaaattttcataattttggagctagtgcattgcccttcttttagtcatcttggcttttaggtttggaccggtcgatgcatgcaactcaaaaagctaaaagagccataggtctctagttcaaatcctaggtagtgcacaaaataaaagttgcaacatacttatattccatgtctgaaatcaggggagcctccgcgtaaggggtgtgttagagtagaagtgaacgatcggtgtttgagtataagtgaaatgcactctacctgagggggtgttggagcataaatgaattgctggtgtttgagtataagtgtattgtccggctccctcatagtgtggtgccagctcgaggcaacggtgagaaaaaggaacctccagcactagtggcggtgcgacttgaagaagagaaaaagggaaaaggagataagagactggatgaaagaaaaaaataataaatgaaaagaaaatattccaagtggttctataatttgtcaatcggcataagagttagtgacaatgccacacccacgtctatgtggcatgccacatcaatgtcacattagcgtctaggaggggtcgtggtaaattaggatcaaaatgactcaatttaataagttttgagatcatatatccggtattttaagagtatgggatttatataacccacatacaaattttaaaaccgatcatgcgcttcaatataaatggaggtgtaatttactatgacaataaaatcgtgctgctcctatttgcttaatttgtcagccagcttgctgcatgccagggctggcaggaatagcgagaaaattatgtatgtgttagttaccgtctaattttgacaatttgaccctttgaaaaaactaattttataaatgaaccgtccccaaaacttatttcgaaaatgaccttttttttttcagcgccaaatcatgtggcgctgaacttagacaccttagcgccacgtcagctggcgctgaatgccgtgccacggcggatgggacgctaagtcagcgtgccaacatacattcagcgccaagctatttggcgctgaggtgtctaaattcagcgccacatgatttggcgttgagcaaaatggtcagttttgaaataagttttgatggcggtttatttgtaaaaatagtttttgcaaagggtcaaattgtcaaaatttgtgttagttacctctcacaacattttacttctattggatagttgttcaatcggacagcaatctttctggcacgccattttgtcatcacaccatttttcttctattaatggatagtagtttgatcacacaacaagctccctgtcatgccatatgtgattctcattctccctatatatgtcattacaaatataaaaggtgatccatgtttccatagatatgtcgttgtctattaattcagcaatgaaatgaatgagatattgaagtggcctacatatgtcattacaaatataaaaacatgtttccttatatatgccgctatctatcgattcagcaatgaaatgaatgagatattgaagtgagccaaagttatgttcatgttatactctaaagaactgtattcacaattcaacgcgtacatggaggagaacactcacttgtatgtttttatgcatgttctcaatccaacatgctggaaaaaactcatcgaacatgtcatgttatatagttttagataaaactagatcgagatccgacgatttacggtggataacagcggggaccaatgcataattaatagaactgtagctttttttttcaaaagtgatatctgacgtggtatccctaactctccagcaatccagcaatcccacggtgtttaagtaaacaaatatttcatccatatcccaaacattctattgatacctaagtaataccacaatattatttcttcttccaaaaataccacacgcatcaccatgtttatttttgtggacaaaattgccttcactgtctcccctcgagtgaatcagctacaaaattctcagatggacagtgagattgttgtcgtcccacgccgaaggtgacaacaaatttccacacaaagaatgtactacctctcgctcgtggacgatagtcgtgacgctggcaggatgtgcatcttgctccgcacctttacatggtgcgttgtactgcccaggtgaacatcaagcacatgtgttcgtgttcagcagtgacacattaatcagttggagagcagcaagacaactcacacacatcctcgtacattcacagcaagagctgttcttggctttagggaagaggtacaacatgacaggagaacacctcgatgcacttggggttgctacgccaatccgtgctagtcggctcccacggcggcaattgggagaactgccacggcgatcgcggtggcaatggttgaatcgaccaggggcaattttgtccatagaataatatttcctagttgtcagctaatttttgtggtattcttcgaaaagatgcttctaccttttggcatgcaatgaaggtggaaaaatcttgtggtattacttggtacctgtaaaatgtttgtggtatagatgaaatttccccatagttttatcatgtgtgtgcatatgctccatctgtatattataataggtgtcatcaaatcgtcgacaataacaaaggg

SEQ ID NO: 22629 - DNA, 4819 bp, Oryza sativa
ctgcagccctaatcttaagtttcctcaatcatgcccaaagaacactttaagagactggtatttggctcctctacggcatttaggactggcgtagcctcccgcgcaagctgacatgtcactgcacccacgttgggatccggtgggatttcgcgagcacccgtcggcctgtgtgttcatgtcattgttggttgtgttgcgaaagaaacctttatttcatcaataatttgtattaggcccctactctttagtttctacgttctgaattattacgaacagtccctttacaaaatgacatattctatacgaagaagcaaaaaataacataataggactgcgctcggaaaatgggaaattaagggcttgtttgcaaaaacttttatccttatcacccctcccatgaaacttcatgatctatgatttggctattgagatctgccaagattgtccccttctttttgtagttcttgcagtatatgaagaacccagattgtccttttccttttttcggttcttgcagtatactgagtctgtttgtgttatgaaggcctgactaagtgttaggttggacctaaattacgtaatatggttggtgagtcagaacaacgtagtggccttggtgtttggcagtgttgggttgtgctaactggcatatattttttatgacatgggcttcatttacaaaaagccttatgttttttttgtcatagcagtagcctcatggttgcttgcaatggcagtagcatactagcatgaggtatttcgtcgggcctctgcttcccatggaaaagaagtggcttcattatggccttctacactattaatcaaattgaggcattgcatatagcactatagttcttaccagaactatatatctccatgcttcagttaaatagaagaacaagcctcaattcttaacagtaccatgttaattctcatgcgttggttgctcctgcttcactgattgcccacaatgctgaaggcctgaagtggatgggaaagtggtgattgagaagattgaggacagtgagtgggaagtcggttacaatgcgatgaacaacaagtatgggcactcaattgaggcaggtgttatcgacccagctaagatgagaagatgcatgctctagatggtttcttgcagagtggaggtacaatgcatggtacaaacgccacatgttgtttgacccaacattcaaatacaaatgttaggtctatcatgcatgtttttttaaaccgagccagccttggctggtgttaagcctgggcaaaaactgtacagataccacaggtggtctagagagaggaaacaaaataaagagagagaggaagaaagcatatcatagtgaaaaggcctattctcctggcatcaatgcgatcatcccttttgctccatccattttccatgtggccgattcttccatggtcttgctcagtacttgctgatgtgtggactcttccgccccgaagactgggttgttgggctcggtccaaatttccaagaaaagtatagacactttatatgcatatagagtatagccagccaaattatcactgcattttgcttaatacctgtagaacagattattagcatttgcttttcgcaattctgagatgagataatcaggtactcacccccccccccccctcccctgcttttctatggcttcatcttagccatagaaaacaattgatggcatggatttagtcaaatccaccgggtggagttgtagccaactccaggagatctggactcccacagggacataaaaaagaataatataaaacaaatattacgagatattttagaccatgtatcgtagtattcggtattcggtagttttgtaattatgtactttaccaattcaattatgcaaatgctaggactaatacaaattgtaacttagcatttgcttcaatacatattctaaagttctctccgttaattagtatttttagcacttccatcaagctgcagttcaacattgccatggtaccctcgagcagttcagtgccctcttgtcttgtctccagaagcaccggcggcgccattgtatcgcaagactattccttcgccatatatacaccaagttgctggctacaccttcgtcgtgcttcatcgtgctccctgatggcttcttcaatggcacaggggttcggaacccagcccaatgccttgccatgatggtgggttcgattatgctatcaaaatcaacatctatgtgttgttctaagtgtgggtttccgtgatggaaattagactgaatgtatgctgttggtttggatttgattcgatctgttctagaatgactcacgatttaaggccatcccaccctaaaattttacacttgaacgttcaaatacttgcatgaagtattaaatataagcttaaaaaataactaattgcacagattgcgactaatttgcgagataaatcttttaagcctaatttgctctatgatttgacaatgtgacggattaattaggcttaataagttcatctcacgaattactgttggattctgtaattaatctttttattagtatccgattaccccatgcgacaccctgtataatacccgatatgacacggtaaaactttagactctgaatctaaacaccccctagatggaaaaagatatgtttgcccttgtgctgtcaggctgctcgatctagagctgattgcagtctaagttgacggcaaaggagagagaagtgacggaaatggaagaaactttaggtgctattaaagtaaactagtaatttttagtgttataaatctaaaaacgtaaactttcgatgctatacaaccaatcttcccaaacttaaatccctcgtgaactatccaaaagacgcctaagatagtacatgttgggcctaaagaatttaaaagaacactcgggtgtctcagtagtagcaacagtcctttccacctatcaacatcaatatatccgtacacctgcaactgcaagtgcaaccctgcaatcagatttttcttcaagcacggtttctaggctgaactccatcatcagatcgcatatccaaggtggtattgatatggtactgatatgtgatgatttgcagataaattggtcttgtcgaagataaattggcctgcttatagactgcaattcaatattagggaaattcctgagatgcttcacatatacatgatccaaaatccaggttaagaaatccaggagaattaagaaaaaaaaatacaaattggatcagtaaactgaacaaatttatgaagaagacaagagacacatatgcatcgcattcatcacgactcaacactgcctaatcccatcatatcaagaagtttataattttcgttgatccagataggatttaaagcactaagccgtcaaagtcatacattagtatgaatttcagacaaaagacaatataaacagagtacattaatggcataacttaaatccctcgtgaactaaccaagagacgccaaatatagtaaacgtttgggtctaacagaattcaaaagaacactagggtgtctcagtatcagcaacagtcctttccaccttagcaacatcaatatatgcatacacctgcaactgcaagtagaacactgcaatcagatttttatttcaagtaccatacatagcaaaaataaagggggtataatggtagaaaactatgcgtatccaagcaggacaatttgcaatctaactaactgctgcatacataaatagtacaactgagaggattcatttcttaaattgcggtgttaatgcatacagaacacttctgttgcagttagtatgtggcaaggaaagctgcttcgtagtaaaagaaacacagaacaaggcagctcttagatctccttatcatggaggaatttaggataataagtgggcatatcttaaacccaacttactgaccattaccttaacaacgtaaaagtgaagtctcactaaaaccccatgtggcacaaaaaacaaaaaacataaaaacacaatgttgatgtcgggatataatagattcgatcaatactcagaatctcctttgatgcttattactgctgttggactagggagttaattaatgttccataaaaaaacgacatttaaagtaaatatccatttttttcatgagtattcatatttttcttactaacatagtttcttacaacttgttcatagccatttgaggtgaaaatgtagtacgtatcaaactggcacttgtcttagtacatgaacatgttcaacataaaaaataatattctgacagctgtaaaccagtgatgaaaaacttcgaactgaacctaaattgaaattgtgagactgcatggatgccaaaatgaggtacaaaaaacaagaataatgtagctcagagtggaatgaataacacagtatcaagaccaacatagtctagttttgtgtacaataagtgaggaagaacacatcgtcataccaaacagaaagagtaaaaatactagaatagatcaatgcaatgcaacttctttggcaaaatacatattccattcttgcaacaaaatatgccaaaataagatatttcaggcatgtaaactaaacatgcacttgatacttaccaaagtatatgactgataaacagcttcaaatgaactaatatatttcctcatcacggcatctacaaaatgatctatcaaagggatcatctgtagtcaaatcactgatgtgcttcatgtgtaccaaactatccaccccataatcagcctgaaaatcaaatgtaactcttcgtgaagctctgccataaagctgtagcttctgattttgtttttcaatccattttgcttcacatttgtcacgacgggcta

SEQ ID NO: 22630 - DNA, 543 bp, Oryza sativa
ccaccatttcggcgcggagaggagaccgcttcacccgccgatctgcgagaaaccctctccgcctcgcctcctccacctcccaatcttaacccaacctccccccttcctctcgcgtcgaccccttgctttgctcctccttcaaccttcttctttcttggagtttcttgagagagagagagagagagagagagagagagagagagagagaggggggagcggtcgcaggaggaggaggacggcggcgtctgctgcgaccgacggggagcggcgaggatgagcgcgtccaggttcataaagtgcgtcaccgtcggggacggcgccgtcggcaagacctgcatgctcatctcctacacctccaacaccttccccactgtgcgtattcttcttcttcttcttcttcttcttcctccaaacatttccttttttcttcttcttctttcttttgcttcttctttttttaattatttttgaaaaaaaatacttgtgtgctcggaggcttggagctaggattatggttcttgatctggatttgggcccaaattg

SEQ ID NO: 22631 - DNA, 849 bp, Oryza sativa
ttttcttgggcagactttctcaatccaggacatgatcagtatgtgtaccgccatccaaacgggtgagctcccaagaaatcaaaattagtcttccttagaaaaaaaaatgttagaatgggtttgttgatgaacttttcatattcacaaggtggatccaaagcaggtcataattcactgtggtgtgttttccccaatgagattatatgtaggcaataggcaactatgtctagtgcattcttaaggaatatcatcataccattggtttatctttttgaggcatgcttcaattttgtggtagttaattattttcatatgtagcttgagctgaaacgtgccactccatccttcgttttaattaccgcgtctatgatgaagctgaactttttttttctcgctggtttcttctgtttctcaaaagatcagattgtgtgtggttggtttagcttcagcccatattgcattgaaagaggaaggggggataactgccgttgatttcaatgttgggaagtcagaccgcagtgagatgaaagtcacaggaaaacgcaaaagggtaattggatgacttgaactcttgaagcatgtttttatcattggttgacttattggaactatggaagcatgactcggttcttattttactttacagaatgcacaacatttgcaagaaaattcagcgctgtgtaaagtctgcacaagtagtaattcttttgtagtgaggttggtccactagatctcccaatcaataattgataatgccattctatttttgcactgagttgttgtttatgctaaactcatgtaggtgttgtgtgaaaagatcacctttggagatcaatgatagattgatca

SEQ ID NO: 22632 - DNA, 15034 bp, Oryza sativa
caagatgctaataggccagtagcaattgatgcaacttaataaaagcttccttctatgtaaaagaaagaaattgatgcaactcatgttacattttactttagtctgaatcaatatatctgaaattttgaacagaacatactccctcatttcaattgtccaccaaatgcaactcaaactcgaaatgcttggcatgctggcaaacaaattatgttttattaagttagtaactgttgaagtattcttgtagacattatacaatttaggagcaaggaagtttgcagtgatcaatgtgccattactcgggtgctgcccatatttgagaagtcagaacccgaccggagagtgcttcgaaccgctaaaccagttggccaagagactgaacggcgaaatccgggacctgttccgtgacctcagctccgaaatgcagggaatgaagtactccattgccagctcctatgaacttatctccagcctaattgaaaatccacaagctgctggtaagttacctcagtttaagcaaagagtaatatgacctggaactcacacctcaaacattgtcacagttctacttagcatgaattgaattgtaaccgtctacttttcagctatatctgagatctcacagacttgctgattgatttcagggtttgtagaggtgaagagtgcatgctgtggtggtggtggcaagttcaacgccgaggaagcctgtacccccagctccagctgctgcgctgaccgtagcagatatctcttctgggatctcctccaccctacccaggccacctccaagattgtaggccttgccttctatgacggggcagcacggtttgtcagtcccataaccttcaagcagctggccgacgcatagcatttcggcatcagaactagaacttaggattcactagaccaagacaatgcttgtatcaatctacagcatggcaaagatgctgaactatccaaagaccaaactatctgaaaaacctacataagagaggtgcttctcttatgctttaccctttgagaactgcagaaatggtgacagaacctgtcctagttttctcatgagtgtaagtaaaaatggttgctggttgtccccattaggtgattgatctgtgctctcctcatccaccggagagctccagtcagtggccagccattgcttcaccctgtcgcgcttggcgacaagccggcctttgttcctcatggacagcctcagggggctccccatcctgctcagaacctcctgagccagctccctcaccttgggctcacctctgacatcgctgtgcttgccaatgccacacaccactgacacctccaatggcaatgcgcggcgcgccttcatcgcatccacccactgcaaaatcaaaacataggctgcaattgtgctgaatccatggaggttcagcttcacctccgactccgaccaatccatcgccttgtcgagcaccgaagaggatgtcaggagctcctgcaccagctcagcttctgctggccattgagatgcagacctgagcttcttgaccaactcagccgttgacaatggcagtgattcccccaattcttgagccatcgaagctactgttgggcatgagttgagcacaaagttgaaggccttcgtcgtcggcgcaatccgcagcttcctcatcctcctcagccatgccagcatcctggaatggtcacggcaggaggtgtagcacgagagcacgatgttcgccgcgccggtgccgaggcggatgccggcgtcggacatggacgagatcaccctctccatctcggccatggatcccgccttgccgtagcacttcgccaccaatccgaactggaacgcctccggctggtgcccccgagacgccatctccctcagcgccgcctccgcctcgccggcgaggcccatcaggcacagagattttatcatcgccgtgtaggtcttcttcccggacagcggcggcgaggctcgcagctgggagtagaaatccatcgcccggtctcgcatcccgcgggaggagaaggccgccatgaggtcgcagtagaagagggacacctcctcggaggaggaggaggtggagtggaggcgcgagatggagtcggagatgagggatcttgattcctccgcgctgccattgctctcgagcagcgcggcgacggcggcggcgtggatggagctccacttgaaccaccgcgcctgggtgaccacctcgtagaactgcagcgagaaatcaaatcccaccccaaattcgtgacgcgaaatcggcaagaaatcacaagaataatttgggacgcgctcacgcacgccgcacgcgcaccgggatggcgaaggggtcggagtccatgagcaggcgggagagcgcggcgagggcggcgcgctccgacttggaggcgacgtagctgcggatgacgcgctccgccgcgccgggcgtcaccgtgcgctccagctccgacatgagccgccgctcgctccgccagctcgagccacctcccgccgccgcccgccgcagggacgccaccgccacgttcaccctcctccggcccctccccccggccgccggcgatggcgccggggtcgagagcgacgccgccaccgccaccgccatggctggctgctgcgctgctcgcgagcgacgcggttggcgcgtcacaagatgagacgtcttatcaccaacgggtacacatcgcaaggccggcccagtaaaacaattcagcccaaataggcccaccacatttggattagcgacccaactggacccaccagtcaagcaagcttcatgcatggctgatggggcccagttcgttagcaactgatgcagttcttgtcacgtttgactttattctgaaccaaaagtttatctgaaaaatgtgagctcattatgtataccctcattttgaaattgtgaacaaatcatacaccctataccctcattttgaaattgtgaacaaatcatacatcctcattttaatccacgagatgcaaaagatgcagtcgtgcaactcaaaactgatcactatgatgatggaatgccaaaaatttccaaacatgtttttagcaagggaacaattatttgcatgtattactgtgctcgaatttaatgattaatcgtgaagttttcagtttttcggcagaagatcaccaacttttgtgtaacacgctccactttcaacaagatgtcaaaactaactggtagaatataatgcagatatttttttaaaaaatataatgtatagaaatctggcctctacgtccacaagccacatccaaaggttatacgaatatttagattttaagtctcgtaacgaaacgcagataaccttggaaaatataggcatacactacaagattttcatctacaacataggaggagaaaatcggaattcagacatgaacaagaaaacaggatcaatttgtacaactcttttcagcacattcctttttctatacttgttctcattaatgcaacaaaactagaacaagaaaaacaacagcaaaagaaaccaaaaagctgaaaaaaaaactaaataagcaaaaaaaacaaagctgcaacaacgtaagaaatactttttttttaatcactgtacaccacaatgcgcttccctcttgttgtgggatgctacaattgaatgatgcaccaacattgtataagctactttcagtggtttctcttcaatgctgaaagaaatcctgcctttgatttctggcgaccctcggtatcagctctcacctgtttttttaaatcaggatattaaaacaaaatttaatatatatttttctggagcatgatattgaacatgaaacaaactaaaatttcattgagcaaatagtttctgtttttgtaaaagaacaaaatcttgagaatttttaagaaatgcatgataaattgatgagtcgaggtgcattagaactgacctctttggggagtctctgaagaatctccagtatctgggagaagtcaggcctttcagcaggatctctatgccagcatttctgaagcagctcagacagcttggggtgcgtatctttcggaattgttggtctaaggccctgcagaaaatgatcaaaatacacatgagtgaaccttaattttgtgtagaattgttgtaaataactagcagctctctgctacatatgtacaagttaaaatgctgtcttgcaactcttttagataccaaaggcaatctcctatcttaggccttttatccaaaaaaaaggccatactttatgaaatcaagcaggtataccgtatatatgcatgtatatgaggatatagataaatatgccaataaatttccatgaaatttctaggtatgtacagtgtctctaaaggacctatattctcttgaaaatacttgtcttttcaaactactcctacttggcaatcacggcaactatttcatttacaatcaaggttcataatcattttcatatgcaattcatagcactttctgctaatggtaagaatctatgatgttaagcagatattatatgtgaccctacaattgagggagctacaatgacgtgacttgacggaagtttgttctacttcatctcattcccatgagcatggtaacctgaaaacctaacttgcacctctaatcaggtgagtgattagtaggatggacacaaagggaggcaatcgcatattaaaagaatggtttcttgaaagaacaaggatgccatcattttttaaagactgcttctcgaaactactgtatccttagagcatcacacatgtcccccacttgaactaaagaaatccagcacccacaggacatagctatacaatgggtttcatcaacattttaaatttttgagctaaatactacggataccacgcatgtaactacagaatttaagcagggatgcttgcttaccttctgaacaacacctatggctgcttgtagtggtgttaggtactcatagggtatctgagaaattgaatagttaggtgagtttagttttatatgtaattaatataagttggacaaagaaagaaagaaattgactttttcctggagcaatttgtagttaccttgccagttagcagctcccatagaacaataccaaagctaaaaacatctgctttatgatcatagggcttatgttcaatgacctgtagttacaatagaatacaaatgttagaataaacaaaaatgctgttgttattcttatggaatgagcgtatgtataacaggcacctcaggtgccatccaacgataagttccagtctctgcagtcatcactccggattgatctttgacacgtgcaacaccaaaatctgcaacctttacgacctgaaaaatatgatcgctctcatttagaagttcaatgacaggagcaaatatcactctgcacactctgtaaatcatatagcattatggatgagattatggatgagaaaaaactagccttgttttcatccataagaagattcgctgtcttgagatcacggtgaattatgttgttctgatgcagatagttcattcctttagagatatctgtcgccactctcagtatttcggatagcttgaaagaattgttctttttatgaaggtaatcatgcagactacctcctgacatgaaatctaagaaaatgaatgcaaattagagtgtgtcaaacactacagaagtttgtctacaaagattataagttaaaccgttgtaatatacctgttacaatatataagttgggctgtcttgtacaggcaccgataaactgtacaacatttctatggcggacctttctgcaagcatgtagattttgtaagaaacaatttggtacagtcaataaagtcaatatgcatatgatttgccaaatgctaaacaccagaaaatgctcgataaatgggagaagcaataaaaaaatattaagttaacctcataatgtagacttcctgtgcaaaatcacggtacatatctgcactaatgcgttcaggtctcactactttaatagctacatcctgactgcagtatgatccacggaacctgagaaagcaaagcatcaaatggcactcaatccccagttgtgtaaaattatattgttttcacttcccgacaaagataatggaacttacagatcgccatttgatccagaagcaaccttggttccaaacttgagaagcttgagatctatctcccaaacatgcgtcccatctgttggtatttccacactggtagatggcatactctctccacctgacggaccttccaatgattgtgacgatgagtttgatgttggccaagcttgtgtctgtacacgaaaccaaaataaaactaaaacaaatgttttttatctgaggaattcaatagaccttacaagatttttatgagtgcaatgaacaaggcaagtactggttaggaaaataatgttctgcattcctttttcaggtccaggtaccatattttcaggcaacaattaataccacgagaatgagttttttttttcgttgaacttcatagaagaaagtgaggggaagcttatacctcaatgtcatgaaacttctccagcaacttttcttttagctgctcagtaccctgcagtgtgcatcaaaagagcaaattatcaacacgaaaagtgaagtatgttactgaactaactgaactactgaagcgtttagctctaaagaccaattgcaataaggacaagacaaactaacacagtaacactattatgctgggtgcgtaccccaaggtgccaaccagtgacaacaaatacatccaatgagtaaccatcacttgttgaaaatgcatgcgcttcttggatgtcaagaccaagctcactaagcaagcaagtcagctgcaagtgtatgaaaggcaaagtgtaagaatcaaaacaattgctgacataagtcctgtataaaattgccttgaagttcacattaaacagatttgtaatgtttttttaatctttttttctaaataaatatgtccatttatttttactaatgattttcctaactagctacttgtcagcttttgaatttccttcgctttgttaagattgtattgaaagaagtatgcctacctgactaaggacctttggcttatcagttgttgcaaaagttatctcatgcattggcctgcaagattcagaatatagcgagaattaatcaactagaatgagaatatatagaatccaagtattaatcaactatttgcataatcctaatgaaaatgcccataaatacttcctccgtttcacaatgtaagtcattctagcatttcccacatcatgtctagattcattaacatcaatatgaatgtgggaaatactagaatgacttacattgtgaaacggagggaataaaggcttaagttggaaaaatgaactactcccaccaattatgagtacttttgacaatttcataatccactcactacatgatcaaaccagcgcataacaaagaagctcatgcgtggcatcggctttttgtgaaatgtcttgtacatctaaacaagtatgcaaatgcaatattgccagagaaagtaccatattcggaaaggaaattctgcatatcatggttttgcagctaactgttagtaacaactaatccactgatgctatcatttgttaaaaaataggccacagaggcatgcattcttcacaaggtaaaatatgcgattttctggttgtaacacaatataccatgttaattaattgatatagagaagtatcaaaaacagtttttaaaagggaatcgcaacatgccgacatgccaaccttgtaaggtagtagtacaagactacaagctagtgctaagcacgctatgattgtacagaatggcacatgaaccaaaagaaccaaagacaaatacagtgggctcctctgaaacacgggattgagaaaacaaaggaataggaaaaacacagaatttcgataggaattcaaacgcaaaatagaggattgtaaaacacaggaaaaattcaaaaattgaatgagagagatagactcatagaaaactttccatgaggttggacctcatgttaaaaatcctccaaaacttgtatggaatagagcattccttaagaatttcataggattcaacagttttcaatcatttgtttcaaagggccagataggaaaaaaaacctataggatttgaatcttacaaaaatcctatgtttttcattcaaatcaaaggggccctaaactcaaaataaagcgaggtacacgtgaactgaaaaggggaattatctacctggaaatgagatgaacactgctatcttcatcattgttactgctccttagattagcctcactcgcctcgagcgcaagtgcctctaagttggagcaagaaccaaaggcaggagggggatgaaccctgaaacgatttgtgtagtcaccattactccattagcgtgcataaaagacaagaacagccaaggagacacatgcatgaaagtaaacgaacttcatgtgcatatagatagatagatagatagatcatgcatacatttgtcttgccaagtggttggtatgaaccggctccatcccaagctcagaacaatcatccatatcaccatcaagaatcctagaaacctagatcaagcagaaaacaaagtttggtaagccaaggaattaaaatgtctcttcagtttgatgcaacatctaagctctactcttcagtttgatctaatgaacaacatgagacagcacaaatcaaattccccgagcaacaccacaggagagaaataaaaatctaatggaaattaagcagtacgcgaaatcgaccgacatgcaggcagccatggatggatctctctcacctggacgacgcgcaccgacaaggcgggccgccggtccggatcgcgcgcctcctccagcaaccggtggtgcgtcaccacgtcctccgccctatccgcgtgcacatccagcgcgtacctgcacgcccgccatggccatgagggaagtcggggagggggagggagggggagagagagggcaggagaagagatctcaccgggcggggaggcggtggaagtgggcccagagcgcgtcctcgtaggccggcgagatctcgacgggggcggcggcgccgaggccccggaggcgggcgagtacctcgctgtacacctcgaggcggcgcccgctcttgtccgcgcgccgtccccccgcgccgacctccgccgctggctgcggggacgacggcggcggcggcggggacgacggcggcggcggcggcgactcctccacggccatcgattactctcgaagcaaagcgagcgcgcgcggcggcgtggtgcacgagacgagagaggagagccgtgccgctactgctgctgggtctgcatggggtggtggtggcgcgcacgtgagacgtgacaatggcggcgagaaagtccacaactttatagacacaaacaagcggaggcgctcgccgtagagaagaagaaaaagatgagaagagagacaggtttttgtctaggttctggattgacttcttctcccctattggctggagtaataatagtaccattgtaccctcaacgtctcaaaataaatcatctcttactaatacacaacaaatctagatatatatccatattcattgtattcacattttaatacgaggttgatttatttttgaaacgaagggagtaatacaatgatccaaacaaaataattcaagattaatggtctgtttcgtactagcttcaattccacttattctaaagttcaagtccagctaaataatttcggctccatccagaatagaagtggagctagttaaactccaaatccagctcttggaattaaattttgaaaaacagattctaagtataatactaagaagttaaaaaaatcacaatttttattaggtattaaactccttccgtgtttagcttatttggaagtgaagtttaaaatagtattaggcttgaaatttaagtaaatttatgtttttattaaaaacattgaaaaaaacaagttgtattttaattggggattgaatattattggggataaggctgcagaaaatgggggtgatgaatctggaggatttggatgaccataataaaatatgaggacattaatccaaaaccgagtcaaaaatgtgatgtggagaatggagaacggttacacacaagccatgcaatgaccagtgaatcagtccaaaaaccattgctttctcctcgacctgtgtgcatgcgcagtactacaactccaaggtcaaagcagacattgcacgtggtttatttgctacgtccacacgtacggtgtgtatgaacccggaataaaaacattgctttcacaaaataaaaagaaaagttactaccatatggttgaactaagcaacaattgaagcatcattttaaaaggatgcaactctgagcgagactcaaaatcaacttcaaactgtgtaacgagaccatgggcgggaattgtatatatgtgtaccgctggcttctcaccaaaaagctctagtattaaatttataggtggtacctttaatatttctatattgatatgtttatatgtgtctatatataaatagagcgtacaaaatatgacaaaattggagcttactcggcgaaacttgcgggcattgatgaggcaatgtactaacctaactaagctagttaggttcattatatctcatatttgggctgggttcaatggttcatccagcctagacactcaaaaagtgggcaagataaacaaagatacaatattgcaatttgaagcactagtagtaccagtgagcaccatatcatagcaggatagtataattaaatcaagaagatattgtaaattatttggttagtattttctataccatgatggtcctatatgatactgctaactagtactgtatgactatactgttaattggagctctttgagcatgtaacaatggtagcaagtagaaagtagctagctagtcactgaaacgtacttgtacgtacgtaattcaagaatgatagataagctaatcaagtactgatgagataacattgtccttatttatttgtttgaggcgattttctactaaccaattttttgataaatacagacacagcgtttgtggtaagttctgaaaaacttcgcatatatacacaccggagggaacaaaagtaaaaggaaacttcgataaatcgtttttctttaatttggatagtatgagtgatttgaatttgaaggcatcaattttctgacggtatagcgtgggatctttttcagggtacgtattttgaattgaatggaatttagcttggaaattacccactctaaaaaaaacttggaattaaaagagtggtgccttgcttttgcctatgacctcgttctcttaaactatatatatgcagttcacctttcgaggcggagctggatatgcccatgtcgatcctccgcatcgcacagttactccatgcacgaaccaatttttggtttggctaatcacgccacgtgtactccaccatttctcaaaaagaccgtgttttagcatgtgtaaaggaatatgcgattgagttttaattatcttcttcgcccattgatataattagtaaaaaatactactccctttggtattatttgtttgacgttgatcatcgtatatacacaacttcaatcagtaattttcactactccattcgcccctttaagataatcgattttaattatttactgctccttactctaccaactctcatctcgtaccaactctcgtctcatactggtcgctagcttctatccaatctctaactaaaaggtcgtcgggcatatccatagtattgtaccccagaacgtgaaacgtaagcaagtggacatttatcaccttatctccgaaaaaaagatagattacatcgctggctcgagcttgagtcttcgcatcggtccaatggtgaggattcacttgatatataaaatccatcataaaaccatgttggcatatttctagcgaaaccttattcaatttgacacatggctcgagacaagcagcctgatgtttttagaatatgcttggggattaaacccaacaatcatacgatgattgatctccacgtctaatataagcatatatagttgtggttaacttaattaatcagagaggaggaatgatatttatatcaagtgctgaacgagatcaggactccagcccggcacctagcaagtactcctacgtagtacgacacatggatcgatatccatttatactagtggatcagtagtttacaattgactcgcaaaagcaagctaagcatcgagttaacatcggctagctattccagtgacagtgatttggtcctaaccaagtggctgctgaattattgaccgtttgcaacttaaattaattgttgtttttatcactactacttgatctccgactctccgtttgagaacatatacgtgttaagcagttcaaaattaaaactgaaaaagtcatgaacagcggcagaccagagatatatatagatcgagaaaatatatatagtaaatgcacgatgtgtaacctgcatttttgtcatttagttaagcaataattaagcattcattatccaattaaaaagcaataagcattgtatattcagagttgcaggcgaagtcacgcaacaaccgatgatcgatatcgattcctggcgtcgcatgcgtgagtacttgtgcctgtcggcatcagacaaattaagcaatcgattcattaattaaacatatgtgtgtggagtagctataaccttgcagagaatcagatcgaataagttaaggtaaacgataaagataacataagaaaatatatcaatagtagtaattaagtctgcattttgtttttgctgggaaagtctgcaataattagtagtaaaaaaatagtgttggatccaatcgttttgcagaatcaagtgcaggtttgacctgaaaatgcattgcagcatcagagtgagagatgcgtcaaattaaacgagcagtggcgactactggacgggctcgactggccgcgtcacaactacaggatatgcatgcagctggacacgtagcttcatcgaccgacacgtaggcatgcagagatacgcgatgtctgacgaaattacgtttataaaatttactactccctctattatatattataaatcgtttaacttttacatagtcaaacttggttaagtttaattaaatttataaaaaaatttagcaacatataaaatatcaattagtttcactatatctaatatttaatatattttaataatatgtttgttttgtattgaaaatactagttaaatttgaatagatttaactaggaaaaaaagaaaactacttgtaatatgaaacggatgaagtagttgatttggctgtgacttattgacataagatcgaagatgcattctttttattattattgaaacagagcagcagatagatgcttctcgggattttcagaacgtgtcatgaagataggaataccagaatttatacactactcctatcatgtgccttaggatagtacaggcgtactataatatattgagttattcaccatcaattcattcagttttaaacccctttaaaaatcatccatccaatcgtggcatttttaaataatgttttgtttttgaaatttctttgcatgcatataaaataaaaagggataataataacaatactaactatcatcatttgtgccactccaagaaagaaggaatgataggaaggagaaaaaaaaagaaaggaaaaggagagatgaggaagagaatgttcagcaatttggcccatatattaccgatgggccttccaaatacgtataacgtggcccatcaacctggttcgaattacgtatgcagcccagcaacatgcgtccggatacaacacacacaaacacatgctatgtttggcctaaaggtctaaaaaagttataacaaaataataaatataaaatgtattcatatcctaggtagagtttaaatatttttatttaatttgtagaaattaaatttaatgttgtatgtttgtggagtgatatacggataccttgttaaatgttaataaaatttttaaaaattttgatagctatttgggtaccttgaaagaaatgaggtaacatccactcgaggaaaaggaccatattctaataattatggataaatttaaacgcttatcatttttatatttgtttacctatggagtaaaatacttgtattctgattctacacaggcctgatcaacgatgtgcttattatgctttatgctacttgtaacttgctaatgaagcgcgattacactcgtgactcgtccctgatgccgcctgtcgcacgctcttctcaagccaagaatcgcattccttccttgcatacatagcatcatttcatttgcgttttcatgcatgcccccgtggggcccaccttagtagactgcgggcccaccggtcagcctcctcttgtgcattaattcagcaatcctcccgccatgcatgtgccctacgctttcacaccgttaatggttagcttagctagcccccgaagcggccgagctccggtcatcatgtcttggtccggcgagctgtcgccgccggcggcggcgtcggggactcgcctcctccacggcgacctcgacctcaccatccacgaggcgcgcggcctccccaacatggacttcctctccaccctcctccgccgcctctgcctctgcctccggccgccggcgagacggcccagccccggccagagccgcggctctgtcccggccgacgaagacggccgccgccagccgcacggccaccacctcctcccgacgtccgacccgtacgccgccgtcgtcgtcgccggcaacacgctcgcccgcacccacgtcgtccgcgactccgaggacccagagtggtccacccatgtcctgctccacctcgcccaccacgccaccggcgtcgccttccacgtcaaggacgccgaccccttcggctccgacctcatcggcgtcgccatcctccccgccgccgacgtcctcgccgcggccgccgcgcccatcgtcaggagggagctccccctgtaccgccccgacggccgcgggaggccgaagcccagctccgccatcgtcatcaccgcctcgggggtgcagga

SEQ ID NO: 22633 - DNA, 2536 bp, Oryza sativa
tgaagctgtaccaggacgcgcacgtggccggcggcgagctggacggcgtgcggcggcgcggggtgttcgagccggggcggtgctgggaggacatgtgcctggcggtgctcggggcgcagcacctggtgtacgtggcggggtggtcggtgaacaccaaggtgcggctcgtgcgggaggcgatgtcgccggagatggcggcgaaggtggaggaggtgcggacgacggcaaccgacgacgacgacaatccggtggcggcggagggcatgtcgctgggcgcgctgctcaagtacaagtcgcaggagggcgtccgtgtctgcctcctcgtctgggacgacaagacctcgcacgacaccttcttcctcaagacagttgcgttgcgtaccaactcaattcaactctgttcttgaatttttgtcaaagaaaattgaatttggatttgatttctcagggcggcttgatgcaaacacatgacgaggagacgaagaagttcttcaaggactcgtcggtgatctgcttgctgtcgccgcgatacccaagcagcaagctcagcatggccaagcagaaggcaagatataattaattactcaatcatttccaaaatatattactccttttatttttcacatcgtcttatttaaaatatatataaatattatttatttttgttatgacttgttttactatattcttattaataacttactccctccgtcccaaaatataatctttttttttaccttgatatggtctccgagatgctattttgaccaacaatattaagatgctttaaataaaaatagttgcatattataatagtttgtttaatgataaatctagtaacatcaattttacatgtttgatttttttttattttttgttattaatggtcaaagttgaaaaaatatttgacttattactatgctaaaaatacttatattttagaatggggtatatacttttacatatttatgctaaacttttagataaaataataattaaacgatacgtgaaaagttaacggcgtttgaaacgaaagtagtatcacaagtaaatctcgattaaaaatggtgcaatgcaagcaaagcatgcaagacccaatgctgagaggggcgtgtcagccagcgtgcagattgtggggacgatgtacacgcagcaccagaagtgcctgctggtggacacgccggcgtcggggagcacgcggcggatcacggcgttcctcggcggcctcgacctcgccgcggggcgctacgacacgccgtcgcacaggctcttcgccgacctcggcaccgtcttctccggcgacgtctacaaccccgcgatcccgccggcggggaacaagggcggcgccggcgaggaggggccgcggcagccgtggcacgacatgcactgccgcgtcgacgggccggcggcgtacgacgtgctggagaacttcgagcagcggtggaggaaggcgacgaagctgttcagaagggccaaggcgcactggaaggacgacgccttgctcaagctcgagcgcatctcctggatcctcagcccctccgactccggcgccggcgacggcgacggcggcgacagccacctctacgccttgcccgatggtcaccccgattgctggaacgctcaggtacatgataaaccgatcgattgatacttgaaatcgatggagataattttaatttcttggtgataaaactggcaggtgttccggtcagtggactctggatcagtgaaaggattgcctcgttgctgggagacaaaaaagatggttaataatctcttcttctctcttcatcaatggctcatcgtcattaacttatcaatcaatcaatcaataatcgacgtactccctccgtattttaatgtataacgttgttaaatctattatcaacatttggccatttgtgttatttaaatttttttacagatataaagatatttatgtcatgtttaaataacgtttgatgataaatcaagtcgcaataaaatatatggtacttagataaattttttaaataagataaatgataaaaaatgtatcttaaaaaataaatagtgtcataaatttaaaaaataaatagtgtcataaattaaaatacggatggagtaataaaatggtactccatcaaatagctgaagcatcgatatgcgatgcaggaggcgaagcacctggtgtgcgacaagaacgtgacggtggagcagagcattcacacggcgtacgtccgggcgatccggtcggcgaagcgcttcatctacatcgagaaccagtacttcatcggatcatccttcgcatggccatcctacaagcaccaagaaggcaggcaccatctgaatttgctgaatttgtctcatcacttgtctgaatcggtaaaaatacatggagcttagtggttgcagtcacctgagtaacaccctgacaccctaaggtcatgagtttaaatcttcatacgagcgaattacaattaggttatttgaggactaaattcctaatttcatattgggttatttgaaggctaagttctcagtttgttagactaag

SEQ ID NO: 22634 - DNA, 1331 bp, Oryza sativa
tcctgcagcccagctcttattttaaaaagattcatatgtccggttggatgtagaggctgtaccaaaaataccattctctaacaaaattgtctgaatatgctgcacactgatgcatgtatatgtgtgtgtgcaggtgctggaaatctggtgccgatggagatcgcgctgaaggtggcgagcaagatcgccgccggcgagaggttcgccgtgtacatcgtgatcccgatgtggccggagggggttccaacctcgggccccatccaggagatcctcttctggcagaggcagacgatgcaggcgatgtacgaggtgatcgcggcggcgatcagggcggcggggatggagggcgcggcgcacccgcgggactacctcaacttctactgcctcggcaagcgggaggcggcggcggcggcggcggcgggctcgccggagcaggagcacaacccggcggccagcagcgcgcggcggcaccggcggttcatgatctacgtgcactccaaggggatgatcgtggacgacgagtacgtcatcgtcggctccgccaacatcaaccagcgctctctcgccggctcgcgcgacaccgagatcgccgtcggcgcctaccagcccaatctccgcgccggcgccggcgccggcgacggccaggtgttcggcttcaggatgttgctgtgggaggagcacctgggcagcagcgagtggcgggagctgaggtcgccggagtcgccggagtgcgtgaagcgggtgaacgagatagcggcggagaactggaggaggtacgccgccgacgacgacgatgtcgccatgcaggggcacctcatgaggtacccggtggacgtcggcgacgacggcaagatcagcgagttgcgcgggcacgagttcttccccgacgtcggcgggaggatccttggctccaccaacaacaactactgggattatctcaccatgtaggcatgtagctgcctctgcattcccaaattactattcggattaatatatgggactttctaggtgtcttttgacagaaaaaacctccctaaatcttgcaaattatgaaccgttggatcaatcgtgcaacataagtaaaacctacttttcctccttccgcttctcagtccatccgtcgccgccgcccggcctcgcgggctggtcggaaggagtcaacgacagcggcaagcccccccccccctcccatggccggcctcctctccctccccccttctctttccaaggttgcacggcccattttccccccaccgccaatgccggctctccgcccgctgccaaccccgcagctccgacgccgctgccggcgcctcgtcgcccgcccgtgt

SEQ ID NO: 22635 - DNA, 2863 bp, Oryza sativa
cccccccccccccccccccagtgttatgggtgtctctccaagacgcctcgctgccgcgatcggtaaatctcgccgcgacgtgacgagcagtagcaccatggctgcgagtgaaggtggtagagatggcgacgccggggttaggggtgattcgtgcaggccaagtgctcggcgaaatgccgcacccggctgttgttgatcggctctcgacaagtcctgggaattttccttttcagaaaagaagtcggcttcggaaattgttgcttatgattctgcatttttgttttggattcaattgctactgccatctctgagtttctttgacacaactgctgttgcctcgtagaatatagaagaggattacgggatgtttgtctggccatgcagtgtcattctagcagagtacgtgtggcagcagaggtcacgcttcactgcctccacagttgtcgaggtactatacttgtcatctttaaattctactcttgagtgtcaatggccaatgatgatctacttgccattgtgatgatcaaccataaatcaggtcctagcgccagcctctgttatgaggtttggtacagccattatgacattctgttagtagtaattgtatccagttcagagcatattttgcactctaattttaatttgcatgtacgactttcagcttggtgccggaacctcactaccagggttagtagctgcaaaggttggagcagacgtcacactgacagacatcgcacataatacagaggttaagttcattcagaggggtgctgtgtttcattcatctaggctcatattaattattttcttcttatgttttatcaataggtcctgaacaacatcagacaagtatgcggtctcaataatgtcaactgcactgtaagtttttttatttagagggaaatgcatggtggtactttgcattctgctacatagcttaacaaatctgcattctacaacatagcttaataaatctgcattctactacatagcttaataaatctgcattatggtacatatagcttaataagtcgacaacactcatgcaggtaaaggacttacctggggagaatgggatgaacctacatttgacttgcatcctgatgttattcttggagccgatgtgctttacgactcagcaagtaagctacacctacacgggctacacatctgtatttgtagttctgtataattttcatgttgactgacctgcacacaactgcatcaatttggctagagtttgatgatctcttcgcgacagtctcatttctcttggaaaattccccgggggcgatgttcataaccacatatcacaatcgcaggttccgggaattgttttacccttctcctcatggaagaattgcaggaattgttttacccttctccttgtgtgtcaactatttgattcctgtatgcagtggtcatcatttgattgaatttttaatggtgaagtggggtttgaagtgtttaaagcttcgggatggcttctccttccttccgtcatgcaaggctgcttcactacaagggaacattcagcttgttgagattgcacttgacaaggaaaaaccgaactgctcttcagctgacgagaacaatctgtagcagttatgttccatgcggttcagccttatgggggctgaaggcaagaacatggcacaactttggggcatcctccgcacacaggttaacttttataacactaggtgatttccaggagcaacatcatgtaaaattgcccgtacaaaatattctcaagtttaaccatggattgtatttgttggacaagcttgttaaacgaagattcaccaaaccaatagttatgacagaatattacacatctctacacgggatgttccaacagaacttaatcgaacatgttttccttagtatcaatgagatgataatcatcagacattgcatgtaggagcagcaatcagttgtaatacaaaatgctcctcattgtgaggttaacatgattccaactcacaaatttgatatgccacttgatatgataggaccgtcaagtattagtgtgtagctgatgaaacttctatcagactgtccagcaaagcacacacgagaacttcctcttcattagcaccagtacggataaatctggaatctggattgttttcaaattccgtaaacaggtaaataaatggcagtggaccatcgtgcaaggatctttcatcctgagggaatggtcgactcatgcctaggctgtgggatcattgtcgaaaattcctggatgtacataaaatacttaaaatgtgcatgcacgaattgaattatgcaagaaaacagtactaattgttaacactggaactgaaggaaacatgaaaaaaatgatggagcactagtccagaaacatgcaccgattaccttttggatgtcagcatgttcccctcaagttcttgtaatcatcgtagctaagaaatttatccttgatttttagccagtcagctggctttggcataaaaattgctatatatccttctctgtcagcctaataaaggtgggaaaagtatatgtgttggtcagagtatgaaaaaaaaataaaaacttgcgcaagcagatacagaatgacaggtcacgagtaaaaggtaatgcaatatatgacaaacacacagtgatccacagacttctatcacaggtacagagctaaatgatatctagtcaattcatttgtgagaagagggtcgacctaaacctcccacttcacccacaatctacgttcatgataaatgcaatagctgtattcatgatatatcagacagatgtgcaactttaccagtgtttatctggaatccaactagtttttttattctaatctagtctgtgatttcctatgtatgacttcatg

SEQ ID NO: 22636 - DNA, 2382 bp, Oryza sativa
tctagggttgcggattcttccgccattagggcgcgcgacgcgtggatctcctccgccgccggagagctcgtgccgcgcgtggccggtgtgggttttgctttgcggcggcggcggcgcgagcagaagagagatattcccgtttagatgtggaattaactttttgccactggacccacatgtcatagacacatgtggagccacgtgtcattgagatagaggtgacaaatagttatttgtcaaatctaaaagtggaaatagttaaaagccccgtgaagagaagggcaaagtgcgtgggagtgtgtgagccgttagatcattcgatccaacggcctacagcggtacagctcgggcgtttcggaatttgctcttttttttgcaaatccccacctcttttcctgctattccaatttgatcctcggcaataagggtacagttcatttttaaccctcgaacattgctcaaagtctgttttcaccattatttttaagaaaatgggataaactctctacgtccaattggatgtacatgtccataagaaccgattgttttttgtcctaaactttaaaaaacaaaaatagacacactgaaacttatttcaagttggttttcatctgtattagtttcatatttgtcaacctacatataagtgacagctacaccattaaaatatgcgtaataaaaggttcaagtcttcaactcaatacatatactcatatttatgcctatttatttttctttttagtggtagacggtgtgttcatcaatagagagacatctacgactataatgacttcgtcgatttctaaataagttagtccaatctctcagaaatgctcattagggtggggatgcatgtgtaccttcatataggcaaatatgcacacatacataagtatatatgtttcgaaaaaaaacagaaagaaaaaatatcctcatttcaaataataccctaatttgagagttgcttcaataatctttggggcagggtttataaaaccgcgcggttaccatgcacggtaaccttttcagtttttgaaaccacggtatgtctcgcggttaccatgtggttttcgcggtaaccacgcggttaccgcgggggtgcggtaaccacaccaaaaatggtaaggggaaccctgttttggggatgcccatagtaataggagacatgcgtggtttcataagggcatgctcaatggtagagacgaaaatggtctcttaaacaatgcaagattattaagagaccatgtctttacaatagttgagacgacaaagactctaatcattaactcaaaaaatattccttttgtcaatattcaatattctttctactttttttaccctcatgcaactttatttccatattacagtgattaagagtcattgttaagccattgtcataaataacagcgatgttttgtctcttctctttctctttcttccatgtcaataaatattcctaattagcaacgctgagagaccactgttgataaccattgtacatgccctaagagcgaatgtgtgcgtgttatataagcattttcgtctgtactatatttcgaacaaaaaaaattggcaagcaaaagtttttccaacaaaagtggaaaaacactcgatagaagtatccacaattctagctagccacatttcagtcatcaagtcattatgcatatatgccattaatcacaaatactagacaactacttatcaaatccattattactagtacgtagcattatgtttctttctcgaataattcgagtgtgtatacactagtagtgagacgtagatggtaaaatcaatcatcatcatcaatcaaacgcgaggtaatgcaggtgctgatggtatccgccgccgacttcgtcgtggtagtgctctccaccggccgccgccgccgccgccgcagcctgcccgccgtcgccgccgtcgaacttggcgtcgtcctcctcctgcggcgacggccacacgccggggtacgtctcccgcgtcacctccagcagcgagtccctcaccctgtccgcctgcaccgccacctcgctgtccctcacctgcaatgcagaaaccaaccagctcggagtagtcagctcgcgagctcgcgttcatggccatggcggcggcgagcggggcgtactaccatgacgcggaagacgttgaggacgagggtcttgtaggtggtgacgttgacgttgatgacctcgaggccgagcgcgttcatggcgtccatgaggcggacgaacccgccgggcttgtgctcccagagcacctggacgaacagctcgttcccctgcacctgacgcacctccagctgcggctccatccggtgcccaccgccgccgcgccgccgaccttgtcgtcggtcattgctgggtccttgttactcctcct

SEQ ID NO: 22637 - DNA, 27922 bp, Oryza sativa
tacgattcgttgcaaaatcaaacggaaatcgatttgaagaagcttttgatccgttcatggccatggcgatcgacgaggaggtaagataccttggtgatgtttgggacgagcgagcggagcttgtagaggtggccattgagcttcttcctccgcttcctctccgcctcgaggttcttgcactgctgcctcttggcgccgccggagcgcccctcgccgtcgccgtcgtcctccgggtcaccgccatgcagcttcctcccctccgacccggactccgccacgccgccgcccgccgcgtgctgcatctgctcctgcgccaccgccaccgacggctcgctcaccgccatccccgcgtacggccacgcgcccgccgccgccgcctcgtcgcccacggcgtcaccaccaccaccacccaagaacgggtcgtcgtcggcggcggcggcgtcgaacaggttcagcgacgagccgccgtacatcagcctctgcgcgtcggcgcctccgtcccactggaagctgggcgtctccggcggcggccacgcctgccccccaccgtcgtccccggcgccgccgccgccgcactgcgccatgacaagctccgccatctgctgctcctccgccatctgcaccaacaccgatcaacccacaaatctatataacccatccatgcaaaacgcaaaggccgttgcgtgcagctaaccgcaagctctccggcgttcgttggctcacgcggatggcgtgagccgccgccaccaccgccgccgccgcagccgcagccgcatcctctctaactactactcctctaaccaatcgaacgaccgaccactcacatatctcgacgcgaagagctcgacgaggccgccggcgacggggaccagcagccgcgtcttggcgccaccgccgccatcagcctcctcctcctcctgccacgcatccaagcaacacacctcatcagtgacagagattcatattcagattcagattcagattcagattcagctactgggttcagtgatgaatcttgcttacactgctgctctgccagatcggctggttcgacagcaatgcctgcgcatgcatccttgatggatagtgacagagattcagattcaccaagcatacaaatgttcagagttactagacaagaaaccatcaattttgcaggtaatcagaacacgtatcgattgattgattaatcattcaatttaccctatggaggaggagtccagtgggattgaagaaggcaggtccagcagtgctgagacctgtgcttcaagctcactgctgcagcagaatcctgtcatctccaagaacctgccattaattttgtgttaatggttgtatatcactacagagataataaatcacaccgtaattgctactttgcatgcatgatatgatatgatatgccaagtaatcaatcacatacctctgatcaggagagagcctccagtagatgcagtaatcccagccatctgaaccaactagaggcctcaatgcagcatccaaactggtgccacctccattgacagcagctgcagctgcagcagcattgctgttcttcatcagcaggtggtctcctcttcccatgtggtgatcacccttgccctagcagtgacacatgaaagcaagaagaatggatgcaagtgtcagttgcagcattcacaaggcctgctttttcttgctgtcaggacaggataagttgatgtcaccaaggatacagcgaaaattcagggtatgatcacagcaagggaacaatcagattcagtctgaatattcatcagactaaagagacagatttagtctgaaaattcagtctatgttgaatcaaattttcagtaacttaaagagacagagatcaaagctgcattcttctggctcatcaggattgtatgtgaaatcttttctagtgaatttttggaattaagcagagaaagaaagataccttctgtcttcctgagatcgcttcaaactaactgacgaactgtggcagtgatcaacagatggaagagagaggcatcagctgatagctattggtaactgaagaatcattttgtacagaaggactattgcatcatgcatatatatagttcacatgtgtgtgttcctctgaatttagccatggctatctgatgatgtattgataccaagtcttcggaaatggctgtcaaattatgtatgatactagttgaattttgaattctttacttaatcactccacctatattgctctgaaggtttgttgtgggtaggtgagttgcaagaaaggtgtgagagttttctaactccaatacaaatgttgttgtctaatacgcaagtaatcgcaattgcgatgagtcctctcaaactacgcaatgacagttttggttatactacctataatcatggagataaaatgttcacaagaacctcttttacatgagttctgagtgaaattcagaacttgtctgttaattcagtaaaaaaaaaaaaagttcaaatgaacagggtgagacagagccttgagctgatctggtccctctccattgacagcagacagcaaacgtaagaggttgttgaatcgaaaaaagcttagctgtgtgagatatttgctgatgcaatgttactctgtcgtccacgcttcagagttctgagttcaacaagtcacatgataaaaaggacaggcacaacagaaaggaaaagggatagctacaaaacccatatgctgaatttgaactgcagatttaaacatggaatatacaaacaattcgattatcaccattaaatgttcttattacgattctttggttgggtgatagctaaaatacatcatggcagcttgtggaatgctttccacttgccaggatcaggacatatggataattggataagtttgagaagtctcatctcttcagaaactgcatcccaatatagttatgtttgatgttcagaaatcagaatgctactctttaattaaattcgacaagaaactcattatgttcagaactagtcggcaagagaacacctgcagcaatcactgtcaattagactttcagaagacgagtaacggtcaagtattttgttctttctgcaatctgaacatctttggctgcaataaatcattgcagcatgtagtaaattaactgatggtagtacaaacaacacaaatctgaaatcactggtgacaaacgaactgtaggtgccattgatttcattttgcatcagcaagagcatgagagtttatgcccggtccttcgagaacatacacagcaaccaacaagtactactgtactagcaatatataatttggtcttgaatggcacatgattcttctagtgataagctcgaatatagtttttattgacagcaatgtggaaacactgtcgaaaaagttggccggtgttggatgcaaagatggattcttgtaaatgcaaaatctgacctcttttttcttgccattgaaatgtacatggagggatcaagttccatgaactagagccatcagaaaataaagtttggcactacttctcccacttggactttgcccttttggtcagaatccctactctcttttagcttcatgaggaattctcttgggagtcctaactttcaatttaggcacaataaacacagatatgcattgcaagtttgcaatcacttgtttaagctttaaggagaatatttggcaatgataagatatttattgttattttattgtattattattattattattattattattattattattattattattattattattattattattattattattattatcatgccctgttccttttttcttttcaatgtctcattcaagaatcatataccatttggaccatgctaatgatgtcggtatatatagcccagtgatcatcggtacccagaccatcgaaacaaaacattcttcagttgatcttgagattaagtcactcctccatcccatctcaagaactgatcaaggaaaggaaaaaaaatggcactgaggagaataatcaaggagctcaaggaccttcagagggatccgccgacttcctgcagcgccggtgatacgcaaatctttgcattacatcctgaaaatcttcagatagaaatgttcagaaacaaaatcaagaagatctattgcattaaattttctcattgttgttgatgaattggtgaaaattcaatcagggcctgtgtctgatgacatgttccactggcaagcaacaatcatggggcccaatgacagcccctactctggaggagtgttcctggtgaccatccacttccctcctgactaccctttcaagcctccaaaggtatgtgctaactaagcaaacatcacttgtctatcataattcaatcaagattcaagaagttgatgaaacccaatcatgaaatgaaaaatgaagcgtctgattgactcattgattgggatcttgggagcaggtggcattcaagaccaaggtgttccatccaaacataaacagcaatggcaacatctgccttgacatcctcaaggaccagtggagcccagctctcaccatctccaaggtaattaacaacacaagaacaacatcatcatcagcagcagcattgtgaattggtaatgaactgatgatgattaatagtggatggtaactcactcataattggtgcaggttcttctgtcgatctgctcgctgctgacggacccgaacccggacgatccgctggtgccggagatcgctcatatgtgcaagactgatcgcctcagatacgaatccaccgcaagaggctggacgcagaagtacgccatgggctaagcttagctgcaagctagctaattgcagctgaaatggcaattggatttggatttggatgcaggggacaatcagtcaatcaccagcatgtcgattagaattcagaaatatagatcgtgccataaaaaaagatagtaataattcttgcttgcaattattaggattgttgttgcaaatctgaatcatcgttatcatctaacctataatcaaaaaccatcgtcttcttggtgaggaggaataataaaagtctgcgattttgacggaattattgttcgtcagaagtgaaattggaattattgttctttaaaagtgaaaatttttcactgacacaaccgacgctttggccgagtggttaaggcgtgtgcctgctaagtacatggggtttccccgcgagagttcgaatctctcaggcgtcgattaacttttttattttttttccaaccaactcgtaatatttttttatatatattttcactttctttcagaatccctacggttacttcgagacgatttttttggggggggattttgcgttacccttgtgtgaatcgaacgctaccacagcccaattgcgaacagtccagctgctggattgaaaaataaataaatataatacaacagctctcgatattataatccatgtgtttgtaactttgtgcttaaattttgcagcgacatcgagagctaaatttaatcttagaaaaacaaaaggaaggcctcaatcgggtcttttgaaatcaggggacaattgccaattaaccagttgagatatatatatcttggttccaggcacttccagctgagttttatttaacctggtgatcttctgagatgataggttttgactgattgttggtgacaaccacccaccaaattgcatccagtttaacaattttcaaacatgtacgcatgtatgatattgattctgctaggctgttgcatagatggcctttaaaaatgtaactggcaaagatacagaattccagcagattccacatattataatttacaaacaggcctctacttcaaagttcaaacatgctctccacaatctccagaaaaatcattatgttactagagctagatgttgactccaggtaaccattggaagttgagtaggccacttgtatgcaacaattggacaagtcagaagaacatcacagatcttgctccatttgcagaacagaatatgaaggggaaacataattttccattgaagtgaaataagaaggaaaagaataaactgagtgcgattacatcatgtctacttatgaaacagggataacaagaattttttttctcaaacacaggaaataccatctaggaaagttacctaattgccacgacttgtcagtcacacgagataatcacaaggcagaaaggagaaaatgaaacaaacggatcgctcattgcctcgacaaagaggccttgctgcagctgccagtaaactaggatccccggaccatgaatgctgtttcgctgaagcaagacgcaacaataataaagcctggcaacttcatcgttcttcttcttcgtcgtctactgatgattagatcacaaaatggagcacgcccccctttgcgcctttttcttcttcttcgccttgggtggctgcagcaccacctttattgccgcatcgaaaacgcccttgacgttctgcagatcaggggggggcaggatatctctgttagtatcttatatgttattgcacatttagcaaagaaatgggaagaaagcagtactagttgggtctttgagctgcattcgatgtagtatggggcgcctatttgctttcttagttcctctccctacaaaagtggcaattaaggaacaaaaaaatgatcaagatatggcaatgtagtccacaggagttgcaagtacatctctgatgctacagtaaataaggaattaaacaacccacaatgccacaactgtacctgagcagtggtgataggaacagcaccaggatggtccacaaaaaactgcttgtcatctcgaagatctgccagtgcaataaacaatgtgaaaaatgtaagtgggctacagttggatctttacaggtcgaaggggatattatctgtagaatgattggaatttaatttcataagacaggtagaaacaccagccaaaaaaaaaaagacaacaaaactgaatccatcatgacaatagcaaactgagggacaacgtgcaatgccacaaatctgtgagacagagtataactgttgcatgttgttgaaccaaagttgaatagtacaaaagtagaaccaaaagagcaaacagttcaaataggtttatcacaagaatttcttgcaagtactaaaaactatggctgattgatatactggtactatatatccatatttttcctcttttatagagcaccctgcttcatgtattatcactaaatgacgtcaccagtaccaagcattgacatcaaaagaacacacaccaaataaaatcgtatcaacctaaaaatcccatgccactacttccatccaaaatcaaaaccgaacttgtgacaggtacaaaagattagatttctcaaaatagagccttgcacggttcttaccaagctttgttcccacaaggatgataggcacaccaggtgcataatgcttcagctcaggtatccactgaaatataacaaagtttagaatcaacaagaagtaccataagtggagactaaaaaagtgaatcgagccacaaaaatgatcaaatcaagtatcaacataagacaatgacctatgaacataaatttatgagattattatcatcatctatcatctctaatgggtggaataatccattgaaggatgcatctaggcctgctctaaattttgtggagcctaattcccagcatggtaatagttttatcatcgaagaaggcaaaaacacaagaaaaatgccagaagcaacatatcattgcacagacgatctcaaattaaacatgaccaacaaacttctttagcgaaagaagaaaaaaagagcacatcaatattattaacagaaaatgaaagtgagtcccttgccttctttgaaacattctcatagctggccttgctgattagcgagaaggccagaaggaaaacatcagctccacgataactcagtggtctcagtctgttgtaatcctcctgacctgtggtattccgaaggaaaaacttaataacttggtagaagaaaacaagcatgcagaattagatagcagcgcaaccagattacctgcagtgtcccatagcccgaggttgacggtgttaccatcaaccacgacgttggcactgaagttgtcaaacaccgtcggaacataatcctgtcaaaagcaatgacgcgaacaatgagtgcacatatcgtctcaaggcacaaccgattcataagatacaaaatgaggtgaatcctactgttacagaactgataagatatctatggtaaatgtgcagtccattctcaaactcttgcctaaagataagattacaaaactgatatatactccactagattactattttaccaggcctattatacatggcaagaagtccacaggtggtccaatggatacactacccccactacatggtcaccatgtctcagggctctaataagctaatctaccccccaaagcagctgaaatgttctcttcttttgaagatctctcctcaaaagagggaaattaatgtgcaattgggaaattaaccatgcgcgaaaagcaagggtggtggtgtgtaattgattgggtgtggatttgcgtgaaaggaacaaagaatgcgcttaccaaccatggggaaggtgtgagatgtgagtggaggagggtacaggacaactagaaagtcgggaaagcgatatcgagctctcgacctggcggatccgcggtttcccacctttgatagagaaacgccagccaaactgattcgacgttatatgaatcgtggggggaaaaaacctgcatttttttccgccgctaatgctgctacaatccataaatgctgcaagcaatcaaggacgaattttttgtttttctactgcattttttttgtttgagcgttcacgaggaacgaatgaggcagcatttggcttcgatttgagccacggtttttgatttggtacggggtgccgtgcaaaagatcccctttttactcaaactcgaatggcaaccctaggcaggaattcgaagccgcattgtcccaaattcacgagcggcggacgaatcagaaaagccccacaatttgggcccaaatccagatcaagaaccataatcctagctccaagcctccgagcacacaagtattttttttcaaaaataattaaaaaaagaagaagcaaaagaaagaagaagaagaagaaaaggaaatgtttggaggaagaagaagaagaagaagaagaagaatacgcacagtggggaaggtgttggaggtgtaggagatgagcatgcaggtcttgccgacggcgccgtccccgacggtgacgcactttatgaacctggacgcgctcatcctcgccgctccccgtcggtcgcagcagacgccgccgtcctcctcctcctgcgaccgctcccccctctctctctctctctctctctctctcaagaaactccaagaaagaagaaggttgaaggaggagcaaagcaaggggtcgacgcgagaggaaggggggaggttgggttaagattgggaggtggaggaggcgaggcggagagggtttctcgcagatcggcgggtgaagcggtctcctctccgcgccgaaatggtgggtggccaagcgcaagcgaagcaatagcaatgccccccaatgcaaatgcaatgccgagacccgagacaaggaaggagagagctcgctcgagacggaggaggagaagaggaggagtagagagagaggtggtgggtgaggtgggtggaggaggtggccacgttgtgcgcgcgcatcatttccttctttattaccgctcctccccgattatcacgcacgcatatgcccattaattatttctttttctcgccccccccccccccctatcattttgtagtatattagttgttctatagttagggcgaaaattcaatcttctttagtagtaattctaaactcatgtaatatgataatgaataaattatttgggttcaaaatatcgatcaattgttgtttacattgtagcaaccaaccaacgccgatcaaatgttagcgcggctgactgggtggctactataacacggtaagccataccgatcagggtcatcattaattcgagaaagaaattatatcctttcaattaattaaaaagtcatgcacgataatataagtatcttgaaataaatgattttggttcaaaatatcaaccattatggatgtaaattgttgccactacagctacaaaccaatatagattaatactgcaccagtggctaccgagcacatatgtagccaacaatattcattaggactgaatatagcttttatatttttctcgtttattcaaagctttgtttgggacattgtaaaattttacaggattttcatatgagtcaatttttttcattaatatcctttgtttcagtttcccatggagaccatattacttgctaatgtgacagtactactacggagtatataccaattgcaattggtagttgtgtagttaattccagctcacctgtgtacaaactgtcaaatggtaccagtgtactgtagcttttacagatgttatataccggtggttgatgacttgatgccattgtcctaacctggtgtactcgttacattgtcctaaccctgtctgtcaggccgagaaacatatatatgtgcacatatatgtagtactatcatactccctccgtaaaaaaaaaaaaaaaaaaaaagaccaaaccctggatttctgtatccaatgtttgaccgtccgttttatttgtttcaaatataaaaaatattaaaaagaaaagtcacgcataaagtattaattatgtttcatcgtctaacaacaatgaaaatactaattataaaaaaatttcatataaaacagacagtcacacattagacatgaaaacctagggtttgtcttttttttttttggacgaagggagtatgtcaaactcaagcttccaaaaccatgggaatgggtgatcataaataaataaatgtcaatttcatactattgtaatttttatcatgtgttacaatcatcatattataataaaaatagttgtattataaaaggacgatttgttatccctatcgggttgctatttggattttaaaactggtccatacaccgaccttttacgtcaagaaaagtttttaagaaggcattcacaaccgccctgaccttatttatgtcatttctttcttctttttgatgattggatttattatttttatcattttacgctttacctactttgttcttttatattttgtgcctaccatctgcccaaactgcaccatccattattgccttatttgtgtctttttcttctcggcgtttttgccaactcagtaatcaactgctcagcagtcattcattgtttttttggcacaaatttattcagtatatatacagaagaagatgctgtaagttcaactaacaaaagttgctgaaaaacctttagaggaaaagtgaaattgttagttggaagataatacttctacatcaagtgaagtgaagttgatgcatctcatatgttgggcaagaaatatgatttctatttcagctctctttggtcatattataagttctaagattgatacatcgaagaaaaatatcaaactgtcctgcattgaaatgcaagtattatatgatttgtgatagaattggacaaattgacatgacaaacttttcttataaaagaaatgttacacgaccaaattccatccagctatgagtagtcaccagttggcaagaaccaaaacaaaaccatgagtgcagtgtaccatacataaaatagtattgacagctaataaaatccaggatccaactggctggattagattggggcagttgtttgtttctttccctctactgtgcagtcacaatgaccagaaggcagaagcatccaccactcattgtacccaatcaaattatggaaacaaatatactgctaactgatcagatggatggatggttcatccaagcttactggcatcccaattttgcctcattaccaaatacaacgaaaaggttattgttgctggtatcaagccaggaaaaacataccatggtcaaaatttatttttatgactattgttgtggttacctggtccagcaaaaggcacacgaaaaggttgagcaaaacccttatctggtaggctacagcaaaggttaagtacacatccattttttttaatggatattcatccgttttttaccatagggttgcacagttatttgaatttgtgtatccttttagctgactcaagtgtgttcgacaaaagcatcgcaattgtcattggcccgacaccaccaggaactggcgtgattagtcctgcaatcttggaggcctcctcgtagcacacatctccaaccagccgataacctcgagggctttctggatcctgagacatttcaaatcactagtaagcatagcatgcaaggaaatcaggaagggggtgtagggaaagaagcagccaagtcaccaatttctttggaaccttctgaggtattaactgagttaggatacaaaaacatacaacaaaacttaaagatatgcacaagccaacatttaagtgaaggcttgtactaaattgattaatcatcacatattgcccaaacacatatacaatgtgaagaaatttaccagcaaagatatgggatcatcaaaatttaataaggcaatttaagtttttataaatgggtgtccaacagtgggatcacaggagggtctactggtgtagttccttacctgccttcgatcccagctgcgaggatctagacaataatgttccctttgttcttgaaaaaaaaaactatattccttctaagaatgtgacattttgcatatatgaaccaaacatgattagaaacatgaagtgcaaaagcattatatattattttattaacaacacaaatacaccattagccatctggatcccaccaatgtggtgatattccagggaaccagtaacattggaaatcttattagcaggttcaaactacctccgtcccaaaatataagggactttggctatgacatgcccagttttcatgcataaaacttatccatctagaaatgggttggcattaaaagcaaacagatctgttgaatgttagggaggaagaattaaggaagccaatcagaaaagtaggtgtcttacatcaactggattgatgccaacatcaataatagcagcaccaggctttatccaactccctctgaccagattagcaactccaacagctgcgataacaatatctgcttgtcttgttatttcctcaggcttcttggtatttgaatgtacaatgctaacagttgcgttggctttctagtaatcacatatggcataaaaacatgttaattaaacactccaataaaatttctccaactaattgaagtgagaattaattcatacttgcagtaataatgcagcaggcatccccacaatattgctccgcccaattacaacagctctcttccctttgatttcaactccatatctgtgtagtaattccatgcatcctttaggggtgcatggaacaaagaacggatcccgaccttgcattgcaagtcgtccaatgttcagtggatgaaatccatcaacatccttctcaatactaacagcattcaaaatgttctcatcattcatatgctgcaaaccatcagagagcagaaatacagatgctcagtggatggaagacatggaaaacttgtgtgatgctagcaggcaaatacctcttttaatgctaacaggtaaaatcattcaaagtatcttgatcaaaaaattattcaaaaatatccccatcattaatatgctacaaacaatgcaacaagattaacagagaactgcaagcaccagtatagaccatctaattaaaaacaaatgctgacaacaaactcgaaagaccacaaagggaatgcgacggactacctaaaacaaaggatctgtttgcacacatttttctaagaccagatatctttcacaagagcagcatcaaaccagttaacataaatagaaacatttagtgtacaaattggagatggcaccaatatcacaatatttccagaaaatattgtgcataaagtaatgtttccatggtgtgccatactgccatacatatctaggaatgtacctcactaaaaatacatttaactaccagttcagttggtaagggccaaaattcaatatcagtggataggttatacagagacattggcccaaagaaaattgttgaaaacttacatgaggtaggggcaactgaaccaagatgccatgcaccgacggatcactgttaaatgttgcgatgtgcttgagaacctcatcctcagagctgtcttccggcaaattaacctcatatgacttgataccaaccgcttcgcatgccttcttcttgttgcgcacatacgtttgagaatccttccttgacccaactaggatgactgccagcccaggcacaaccccaattgcatccttcatcttggcgatctcaacagcgatttcctctcttatctgctttgccaccaacttcccatcaatgatcttggcacaagcatctgatgaacacagttgtaacacatgcaaaacgattaaaaaaaagaattgtcatatcagtgcatcagaaaatacaaggatctcttcatatactccatttgcaactacacttgctcaacaacgaaatcaaaaacatagtactatctaataatacaggtgcaactaatagcaaatgggtttcacctgaagagctcttccagccacacacaactcgacacggatgaatagaacattcacagtcaggcaagcgaggagaagtgggcgcgcgcacctgagtcggtagaggaggcggcggcggcggcggcggctgaggccgaagccgtgccgcgcgcgcgggggagaagcgggagctggggggcggcgatggcgaggggcctccgcggcggcgcggcgacggtggccgggcggaagcggcacggcggcgcgaggagggcgcggcggagggggaggaggcgggaggtggcggaggaggagcagtcggagagtatggaggacgccatggctagggtttagtgccctggagcggcggcggcgggaggtttttcgcgggcgcacgggaagggaaaagaaggggggaaaaagaagagcggaaaaaaaatggcgtgtaaatgcagcagccgctaaaccccacgtaacaacaagggtttagggctaatccattaataataaaagattttttagggtctaatcaataattaaaaagggattatttattgatttactactccctcaaaataagtgcaacttttggggtaatatttattgtaactactatgtaactgcactgtaactacattatcatctccgtataatttagatataatgttacatatattattttattacttatataggagttacattatagttatagtaaaattatattgcaattatactataagttagatttgaaagttttctttttaaaaaactttcgacaattctctagatagtccctttagctaaattttaggcccatttggaatagtggaaggctggaagatatgtgcaacttttaggctgtgttcgcttccctcgttttctgcgcgcatgcttttcaaactgcttctctagttttctagctaaaacttaattaatcatgcgctaaacgctgcttcgttttgtgtaccagagagtgactcccgagcacagccaaagagggtgcgtgctccagttgtttcctcggtttcaaaatcaaaatgttgttttgaacaaattttggaggacaagtggatatctaacactccttgtaacgatgccattaaacgagtacatgatcttgcaaagatagtcacaaagatgtagagaattcaggctatgttctactgttctcagaaatatttggattcagcaactgaaaaagacaagcagcatcacctcgtaacctttgccatccaatccaattcaaatcgacaattacagaacagctaagcaaaattccgctttattaactacagaaaaccgaaactatagtttcctcacaactgtagaaatgggtagtaaaatggaacatatcctatgctttatagtggagtattacagaaaacaaaaactctccctgattgatctgaatcttgcagcctatcgagaagcaggaacggcagtttcagctggggactcttgctcctgtaccagtgactcccactccacctccttcaggattctgaacctctcgtcgagatttacgaaaccggattgctgagtgaccgctccacaggtgccggctttgtgtatgaggactacggtgccgcccatgtcaggcccatgaagcttgccagtcagcagtacacggagcggcataaagagtgactttccctggtcacaaatggatacagccagaagaggtaagttataattgttccattcaggatatatggcacaaaaggcatttgcaacaatgggcttgaatgtgattttaaggtgaatatgatggttagtatatacaagtcaaaacaaaggaagcttactagggttgggttgtcaaagtctagatcaaatgattcggttgtattttcatcatttctagatatcaaggtttaggtgagacagattgcttccataaaaagttgtgtttgagcggcacctaagaacaaaagaacaaaatgattgctgtcattactcattagcactgacctttcttttaagtgatttgccaaaaattttcacccacttctgccaaccatcacggccctcagctagtgcttgacaaagttcaccgctatcataagcagaaatgagtcctgatgcaacctcagaaagcttgtcttgcaccacagatttagcttcatcactggtaatttacatgtgaacagaaaaacgaactgtttactccaacagtactaccacaacaaccaattcactgaagaaactttccttttttggcgacaatttatgaagggactttcagtgaaagattaatgaagggttcccgagggattaaatttaaaacatcacatttctgcagacctgcttaatgtagcatggaggggatacgacaacaggtttgaaagggctgcgtcagcatcagtgatcaaatcgatgccatccttcaaaagctcagccgcttcctgtgcaaaaaataaagtaattatgttattagtgctccccaatcagttaccgtccatttagcatatatacctaattctttttagtgtgtagttccaaagtacaaacacccatggtgtgtagaaataacaaaaggcctccaatcttactttagcaaaaccactttcagactcctggagaatgcctgtgtccttccatctatcctcaaaactcttgatgagtacatcagggggaaatgatcttagatgttgtccattcatccatctacaaatataaaaagtaatgcattatgtaaataggattgtttgtttattttccatgatcaccagttcaagtgagtagttgtgtgcacatgcacttcttaaaggcaacggtggattagataggccaacaaaatatcagtaggtttgagcttgatggtggtttctgagggtaggtcccagtaaacaagctttatcatgatggaatgcgcctttcaaacactactgaccagcaggcagcaaagtacataaatacgtatttattactgattagacacactgcatttattgcttatcagacttatgtttctctttgatccataatgtggagtgattttgcgaactccatacagtatatcaaatccattgatacactgtacatttaactttgttggtcatatggagttatggactggacatgcttcccagcttgtgtctgagttcataaataaaagaacctatgaattactagctacttcctccatcccaaaaaaaacaaatccattgatacactgtacatttaactttgttggtcatatagagttatggacacattctagtacaacgaatctggacagatatatgtccggatttgtagtactagcatgtgtcatatccagtactagattggtttttaagattcaccttctaaaatataccaacaattagtataatatgaattaaaattttattagtgaatattatcattggattgacatttgaatttaatttcatatggttataattttgttgctacaaaccttatagtatatcagaaattataagcaaaagattatttttggagatcgtgacgtgtttgacgtgcgatagagggagtagtgacaatgacttttcactggttcccttataattgaaataatgcctgatatcagactaaagaaacataacaataagtggaagcaagctccagttcaactaattatagtactgcaactgagatatcacgagtaattagagaatactgacaaattctatgaagataactcaaccagaaggagattggcaaaaaaaaatgatcttactttaattttacagcatcaaagactgctccacttttgttgacacgatttatagtgaatttttccactggaaatgagatataacagcaaagaatgggtaaatggatggtgactgtaattttcaaaaactgtgcagggaaagtaactgaacgaattattcataaactaacctaggtcatcaatggtgaagaactcattttcagtaccatcaccccaaccaagaagtgccaaataatttaccattgcctgaggcaaatagcccatctctttgtactggccaaagaaaagaggacacattgttacatttttctaacattgaaagtgtttcagaaaagatgtgaaatggcgagtaattagctgcaatactatattttgccaaaatctagttggttacctgtcccacagaagtagccccatgacgtttagacagtttacttctatcaggagctagaataagtgatacatgagcaaacgaaggcattggaaatccaagtgcctgcagaagacagtcataggacagtaggcatattatgttgagacatacagttcgaagggtcaaggttgtaaacaatgatacacaagataagaatggcatagaaaattactttataaataagagcctgccgtaatgtgtttggcagatgttcttcagctctgggggagaaacaagaggattgcaaacttcaggaagaaatcatcaaaaggaaagataacaaaataattagtttacattacctgataacatgagagatgcgcatggtagcatcatcaactgtgacacagaagttatacactggctggccattgcttctcataatcacgaaatcaccaagcgtgtctaagttccaactgacctttataaaactatccgatgcttagtgtgtgtgtatcacttctcataatttgcaagcatgaattattgacagtggaaggctaaaaaaaatgcaacgatgtggcagtgctagagtttctagttattacctcaccacgaataaggtcattaattttcaacgacccttccttcggtacacggaaacggtaagtgtaaggtgtccccttctctaactcctgttgtatttctgcatctgaagcagtcccccacttgcccatgtatacaggtggaagttgcatctgctttgcagtttctttcatctgttcaagttcctgaagtaacagaaacagctatcaaatgggcaaatagttgatccagtagaattccagaagtaacctagacaaattgctgacggggtttaaactaactcatcccttagtattcatagttgaataaatcactacgagtgtttcatatgaacacacagaaagatcaagcttttttttttgaaaagcaccaaaataatactccaacattacaacaacctgtgtataagcgcaacacaatgcatcacacatacatgcagatcatgcaaggggagaaatatacctcactggagcaaaagcactgatagactgcaccagactccatcagcttctcggcatactgtttgtacatcgaattgcgctcggactggcgatacggcccaaattccccaccaacatcgggacctaagcaagtacaaatatgagcattcatatcatctaccatcatagaggaaaaagaataactatttcactggtttatccatgcttaataaaaccaaatacacatctccacagttgcacaatatcaataaagataagcaatcagattgtatcaatcagataatcataagaattgagcttgccagaactctcgagtagagtagaattcagcatccaaggcctaactacggtggacagcaatagagcactacatcaaaatgatactccctccgtttcaaaatgtttgacaccgttgactttttagcacatgtttgaccgttcgtcttattaaaaaaattatgaaatatgtaaaactatatgtgtacatgaaagtatatttaagagaaaagtgcataggcggtccttaaacttataaggttgtgtcatctaggtccccaaactctcaaaatgcacatctaggttccagaacttgtcaaagtgtatcatttaggtcccaaatcgacatagcccctatagaatcctatgtggcgctgatatggcatgccatatggacgtgatatgtccttttcttcctttttcccttcttttttcttcgttttcttctcattcttctttttttttcctttcttctactcgggaaaagaaaaaaaaggagaagaaagaaaaaaaagaggaggaggaaaagataagaaaagaagaaaaagataaatgggtttcatttgttagtcaaaatgatgccacgtcttgtccgtgtggcatgccacatcagtgccacgtaggatcctataggggctggggcgatttgggacctaaataacacactatgacaagttctcggacttggatatgtattttgagagtttagagacctagatgacatacccctgcaagtttaaggaccgcccgtgcactttactctatatttaacaatgaatcaaatgatatgaaaagaataaataattacttaaattttttgaataagacgaatgatgaaacacgtaaaaaaaagtcaacggtgtcaaacattttgaaacggagggagtacaacttaacttcctaggcagtaaaacattagagcgatatagagaaatcaggtgggtcaactcaccttcgtcccagtcaaggccgagccaggcgaggtcactgagcacggcctcctcggacttcttggtggacctctcgaggtcggtgtcctcgatgcggagcacgaacttgccccccttggaccgcgcgaagaggtagttgaagagcgcggtgcgggcgccgccgacgtggaggttgcccgtcggcgacggcgcgaagcggacccgcaccgggccgccggcgccgtccggtgacgccgaggcggaggcggaggcgcggacggagagggtccggcggaggtggggccgcaggaggcgcggcggcacctccgggagcagcctgatgcgcagccatggcgaccccattgccgccgccatcatctccggagattgggagtttgttgcgagaagaaaaggaagaagaagaagaagaagatgacgatgcggatagagtttggggatatttgggggcccaacaaagcccacgcgcttacaaactgcagtagcccaacaaccacgaaggaagagagactgacaggtgggacccacaaagcagtgtcttgtgaggcattttatccctcagagcgttttaatccagcaaaatgcggagttggaaagttgcttgcaaagtagagataagagaaattaatctctttgatcttgtgaaaagaaaagaaaagaatatactcaggtggcgtttggatacatcggatgtttggatattaatttaaagtattaaacataaactacttataacactaattatataaatggtgctaattcgcaggacaaattttttaattctaataatccataattagcacatgtttattatagcatcacatagactaatcatagattaattaggctcaatagattcgtctcgcggattagttcagggttatggaataggttttgtcaatagtctacatttaatacttctaattagtgtctaaatattttagtcccatctaaacagccccccaatccattaaaaaaagaataaaccttttatcgttcgtcttattaaaaaatattttatgattagcaggtttgttgttattagatgataaaacatgaatactattttatatatgactgtttaaaaaatcataaacatatgtcaaacgttaaacatagaaactgacgtatgcactttctttaaataggacggaggtagaaggaaaaaataggttaagagcatcaccaacagtctacctatatgatttccaaaactaattttaagagattttagtccaaaaatcagcttcaacagatcccctactctcctaccaagttttggagtttccttctcccggttcctcgctccgtttatatgcgggtgcgaaagtcgctcccaatcacacaatcctgcctctctccttcgttcccgtaaaaaaacagaattttctcttggtagtttaacagaagggtccacttttaagttttggggattaaatttaggctatccattggagggaggagttttttcactttctatttttaatttagaaaaaaaataaatttttagaagaaaattatagataatctgttggtgatgctataagaggatgaaatggtgaggacatggctccaccagcccaccggccaaaacaacgagggcaaggaaatgcataattgcacatgatggatggatggatggatggatgagacgatgcatgggcggccgacgacgaccctgcccagtcttttgttgtgttgtgtgcgttgtttgatccttcgtctgcaccctgccctgcccttgctctgctccgtctcgtctcgtctcgtctttggtattggcctttgtagcatcactgtagtaaattatggattaatatatctcgttagattaatctcgcaaaatagactaaaagttataaaataagttttgtcagtaatctatgtttaatactcttgaataataaaattttggagcactttaatcctagcgtgaagcatccaaacagggccattgttgctgctgccttttcttcccccagccaggtcaggcctgcaccccccccccccccctctttcgtacctaacgacaaacaactcctctatgctcctcccgcctccacgtgtaaaacccgctcaatctacactagtatattcataatactatcacattcgttaaaatcttttatatcatggggaagatgaagcactgaagtgagtagattttgacaaaagatagataaagatgaagatgaaatcagaacacgcaaggtagatgaaaaagtcatcggtatatttttttaaaggaaaagtcatcggtatatgattaattaagtttaattattatacaaactttatatatatatataatagacacatcgtttaacagattaaaaaacacgtgctaacagaaattgagataaaatttgaatcttaaccagaagagaatgaagaacggaccacaggcacaatagtatttagattctaagttatctaattttgagtcgatgatacgtgaatcatttttttttgagaaccttattgattctaaaatccacattgaaaacaagtcaagtctatagctagtgggtttaatttctacatagatgctacaactatgacaaagtttagcttaattagcactcaactagcacaggaatacatatacatatataggagtatccacggtcgtactagcccacagcaaatagtaaattctccccacagcaataggcaggggaatcatacataggagtataaaggtaaaccaccagttgagctgcgatcaggattacagtatatgagcgagaatataatctgttggctccttcggcgagaatcattcaattcacaaggataatgatgatgacattcagcatccatatcgatctcgctgttcaaaaaaagctccacaacgatacgattcgccacaaaaattatgcttacgcgcaacacaaaaagacaagctaccccctctataggtgcgccatccctccatcccgaatcattgccttctttcgtccacaacgcggaaaatattacagaatttacaacgcggagaatttaatcttgccgaatctaatctaactgtaaaattactaacagctctattttttcgcttatacttatcagctaaaatttaattttcgaaccttaaatttggagttgattttatggtttttcatcgaagtttatttttcagccttttcttttagatcgttaagaacacgtatataaaagttttatttgtaaattatttttcgtttgcaaatttgttcagcctaagttttagagctcatttggggcgtaggattcttttacgacgcggagaattttctacatcctccggaatctgaaactagtccctgtaaagtttctgtgttttatgacttgtttgacatacagtactctcaaaatgaagcaaaaaagggataagaatatatcatcagagtatgcaataatataggatttaaaaacaaatgaatgctgaggtaaatatgtttggatggttacgcaaaatagtactccctccgtcccattataagtgcagtgataagtttctgtgtccaacgtttgaccgtccgttttatttgaaaaatttatgaaagatttttaaagttaagtcgcgcataaaatactattcatattttatcatctaaaaataataaaaatactaatcataaaaatatttcaaataatacggatggtcaatgttggacactgaaactcacaactacgcttattatggtacggagggagtacatatgattcttgtaggaaaatatttgcaactttctagtaacatatatgcagaagacaatagagacggaaaggtaggccacattttatctgttttcctttttattttccagatttttgtcctaggttatttggtaaacgcttctagaaaaacttatcaaaaataatttctcatattgcattgttaatttctcctaggacaaagtttctttcataaaaacattgatttaacacgctaatcaagcaatctgcctcaacaatccacataaaaatctgttcaaaaaggaccttggtgtgcattggacttgtcaaaggacaataatagaatactaagaggtaatgagctcatgttaaaattccaacgaaatgaaggtatgtcagaataattttgccattatatttcttgttccaaacaatcctggcccaatttgatggatcttatatgaacatttaaaacacgagaatttaaaaaatgaaaaacacataagtagaatggcatgtcagtgcaatcctatggaatatcaaaatataagaattactccctttgtattgttttgataccacataagaaaatactcctattacagaaatttggagagagaggatgacttttggtgaagtttctcaatgctctaccttttgataaacatttattgtgagcagcaaaccgttttagatgtggttaccgtcatcctatagtcaaaatcacttatattttgagacagagggagtattacagaaatttggcgaaagaggatggctttttggtaaagtttctcaatgctctaccttttaataaaaagttattgtgagtagggtttaccaaactgttttagatagggttaccgtcatcctatgatttggcagtcaccataaaaatcacgcagttattgtgatatatactccactagagagagttaccgcaagtaataatcacgaaatcttacggtttggtaaaccttgattgtaagtcaacgtagtcaagcgaaaccctgggtgcaagataagagatggacgtggcaatggcaggactgctcctgtgaggatggatgtggcaccagggacagtgagtgcagatgctgatgatcagaagagagagtgtccatgtggagggctggccggccttggagcaaaggaaaggatgagacgacggcaacaaaagcaggagagagggagtgtctctgacagagtgacagataggaaagggtcccatggctgctgctgccttcaggtatccgcacatgtctctctgacacgcaccaccaccccccacacagccaccccaaagattattttagaaaaaataaaaaattaaaaaaaaacttctctttctcctccagtactactcgtgctactactggtagaggagtaaaataaacgtacactcgtctactgctgcatctgctgcctgtcttcgcttttggatcccatcaactgaactgttgggcatatgaacacatgccttcttgcctgcctactgtccactccaccccctactgctgtcaaaacaaaaacaataatctggagtaattgctgattagcacatcaaactatgcagctttcaagtttcaactcccatgctttcttcttttgatcagaaaactgagtggatgttttggatggagtctaactttgtcataactcgatttgccataactgtggcaagccacacaaagtgtgaccaataatttgttggccacaactatgacaaactttagctagcaaatgagagtatgacgcgtgggccaatgtgctaataaaatatggattgactcaactgcggcacgcaaccaaacactagcctgaaaaattgtgacacgcctaaggtttggtgtggtaaaccgagaccaccaaccaaacagcccctgaggctttacccacaaggttattattgttgttaattcaggatttaaatattaacggataccttttgtctggctaccaggccaagtggactacctgcggaactactgaatcaaaaaaattaaaatcactccgagcttctgccacggcttaaataatgaataattttggatcataaatgtcaccttctgccacggcttaaataatgaaacattttggatcctaaatgtcaccatgttagaccatgtgtggcaaatcaacaattccagcagtaaacaattttggcccaaaccatcaaaatgacactagtagtacaatcaatctttttggttaactaaaacaggcatggataggagtaccagacaagtcctgcaataaatccagccgctgcccacccacaacattagaacaaccgcaatagtaaagtaagttgctctctataacacatctacatctcagcaatagactagattaataataaacctccttaatagtatgtctacatgggtatctatagctctctaatccattgcctcgtttttctcgttagtagatagctttgctatctctctttatttaatctcttttaagtagaaaaaaatgctgacatagatatcttgtagatagtatatagataatcattgcgggtgcccttagtactactactgtactagtagatggcaaaatggcactactgtaattttgctaccggttagtacatcttaacattggattgtattcatgatgatgcattaagggagatgatgcacgcagcagagtccgatttggtcaacaagaataattcttctttgcttaaatccatcaaccatggatcttcttttgtactagtagtaccattgatgaactacagtgattgttgcttaaggatggagctaaactggatacaccatgatccgagatcaccaccagatcaaggacaacaaagctactcctactagccaacaaaagaaatccaaaacaacaccagacacaacatgacacccaaggctcagggaactgacaatagtgtcaccccccagattcccagatgcagcaaagctactactcctgtactgtagtactactctcctccctaactactcagaaaacaaaaaaaaaagataatccattgtatgccaaagataatccattgtatgccactgagtttgtcataggtctacaatttaccactgactttgtcacgttctataatatgccatcgatttttgcttaacttctacgatttaccaccgccatccggttagtctccgttagtactgtacactttcatccaaatgaccaaaatacccctgagacaaaaactttcaaattttggataaaaattctgaaatgtcagactttaagtttttgga

SEQ ID NO: 22638 - DNA, 1409 bp, Oryza sativa
gatggtaaatcatagaaggtaactaaaagtcgatggtatattatagaacgtgacaaagacaggggcaaatcgtagagctatgacaaactcagtggcatataatggattgtctcaaaaaaaaaaaaagtcactgttgtacacaaacaggatgaatgcaacatcttattgatcctaatcaagtcaagcaaccaagatcaagctggatgcaacatcttattgattctaatcaagtcaagcaaccaagatcattagtagtactatcatgtatacaagtaccatcattattaggagtaattggcagcaaatctgtggtattgttagcagtatcatgcaagcatccaggacagagagaatattgatcatatgctgatgatggaatcgacaaggtggtaaaaattatagagtaaccgacaataatcatctttttcatctcggggaaaccacaaaaaggagagagattttgtcaatctcctcgcccaacacacaaaaccaatccagacatcacgtcttcttaacctgaaccagaggaccagaccaactcatagcagcaaaagcatcatcacacgagcagcagcagcagaagttaaaactaaaccgaaatcccaatagcaaaaaaagaaaaagaggtaaaaacaaaaggcaagcggttcctttatagcaggcaacgcgctctccatgtgacccagatcggcggcaaaactaaagcaataattcgacttaggagtgatgaagatttaggcgagatctaagaggaggggggggggagatggtgttgtgaatccatcacttgtggcagtcgcgggcgatgtgtccagcctcgccgcagttgtagcaggagcggtcgcctccaccgccgaatcgcccgcctccgcctccaccgccgccgttgtagcagtccctcgcgaggtggccggtctcgccgcagttgtagcaggcgccgccgccgccgccgccaccaccaccacctccaccaccaccgctgttgaagcagtccctagccatgtggcccatctcgccgcacttgaagcagccaccaccagcgccgccgccgccgccaccgcctccaccaacgccgacaccgccgccgttgaagcagtccctggccatgtggccagactccccacacttgaagcagcccccaccgggtccaccaccgccggatctcctccccccgccccagctaccgccatagctgcggccgccaccgccagatccgcccccaccgcgcgatccgaagcctcccccgccaccgccgccgccgccggcgccgcccttgacgaaggatccgtcggggccggtgacgtcgacggccttggtgcggccgtcctcgctctcggagatggcgaactcgacctgctcgccctcggcgagggagcggaagccgtcggccttgatggaggactggtgga

SEQ ID NO: 22639 - DNA, 13290 bp, Oryza sativa
ttcattgcgtgcgtgattatgtgcgtacgctcgtgtgttgcgtcagcgtgtaccaccacgtaacagagtttcatgcctactactccagtttagaggtgcaatggatacaataccggttaccgctgggttttcttaccccgtatcatctccaaccatacctattcgaaacagtatcctcccacatagtcactgatatatggatccgtgaacggtgaggctcacatgtcaattaccatgtccttctgactccatgttagaaaatcgcaatcccacctatccgtaggtacaagattctctctatactgtatatgtgcgggcaataactacccgttgcaggtcggactcaggtttaaccaaggtcttaggctaactcaatgcatgttgagccaagacatgtctttttacatttgtgaaaatgcatggtttatatggggttttaggcctaggtccgacccatggcctaagtggctcatgacctaggtctgtcattgacctgccgggtaccgatacacgtgacactttgagcacttgcaatttacactatagtcaaatgattagcaatcatccattaacatcataatgtcaggtatacaatgattttaacatcaaagttagcaaataaacagaccaaacaactacattccaaaatcaagaaattaaatgataatgccatacaacagactagggaagaggttgagaggttaaaggagttttatcgaatgtccccgaagagacaggttaaaggagttgggagtagctatatttatggcgccatatttttcaccaaaaaatagtcggcatgtatttatattgtaagtttctaaaatatatatgtaattttagtgcatttacaatgtaaatctcgaaattacatatgtaattttagtgtatttataatgtaagtaccaaaattacatatgtaagtttctaaattacacatgtgtaattactgtgtaaatagactaattgcattctttgatgaccaacacgtgtcacgcaaagcaaaaaggagtcaccaacttaggagcaagttgttcgattagcttatcagatgtactttacatgaatcgtgaagaaaattagatggtagatcgacaaactgactgtatttagcctagaaatatgtcgacataattttagcaaagccgaaggagttttatgctacagatgataactattggcagtttttctatgcatacggtttttttaaccatggattagtgggtgtggatggctaaagaataaacccgtagagtatatccaatactcctcattactataccatatggatataacaattttttctcactagtaaaaaactgttgggtacttgggtctccaaacgcggaccctcgtcgccgtatctactccagacaatgcttatacaagcttttaagaagatgttttcaccttgatatttatgttttcaagtccttaaatttcctttgcctggtgattttgacttgtctcgtcacaaagcaaaagagcagcaaaaatggaatatgttttcaagcccttaaatttctttctcgtgatttaaacttgtttcgtcacaaagcgaaagagcagcaaacatggaaaatatatcgcctcaaaggcacaaaaacactcttaaagaccatcagcctaaaccttgaacttttctcacatcgataccatagaagtttacagttaacacccagttcatcacagaattgagaggcaatgaacacagctgttgcaacttgcaagagacggttggtatacaatcatccagacatccagtacagaccatgcagtgtatttctacggatattttgagcacagcttcaggcatctacaaacatctcacagccagtgacacaaaagcagttcttcattgtgggtgtcactgcagaatctggaaaaggaagaatctcacacggcgagtcgttttccaatttcggataagcagcgaaggcaacatttaacgttactttccccgccaaaaaaaaaaaaaacatttaacgttacttgtaaccaagcaccgtgacagcgtatagcttgcttgtccaggggtgaatgcccacaccagcaagcaaaagatgggcgacaagaattcctgcagcggaagcagcttttcatcacagctcagcacctgtgatctctgtggctaccggccaaggccatggtccatggctgcctcatgattgccaaacattaggctgattagggttcatgattaagtccctaatgatggcctttaactaccgtgccttgctgaggaattccatctttaatgtgtcctctagttgtgagaatgtcgatgagaagatacctgaaaacaaaagaacagtacttttttgtcattgtcaccgagataaaagaaaaactctaattttgtgcatgtactagtaagccagaggagctatcatgcaattggtacaagtatcatacatgcagaagttctgtttggttcacatccagttgcaaccactattggttatacataatacaattggaatttgagggaatgagctaaatgctcatgctgcacatgtatagactagagatgaacagagcaattatataacctaaccaggtttgaaatatgacaagcaatctctatttaacagaaagatcagctagagattcttgtctgcttgtcctactatctatagagcttgatttacttccctctacaacctgaataattgtatcctcaattgcaaggacggtcagtcgacagtcaataacaaaagcagcagcttcaatgccaacatgccatatgatccgtatctacaggctctgcctcctgcaaacttaccagccaaactctctcaatgcgtcaatggtccctagcgttcaagtgtcatttaggagtatgtctccatcgtggaattagcactagcagctgtctagagccagtgacaattcatatgctagagccagctaggcatcagtactactgtcacccttcttttactggatagacaaccaagacaattctcaggaccgtttcatgactataggaccaacacagcttggcagaggagggcatgaacaggattctccatctcgtgctgtacaatgtacatttgacaccatttggtggatcaaaattttctactcgatcaacagatttcattatgattgagcgtttatgcactgtaaaacaacctcacatctacaaaagcaagtgccaatcatcctgaatagcaagagttagtacagataacgaatcaagtttcagctccccatcttgcccttttagtgttttatgcatcctatagaattaaaaggacacaaatagccgatgatacagacatcaggggatttatacatgcttgaatctggaatggagttatatggcaataggggaagataaaagaggttatcactgcaggggttggaacaaggaactgcataaacatgctgcagcagtggcaggagaggtttcctgcagatgcacgaattcaagtgatttcaggctactcttgtgtttaagactcgatgccatcctttctgactcacaaactggttggtacgttatccaaatctctaggttaacgtggaagtcagctctttccacgcatgccagccagctgcatgctaaataacttgagggtggacatttgtattttctgaatggccacagaccatctggttggtgcccatgattaagcgccagatgctgtattcgttaaaaatcatcacccttaaagattcactcatcaccacttaacctgaatgctctcctgaagatggctatttcaaaggcattgtgtctgctgaatcacatggaattcggcacctatatactagacaacataaatctggctacctctggaaatttcttcaccagtaagctgaccaatggagtaaccttatgtcagttcatactgaaatttgcccctgctaccataaggaacggacaaaatcttacaactcctctccaaatctctgtccgttggtaacaaggctaggctgaggcatacactcgaagtctgattaagatgcaaaataggtttctggaacacaaattaacacatgatgccagaagaagatgggtttgatgggtgacagaaagctttggggcatggacagcagtgagccaatgatagcttcagggtgccaatgccaacggtagttgagggagggtggtagccaggcaccagtgcaccacgaccgtggctggacagtggctacaggcatacagtaaaatcaagtacactgttggcatatctgacaagataaaagaagagtagatcaaatgaaggtgatggtagctggagaattgatgttgctggcaagagggtgatcactctggttgcattgggtgggaaagatagctggaagaacaatagtgagagggaacgaccaagcccccagaggatggattgctgccatgtcacattcatgatttaatagctcaataattcccattttttagtttttttatacacacagatgaagcatccgtgactgtcagtttcacatggaaataataatggccaggccagaggcaaagtgggatgccattagactcaataaaatagctcggaactcaaatcaacaacaatggtatatgcactcaattgaaatataacatacagtgaaatttacacaaaactacaagatcaagaaaatggcatgttatgcattgatgaaaaccaacaaaggtgtatctgcatgtttggacaataaatgtgatatcattcacatgaagaacaacgattacctgacagtgctttgttcaataatgaacctctgactaggagtgtgcctggcatttgttcaaacacctatatggaaaaaatacaatgattttttttttgaaatatacacagaaacaactgacaagttcataggaaaaaaacataactaggtaactgatgaacataatatacttcaatttatcctaagcataccgaaatacggaaggatgttccagtaacaccactatgaagctttgtagagttgccttctacagaaccagattcatcgtgcaacattgcagcctgagcctgctcatctgataaggtaacctgaaagaagagtatttcatacaattcttggagatcgatacactatagaatttgtacaacaacaaaaaggtctgtgtactggtgtaatttgacagaaggaatatgcggcagattaataaggaatcttacatcaatagaaaataatgaagaatcagttttacacgatagattagaagcatggaaaaagctctcagctgacttcagcacttgaaatgcaccatattcacgtcgaaggccctgaaagccattatgtaaatgagatattgaagcgaagaagcttgagaaggtgcaatagtagtggaaactcagtatcaataactcacagataaatataagttggctgattagctctttattaataagaggaaagggcgcaggtattgtccaagaacatacaaacataatggtagataagattcgagttggatttctttttcttttggttgctaaagaaaaatagctgtgcaatttatggaggtaaatgataatatgaatcaaagggacaaaaggtgacgtgatactaacttgaagcataaaagaatagttggcttttccaggtgtactggatctaatgaccattttccttggagcaatgaatgaccatgcaaggccccatctagctgtttgaccttgcacgaattcagtagttttcacaactgacaccccagcttcacgaacttttgaaaccaatatttttagatttgcttttctgccaaccatcgaagtaaaccacctaaaacaataaaaggaacaatgagcccagagacaattaaaaggctattatcatgttaggttagtatttgaatcacctgaaagagttcttaagggaaacactgtcttcaattatacgagttataaatgcctgttcaccaccaggacaaaccatctcttcagcagttccaccgcatgaagtttttggattaagaccagcttcctctatactttcaaagaaaggaggattgcacatacagaagtcaaagctctcactatccttcacaacgccaagaaggatagatggtttcgacctcagtacaccatccactggcttcgaagtgttctccctggctgcttcaccatcaactgcttcagattcagaagaacaggacattttgtttgcatttctaatctcaaccagagctgctagctgtggattgctctccacattctttttagcccattcaagggcaacatcagtgacatctacaaacacaggggtaatccgattaaaagagaaatgcaaataaaagttcaactaacataagaaactctaattgatgctttgcaaaacttatattgtacatgatctaaagcataccagatccaacaaagctccagcctagtaaagaagccccaagcagagggtagatgcaattggcacctgtgcctatgtcaaagccccttacagtcttgtttgaactggatattggtggtatgaggtctgatgagagaagatcctcaatccagtggatgtaattggatctgtttggcacagtagggcacagctgtccatccggaatccacctgacggtagttagcgacaaatgtcatgttcatatattagattaaataagatattgatcacaaaccatatgcatgacacttagccaataacatattgagcactagtaaatattttgcatgacaaacgaacatcacgattctctctcttcaaataaacatggcagctaaaacttcttcagagaggccatttgaattttgaactgttagtgcaacaatagtaccatttctgatatagtagcatcatcagaaaaactactgaagttacttagaacaatcaaattccctcaagctcactcctgatagtagcaactagcatcaacagttcatagaatgacaaatgagacgcaacagcttgagctcgatgctgcggatggctgaattgagtggtaccctagtgattcttcagcagagcaataccgggatgcactagaagcacagacggattagggttcagggaagtgagcccagagagtgtaattagtaccaaccagttgacgccgtggtcgtggaggaggaggacgcgcgtgagctcgcgggtggcggcgaagtcggtgaagtcgatggaggcgcggcctccccgggagacggagacgaagggggcgaaggacgggtagagcgacgccagcgacgcgaagtccggcgccgcggcggcgtagcggttgcgcgggtggatcgccggcgcctccgagccgtcccgccgccgccgcttcctcccaccccccatgacgtggatggaccaacggcggcagagctcgagcagagatcgccggagccccgaagcgccgcgggggaagcgacggcgagcggcgcggcggcgcaggtcgggtagaaaagctcggggttttctccggcccaatccttcgtttagatctttacatgggcctcgagtccctatcacggcccatccacaattcatctttgtcaaatgcagacatatgtttggcagggcttcagttccagcttcatctatctcgaaactgaagttcaaccaaatggtttggagtagattaagtggtatgaaaaactatactaagaaggtgaagcggtgttcagctccacaactccgctttaaactcaactccaggagttggaagtcctgctaaatagaccatagcatagtgtttttgaaattcactgagaaaacaagagtatgaagacatggtttgtgttttcatcctacaatgtgatacaggtaaaaatgaaaaagatgtcagtgtcatttatcattaagcaaaatttataaaccaccaagtttagggtatctgtcatgcaaaccacaaatattgtggttttctttaagaaaccttagattttgagtaaaaccacttagggtgtgtttgaggagaaggggattgaggagattgggaagatacgcaaaacgaggtgagctattagctcatgattaattgagtattaactattttaaatttcaaaaatagattaatatgatttttttaaagcaactttcctatagaatttttttgcaaaaaacgcaccgtttaatagtttgggaaacgtgcgcgcggaaaacgaaataaacaaactcactctctctcaccctctcgaatgctgcctaaggaaatgtttggttgatgcctaaccttgccataactaagtttaggctagttgtggcatggtggcataaatgtggcttagaaatagttggccacaagtgtgtcatgcttagctctaaatttgagagcatgacatgtgggtcccaaagttaagaaagtgtggtataacacaattgcggcagcgaaccaaacacatgcctaaaaaactgtggcatggctaaagtgtggcgtggcaaagtgtgacaaccaaccaaacagccctaaatgtttcgtgaaactttgtgtaggcttacattgttcatttaaccaaatttatgaacagcaattgtgttaaaaaaaaggtagtatgagatattttttttaggtacatatacacttcaaccatattttcaatcaacatcgagtattatcaacagtatggaggtacgtgtgtatatgtaatcgactgttttatatcttttttaagtggaagcggcaagagtattgccgaatatattagaaagatagtgtgtgaccctgtttataaggaaaaccgggccaaataacatacaactgcgcgttttgctaaagtgaaaccggcaaaaattttacacagaagacacaaaagcctaaggcaaacacaactacaaaccgcataaggccgtgggaagagtaagatcctaaggcgaagccggagatgaacaacgacataagccgctgtcgacgcccgacctaaacagttggactgttttatatcattattagcgggggattgtattaagtttttcaataatccagcgcaaggataagatagaatataagatgacaaggttgtatttgaactttgtattggaatatgtttattaaaacattttgcccaaaatataatacggatgtcttaataaaaccggttttgggaaatttaatatttatcatgttgagcaattggagggtttcaagatcattttttgcaatggtgagatttccttcaccaactattttttgttattaaaagggaaatgaagtcatcttgtatttatgtaacacaacaaactctccacatcttcttataattttctcctctgtgtttagatcctgaaatgaattggagatcaggttttaggcgccacagccaggtgcatggagattggagacaagacgaaacggcacttgcctgcaaaaagtagtggatactgtctttctacttctccgttcttccaatgatgaattggtgattggccttttcaaggtagttgcagcaagtatctatctatatatcctgaagatgacaattggaatcgatgttcagtgcgtcgtcaccaccacttgtcatgctttcagaacgtcaacgacacacaacctctcgttttttcctttttgtgaagtaattttggcgaatacgagcaccatgagaacagaatttcgcacaacttggaaagctgttcttcaatttttgcgattcctaacgcaaccgcgtgtggaaagagagaaggaaactaaagtgagatcgatcgaatcaagcatctcctgcgtacagtagctgccagccatgatcacttgtggcagccatacttgaggcatctcgatcgttttcaggacgtctctggcttgacagctgagttgagattattcaggttgatctttttgcttggttcagatttcagatccgtcagacttttcaattctgttttcctactcgttttacaggttctgaaattgccaaatgccgaccaaacgaactcaacacaagacgtgattctgttggtattgggaggagataggaaggaaaaacctgtcctgcaaatgcaaaaatgcaatatgccatattgccttccaatgagagtatgtcagcattcaagcaaacagccaaacacagattatagttcgtcccatagaggctggatgtggaacgttagccaaaaactggatttgtaatcctaattttaattcattttaggcgttccttttcaaattttttaaggctgtgtttagttccttctaaaattagaagtttgggttgaaattggtacgatgtaactgaaaatttgcgtgtgtatgtcaggttgatgtgatggaaaaagttggaagtttggatctaaacacagcctaagtttcggctttttaaccaaatatcaatatactaaacgcctaccgtaaaactactttttcgtaacatcgtttttattctatggcttataactcgaagcctatcaatgtgactagtactattttattacttaatgaaacgtctatacattatatatatcaaaatgttataaaaccgtaaaaaagccatgatatcaaactgacaaaataatactctatccatcctaaaatataaggaattttatgtggatgtgacgtatcttatactttgggtgagaggaagaggtactaataccactattatattgtactccctccatactcgtaaaagaaatcgtttaggacagcgacacggtttccaaaacacaactttgacttcttatttctataaaagtatttattgaaaagtgatatatgtatacttttataaaattatttttcaagacaaatctatatatataatttttatattttcaaactcaacaacttaaaagttatttatgatttatattcctaagatttgatttaagcattgtcctaaactactttctttataagtatggagtaatatgtattggtaacagtacagtatatacagcagtagtagtagaatatactgtactgtagggggaggtttgggccggcagaggaatgggccagtcgcacatgccgtctgcgtgcgcttcccgcgacctagaatatcgcccactcgctcaaccgcatatcccttcctaataacctctccgatccgtaaacctcgcccatgcgccacgtcccccctagtgtcctacctcccggaccacccggtcttggtagaccacgtccacctccccaactaaaatatcctccctaacccaaccaccccacggtaacccacgtacttaacgcgagttaccccccgcaaagatccaaccgcctctcgcaccgcccgcctgtccacccacgcctactgacgaacccggcccacctctccgggccccaccatgtcgtcaccacgcaggccaaaatcggggagagcgtgtcgtggtcccacctgtcattggcttcgtgggtgggagcgggtcacgtgcatctcgacatgactcgaggaggtaaccatggttatggtaaccccaccgccttgacacccgtggttaggggtgggggcgcgcgatgccgccacgtgtgacgatcggacggctgcggagggcatcggggttgggcgacccgcctatttaaccgcgggggcctcgtcttcctcaggccacgcagcgatctgaagtgaaacagcaaaaaaaatcaaacaaaaagaaaaaatattccccatctgtgaaattcgcaaaaccctagcgcggcggcgatgtcgaacacgagggtgttcttcgacatgaccgtcggcggagctccggcggggcggatcgtgatggagctgtacgcgaaggacgtgccgcggacggcggagaacttccgcgcgctctgcaccggcgagaagggcgtgggcaagagcggcaagccgctgcactacaaggggagcaccttccaccgcgtgatcccggagttcatgtgccagggcggcgacttcacccgcggcaacggcacgggaggggagtcgatctacggcgagaagttcgccgacgaggtgttcaagttcaagcacgacagccccggcatcctgtccatggcgaacgccgggcccaacactaacgggtcccagttcttcatctgcaccgtgccctgcagctggctggacgggaagcacgtcgtgttcggccgcgtcgtcgagggcatggacgtcgtcaaggccatcgagaaggtgggatcccgcggcgggagcaccgccaagccggtcgtcatcgccgactgcggccagctctcctagatctgtgctgttccccttcgcctttcgccagtatcagtcgtcttgagtcgtcgagtccctaaataaggaggaggtggtggtggtgttagtctttttatgagttcgtgtcgtgttggtgagatgagatcgcccatggtttggttggattaggcggagttcttggatcgattcggtggagttggatctgcgatccttcttggggttggttttaaatcttaattcgtgtcgctgcttctatgatatcgctatcaatcaatgagaacatttgggatccgtggattttctgtgatcttacacctgtgtggttgtttgttcttgcgacagtactaacgttcttgcgattaaagtagattaaactatcttcgtgagatgagcggtttgtcgccgcgtgatgcctgactttgatgtgatttgtgggacttcgtcttatccatttggttattattatttttttattttgcaccgaggctctctctctgatgtgatccactgtttctgatctctgatgttaccaccaccagagggtaatttgatcgcttaccagatctctgaaattatgcttaccggttagaggggtaaatgatcttacaagttgtttacaggttcaagaggtgaacataattgcgtttcaccagaggatactagaaccttttttgtgttgaaaaatctattattaagggcagcagtactaaactgaattattatgtcttgaaaattctattattaagggcaggagtactaaactgaaggtcgccgttattttagtgaaaagacaaaagttgcaacacctgtagtaggagtagtactccactttgaagaatgaccattctgaaatttgctaggtacgctgtcactgccatcatcttgctgccttgcctcccacaaggccacaacccagcgtacaattgtacaatcaattctctctgttttttttaaatcacaactttcattagccatactaataactccctccgtaaaaaaaaaagacaaaccctgatttccgtgcccaacgtttgaccgtccgtcttatctgaaaaaattatgaaaaaaattaaaaagacaagtcacgcataaaatattaatcatgttttatcatctaataacaatgaaaatataaattataaaaaaatttcatataagacggacagttaaagttggacacggaaactcagggtttgcctttttttttacggagtagtacttagtactatagtatttttttaccgcgagcacacaatatatttgg

SEQ ID NO: 22640 - DNA, 11642 bp, Oryza sativa
tcctgcagcccagcagtgagacttactccctccgtcccaaaaaaaagacaaaccctagttttcgtgtccaacgtttaaccgttcgtcttatttgaaaaagttatgaaaaaattaaaaagataagtcacgcataaagtattaatcatattttatcatctaacaacaatgaaaatactaattataaaaaaattcatataagacggatagtcaaacgttggcacaggaacccacgttttgactttttttttttataagatggagggagtatccttgacatcaatcacgaaatttccctcatcccgagcggtacgaatcgcatctcgtggtagcaccaccagtcaggtctagcggaacaaaaacggagctagtcagatttggaatctgtttatacaattccatctccatttgatcgcagcatattcctttcctgttgcaattaacgctagcgtcatcatcacaaagtgcaactcataatctcatacgcagattgatttgattctccgtgtaaggtgagtttagttccaaacttttttttcaaactttcaactttttcatcacatcaaaatttttttacatacaaactttaaacttttttgtcacatcgttccaattttaattaaattttcaattttggtctaaactaaacacaccctaggtaaaaataccgacaaattaccatcatcttccgaaaacgtgcaagcaaaaaatggcaaaggattgtcatgaaagtttacacgctcggtcgatttttttctccctgtgtgtgtgagccaggtgacggtggggcccacatgggtagagagaatacagggaaaagaggcttgggtcccacgagacagcggctggtggcggtgaaaaggaggacggcgcgcgagattcgaggcagcagaggagggttttgtttggcgtttggctcatgaatgaatggatggatgagggtggggcccacgtacgtgtgcgtgcaggtccaggtcgcgttggtgctacgcagtgtttgacccggggtgggtggttgggtcgggttgggcgggtcggggtcgccgcgcgcgtcggggatcgcgtcgcattggtttggcccaccactactattgctttccctgcccagcccaaatgcaaaatgatgattggcctggccctcgtcgcgtctcgcctgtcagccgcgaaaatattggctcactccgtcccaaaataaatcacagataacatattattatattttattattatataataaaataaatattaagcataaatattattggatgttcaaacgttggacatataaaccacaactacacaacatagtactatttttaggtccccatcgtttcgcttttttttctggcttattaggaaataaaaataaatttgtaggtaaaatttttatatatgtgttcttgatgacttaaaagccaatgctgaaaaagaaagtacgttgaaaatatctcaaaatcaatctcaaaattaagtttgaatatttaaaatttggctttttctttggcttattaggccatccgatgggagccttagtgtatttttttcacgttttaaattgatcttgctgtcaattttactatgcataaaggttgacatatattcctagatataggtacaaatattaggattcaaaatttgtatacaatttaaatgtaaatatacttatagttattatttgagaacacgttgcataaaaaaaagtatagtacgatactcactccttcgaaaaaatctaagacctattttatttttggtttctgtaaaaatctgagtcatatttgtagtcaacatgtgctaaattaaattgttgatcggaaaccaagaaacaattctagtacttattgattgcatgttcattggttttgccatatagtgagtgagttaattgcttcttggttttaatgaaaaagaaatagatctcatatttttggaaggatccatctacttttgatagtcatatttccaaatctgaaaattttatttttgataggcatattttaattcaacaacctatcctcttaatgaatttctcggatttaatgcatgactctccattcttctacacaaaattggctatatgggcatcgagaaatgtaaatattaatgaatcgcttgtttacgagaaatgactattagcatgtttaaatggatgataaatagaataacttattcttaatctatatgccaagatgaaatattactatcaaaagtagatagaaggagtactacgttctagcgctacgagtttgttttttttttatcatacgagttgtacttttatacccaaaaaagtcactctgtcctgtcctgttgaagattacagtactggtgggttgatcttctagaaacagaaaatatactttacaatggattagtagtatggtttggaaattatggagtggtgacgagtagtctgttgaagcagaaatcgctggcaatcaaaagtagattagaaacagtggatttggggcgtgatggcggtgaggttgcaaccgcgcaagcaacggcgtcaatgcctccgccggtctgccgtgattacttcacctgcgaccactcgtctgctctgcgtcattctgcctgacatcctcctccgttcttgtcgctttcacaacgtggaaaatgagggctccattattttgtacgattttcgtaacgtatgaataagaataaaaaaaatataggaacaatatgaaaatatatgtgtaaacttaagaattgaaaaacatcgaaaactttaccatgtatgttcagtaaacaatccaaaaaatttaaaacattgggttggagtggattgttttttccccctataaaagtagagtgataataaattcctttttgctggatccctttaaaacagatggcagtttagtgtcactccaaaggatcccatatttctctatttttcctttaaaatttctttgaaacgaatgagcccggaatggctcatcatcttccattcctcctctcagttccatccaactcacacatggatagagtggagatgcatcactgaacacaagctagtttcagaaacatcactgaaacagccaagcatgctggtggtagtatctatcacaggatttaggagcagctgcaggaagaagagaattcggtttcggtgctacctttcatcctctgatctcagctgtgttcagttcagctcttggcattgctaaaaggaattgttagttctatctagttcagttcagctctgaatatgctggttttacgtttgttgcagatggtgtctgtcactgaagactgaaactacatttaaactgtatatgtatcatgcacgattagatccagatgggctccttttctggcagaaaaccatatacatcaatacatgctggttgctggatcttcatgtctattctttcctgctggatctactatagcttattactagtagatttcccagataatattacctcgatttttcagatagacaaattctgtctttgcacagaaccacacagaagacgacttactttcttcaccctgcatgctggatatatagcccttcaacctataaaatcgatggagatatcatcatcaacagggaactatcatctcatataagttaaaatttgaccttatctgatctgccataaactgaactttggttctacttagtgattatctgggaaaaaaattgttttttatccatcccacacatacctatacaaaatttatcaaatcccaatgcaatgtatttatcctctacttttacaaacttcagtagaataattattttaaaataaatttattttgagattcaaaataaatgggagggatggaaaatgatcatattctgaaacggagggactgagggagtattcgttatactactgctgcttatcttctcttctgggatagggtggcactgtggcagagcatattgaacgttctttggggagagagcccagtttgacaaatagcccaaattggcctactagtcactgggcttaaagctctgagcattttttattgggctcagttcagaattatcgggttttatccctcaattcttcagcttttgatcacaaaggaataagtctattttgccttcctcatctcttgcctttgattgaatcatatctctcaaccataaaactataggtataatgtctcttccaacttcagaaactggtgcaaaatgactccttgaatggtttaggaagctgtttttgttgtcgtgataggtgagacccacatgtcagcgactttcgcctatctcatcctcttacttacctctctcctctcttcaatcttccctcctcctctctcaccttctagtcgctcacctgttgttttgatgccccaacctcctctccctcgctgctgcagccactgcctattgctgcttttgcttcaacaccaccatcgcaacctcctctctccctcatcgtcacagttgtcgtatgttgctgctgctgcttcggggaagtcgagggaaatggaggaggcgctcgcggccacaggaggaccgggtctaacaggcgaccttgggagggtaggatccagctatagggcgatgtccggtggaagagccaaggtgtcggtgaccttatctccttccgagtagcggtggcgccgacatcgagcttgagtggccacattgtctcctctccatcctctcccgatcatcgcggatgacggctttgccatcgttgggcttgagctcttctttatcctccactaccacgccatttgcgtatcttgcccagaccgtctgagcccaaggagagatcttattttgcgcccccggttgcactggatttgattttaaaatcaccatccgcgtacccgacctgattttgcggttaagagatctgattcaaccgagggcaagagacgagggaagcaaatagatttatcccttcacagaaacatgactactgactagtgtcttatttgggtgggcttcaatcctggcccatccacatgtatgggacaaggcctaactagcacatttataattgtcttgtttttcatatatccagatatctatttagccataagtatggcttctttgtgagagatttaccgataaagatctgattattcctaaacggcaaaataggcaggcccccagcggaggactcatcaagggctaaaatcacgcgatgaacaatatcatgggccttaactagcccttgtcccctttctcatgctgaatcaaacattcaaatcagattcgatttaaatagtttcaaacctttcaggacatcctttcattgttctccactgtactggtaagagtaaaacaactgtactggtaagagaaaaacaatacattgagaaaactaggatattgggatattgtggtattgtcttgctcacaaaaagaataatatatgtattttatttccctaaagaatgatgaatatatatgattagcagttgctatcaatcttggctgcatggccaaaatacaatactctcctatggtaagctagctagaactgctaaccagtctcactcacacactattgcaaaacaagatgaacactcgctcaactgtttgatgatgaatatagaagctaacaaaatttgtaattactaataattaaacctttaatcactagctactttgctagtagtaatccgatcgaattcttcttcctcctcctcttcttcttctctcgttgcactgatccaaaaaagttggatttctggcaatggccaatcaggatttcattctacccgcctcatcctgctcgccgcgctgccgccttgtcacgccggatctgttgccgccggagccgcgcctccgcggtcatcgccgccttgcacgccatcgccgcccgcttctgtcccaggtggtaccactccgccgccgccgccgccgccgcggccttggcggcggcgacggcgacggcatcgtcgtcgtcctcctccggcgcccgcgccggctcgttcaggtccagcaccggcgccggccggacaatgtcggctgccgccgccgccgcctccacccgccgcttccgattcacctcctcttcctcctcatgctcccgctgccgcttcagctgcaaatagtaaaaatgaaaaaaaacgtaaaaaaagagaaaatgaaaaaaaagtaagatgaggttgactccgactcaattggggattattcggaaaggtcgcatctttctttccatttggactggttgccaaccatgccggggtgtcaggtgtgtgtccacgcaaacacctcgaccaaagaattgaattgaagcgcaagaaaagagtagcactagtgaagcattgaccttatcatctatctacaacaacgatgaatcgatcgaacataatttgtttttacgattttagaggatgcaaaaattggagatgaatcgatcgaacataatttgtttttacgattttagaggatgcaaaaattggaatatatgtagctgtaaatttttttaccttgcgctgcatctgcttcaatccgtcattggtgctcctcgagctctgcagccggactctgtactcctcgatttgctgtttttttattcaccacaaagatgaacaagtgtgtcaaaatcccaacgatttttgcgatcgggatagttgaactcgagagcgaattcttcatccatccattcagttggagagagagataaagacttggatagatagagagagagagagggtttgataaatctcaccttggatagatgcgagttttcctgcgacaagctcgcgacgacggcgcgctgctcctcaacccactgatgagcaaagcagggaagcaaaaaagaacagatcaatactgcttacaagctaaaatcaaatcgaatccgatcgaattgggaggagaagagagagcgagcgaatcagatctcacctccgcgtgcgacgccggcgccttcctgggcggcgccgccctcgccgccacgtcgtcgccgctgctctcgtcggggacgaggaacgcgagcggcgtgtcggggctggcggcggcctcgtgtcgccgccccacgtccgcgggcggcgccggcttcttctccccaggcgtcgtcctcggccggcgacatccccacgaggggatctcctcgcgctggacgcggcgtctgcggcggcggcgatggcgcgcgcgcacgaggtcggccaggtcgcggaggatggcggccacctcgtgctcctcctcggtgaacgcctcgacgacgacgccaccgctgctcgccatggcggcggcggaatcggcagcgagagcggaggagagatttcttcgtgagcgaggcgagagagagagagagagggagagagagctgagctgcggattggtttggtttatagcgagagcgccacgtggcagcggggagggcgtggggattaggtgaccgcacggtggactccacgggtgactgactggtgggtccctggttttagcgactccgttatggttttgcgtgcggagggagtctggttttaaaggcttcacaataccgccccctgtttcaggtttttttttttcctccgtgtaaacagggaaatctcctattgagtttacatgtcatgaatctaagcaaaaggcttaatttcaaaatgaggggaaatctagtgagttactacaagggaactgtactaatttctaggaaaatttaactaaattttccttaaactagcgagttcgacacggacgagcgatcaaataagatcgagtttttgttgagagcagggatttaataataattttgtaaacaatatccatatgtttcaaaggagggctgaataatttagcactcgcattttcattaattacgcccccatcatttttagattatttgcttcacgctttttaaaatgttttcttaaagaaaattttccctactacatttgctaaaaccatatttgttctaaactattatttgtttttttattttttttcaatgcatctaatttcttcatataaaaaaagtacttcactacactcgagtacctttcgatcgagcaacataaaacatctcaaattaattacagctttttgccacccattggcatctgtgactgtcaaatgtcatgtcaacttgtctgaaaattcctttttgtcagatgaacacacagaaacagcagcagtgacagttttgctatgctaataagctagatcaacctcagctgcggcggctgtctgctgccgccatggtacggcgagcagaagagctccatctgcggcggcggtggcggcggcggcgcaggcagcacggccaccggacgcagggaagagacgtcgtggagccggctgctgtgctgccacgccgccgacacggcggcggcggcggcgtctggccttggatgatggtattgagggaattgaaactgccacatctgctgctgctgctgatgctgatgctgattgggcatgagctgctgctgaatcttcataatggctgggtttggattgcacatgtactgtggcatctgctactcgatggccaagaaacaaactgtgatgagaaattgagaatacaattgaatttgtatagcaaaaaagaaaacaatcatgttgtttgcagtctctcttttatccacatttcgttttgtcggaaaaggaacaggctatgatcaataacgatagaagtggttttttttttctgtattgtaagttgtcacaagaaaaggagtttgtactagtaactgttatgagatgcctataaaaaagttagtggttgtctataaggcattgacagaaaaacgcctcacaaatcttgcaaattctaatagtactattaatgatgtaaatctttcttttgtttcagaagcaatgtgcaaggacaaacctgttgaagtagtagtgcagtgtgcgtcaaattccccctggtgtaagggagatgctgaattggatatggcattgcaccgcggggagcgatcgggggatgtaaatactgaacatgctgcacccctgataacgccgcagaagtgggcaagttcagaaaattaccactgacctgaaagaagcaacacaacatctttcatatagaaacagagatagaaggaaaactgaagtagctgagatggttgaaaaggcggtcactgctcaccatcttttgtcgggcaatggtcgtgtcgcaaacactgcaagatggctgaacaggtagccttacatcgaaatgcaaggcgtagaacttctcgtcttgtgcaccattcttacttatggtagaaccgtctggagaccttgaaatgtgactgtgacaaacttcctcaggttttacccggttttgtgatgccttctctttgtccaaatgcatttggatgagatgacacatgtagacatgggtaatgcttctcttccatgtcttcgagggggtaccatttttattaacgagggaaagctgcagatataaaatttgtcagctcagtagtcaaagaatacaatcatagcagttaacatataaatatcccttcatgatatcagccttaatagaacatagcattcaacttaggagagagagtttccttatccatttattctggaagaaaagaaggcatagaaaaatggatatgttaacaatacttacattctcatgttctccagttcctttcacagtttctgcggcagtattattacacgacgccagtgtgtttgaagatggcctggaaaagggacatatttagagatcgatgatgaaaacaacactgaaggtttaatcgaaagttacttgatcaaatacctatgcgaggcacaaggttttgaagtctggaccggtggcacaatttctgacaatagtgaccatgtattagccaagaaatagtagaagcatcgtgactagttggacaaaacggtatgaactattcaacctataaattgttatgacactataaagctctatgagtaccttgggcagtgttattcttgacatttttcctgtcatgttccagaatatcaggcttcttagaattttcctgcagaaaattcatattggggagaaagcatgaatcgtaaggacagactgaaaagtgaaaaaatgacaccgaggggcacaaagcagtaccaggcaccgaggggcttctatctttgtgggatgaattgtactattatcaaactgcactttcagttgcttccgactgcaaacagaaataatcaaataaacatggagagaccatttaccaaaatacaatacgagatacgacagccatgagcaatttccaacctgttattgtagtctttagatgggctcggtaaattcgttacaattcccaaagaaatatcatgtatttgcccatcatttgacaaagttggatttgtgttgttgcaggtaccaccacaaggcacatgatttatttgtgaaacattgccagttcgttccactggttcatcaagggcaggttggttagctacttccgtaccggcagttggcaatgccgatattttctcatccacctttgttgctcctgtagaagtaaccagtcaattatatatgcaacacattgtcaaaaagatgctgaatatagtgattaatacgataatagcaagtcaaacactcaaactgcaaacatacctgctgaataagacactgaagtaacatttaaatctaagttatcttctgccattcctctgtcggacgacagttcacaaagatggggtatttgagataaagatagcaaagcatccacaactacctcctcctccttcgaaaaatgattcgccaactgctaagcaagaatgaagaaaaaatgattcattttcaatatttggtcctgcctcttgacaaaatgaagagatatttatgagcacaaaaacttaccggaattgcattacatcttgtttctcgatccataaggaaagtctgagagctgatagctgaaagatggcgcctcttcttgacatgccgcggtgatgtagaaacagtttgactggcacgtttatttatggctgaaagtagggggaaaacagaatttaaatattaactcagaaatgtaaatctttaatctataatttgaactgttattttcagtactcaaaacactttagttaataaaacatctaatatgtgtatgcaccagagctcacggaattaaaatgaaaatggtatgttcaaatatcatagcgaaccatcagtttgggttttgtgttctcacaggtgaatagtacccaccttaattaaaaaaatgcactctatattttctatcccgctgtaaaatcttacagtattatatgctaaaagtcttgcgagaaaaaatagcacagcatattcacttagccccaccatagatgtaaactaaaaggaaaaggcatgataaaagcacacgaaataagttgtccctttctatagctctgagagagaggatatacagtgattagtactcctacctgatcttaattttctaggaaccggtggatcaatagcatcacaatcctcagccacctttgaaacagaaaaatgaacaaaaaagatgtacataaagaacaggaagcaaatgattgaacagcagagaaggctaataaacgggacacaaaccttcccaaggctcttcactctcttcctactaatcagactgctgaagctagctgtggtcagtgaggagagcactgtatcatcgtagtctccatcagaacctccttcctcccctttcatgtccatgtcagtgttgcttaatctccacttcaaaacctttgcctttcctttcttctgcctagatatcaggtt

SEQ ID NO: 22641 - DNA, 33397 bp, Oryza sativa
  unsure (1)..(33397): unsure at all n locations
agaggcgactggcattagatatcgtgtgtaactttgtactccggtaactaaagaattttatcttttgaaaggttgtggtacagtttttagtttcaccgtactccagtttagataaactaatcgtttagaaccaataagcacttcatccaagtgtttagttcagagtctttttaaatagtttttgttgacaaaatatttttaaatagttaagaatcagatgacactcttggaaataatgcactattcatctgatgaaaaggtgtacagctacagaacctgtatattaaaaaaaaagaaaataaaagcaatatatagaatcatttaaaaaggaaaagcaggaggaaaaataagctcattggtgaatgtcatatcatgctgcgaggagaactttgtgttgtgaaaaggatagtaatcacaaggtatggcttggggtgcatatctacacgtaagcagtaggtgacaatcgttaagacccaagacaacatcataatattttggagatttcttcacgaaagtttaacctcatcgaaccatccaaaaccagaaaggtctaaacaataaaactttccccgaaaaaaaggtactaccaaaaaaaaagaggtttcttgtggtgtgtgatcgatggtgaggaaagttggcatattttgtatgagctcatccatccaaagttccaaaccaaaaggccaaaccttatattgactgtttaaacataaattcatgacaaacctagattcactgtctgaacataaactcatgacaaacttaatttgaccttatattgactaatacaaattcatgacaagcttgtacaactactgcttagtgcttactctactcatatatgatgtaatcatttactctagctactatgcagtagtggtggtctctagccaaccccctagcagtagtacactagatggtgtgatcctgcccaaagcaatactacaagggtgctaattttccaagaaaataaccttaaaatggggtttcaaaaagaaaataaccttaaaaccaatcacagcgccatactaggaccctatatcaaggtgatcagtggggcccaccagagtggaacaaaagaacaaaaaagagcaccagaaaagattatttttttatttgtaaggatgcattaggaaaggcaaaggagagataattaagataaggggcattttggggaaagatatatgcatgagtgagaaaggaaagctgctgggttagttcactgtaaccatctggactggacacatgagagagaagagagaagagagagagaccactggggcagaagagaacagaacattacataccagcagcagcagcagcagcagtaggagaggaggaagaggaggagccactccttatcatgtgtcttcttgtgagcccagccaccagcttctccctcttcttctccatatccaccatccaaaaggttatatgcccaaaagatctcagaaaatctccatctccctttctctcctctcctccacacttaccataggcctacactacacacaacaaatgcagcagtaatcagtatgaatgaatacaagaagatatacacacacagagagactcaacaacaaagtgaactccagctttatggaagaggagtaatgctagtattgagacaaggagacagcatccagagggtcagcagtacaatggaagcaaaggcaataccaaaaggttaggataaaaaaagggggagttatgcagcttggtcctgtgtgatgaaatgcagaagaattagatgctagcaaagctgatgagggaaggggggaaaggtgatagaaaaagaagaattttttttctctggtggtgtttcttgactggaaaagattcatggatctttagccccccaagaatctcaaaaagaaaaaaaaagactgcatagagttgcaaatcattatccagatccaaccaaagacaccatctttctgaattcttcagggtaaaaatgaaataagattttggctcccattcgctgcagggaaaagatagagataagatcactctgcgcacatggtcgcatcgcaccttggaaaatgaattcagggtattctcccccacacaaaaggcttgtgaattttaacgtcaaatgctctgtccgtttcaagaaaaggaagtagtaataaactatttaattcatgctactaaactagtcatatgatttgatttgcagtgaactccacatttcatacccttttgtctcgaaatcgaaattatgccaagaagttaatcaaacaaacgatggagacgaagcatgtagcaaaaacataaaccaaaccgcgaaatcaaagccaaccgaaataagatagacagacagaacagcggtcaagcccatcctgaaatcgagacgcaaccacgacatcaaagaaaccgcaagaaacagggcagaattgcagggcagttgatgaagaagaagaagaagaagaagaagaagaagaagaagaagaacacaatccacaaccaaaaccagcagatgaatcccccttcccttcctccaatccatccatccatccatacaaacagaccactccgaagcactaacctccagtcatatgcctatgcaccgatccatctctccctccctctctccaagcttcttgatcagcagcaacagagagagataaagagaaagagaaagagaaagagaagatgcgagatggagatggagaaaaaggcgaggaggcgagcgagcgagggagagaagggatgagtaaatgcgaggtggaatggaagagcagcaactgcaggagacgtcgcgctttttgttggccgctttggcgtgggcagaaacggaaaccttgcatctgcatgcgctgcgctgcggctgccactgcacttgcatctgcggctcactgccccacatgtactaccacttcctgtatagaccaaccaaacaccaatacagcaaaggtgaaaccaaggtggatggtggtggtgattggtgcagggtgatctgctcctgcttctatggcaatccctatctcccacttaaaaaatatccccaatctctctttctaactgggtatttagagcaaaatattgttattgtgggttatctattattctagttcttattgttgcctgactattagctctctttgagaggtttttttaataagtagctatagcttcttttaagtaaaggctggaatttatattccattattaaacaagctaaataatttttagaaaaaaccttaataaataattaaaaataaatggtctaatcagtaatgcaatagaacaaagttttagcttttattgcagtcaaggcctaattatctattatataaaaaaatactgaaattttggtatggttggttgcttgattttatctctgctgcatccacagttttaattaatctaaccttattttttaaaaaaaacttaatagatttattagtttattaaaacgagtggtctaagtaatacaatagaatacaattttatgataaaacacatattcttttaggaggtagagcattatagttcatttcggtcatctggtaaacaatatgaaaaggaaaacatggtaacatgtgtgtgattagctagctgtaattaaaagtgcaatcaaggcaaagttatggatgaatctaccacgtgtaaatatggagtcctctctgttggcatgtgattaattgtaccactctttgtacaatctgctctggtccatttacaatatcacatctgaacgtactgattccaattatacaccgcgatatactatatcttttgatttaatggaggagaacatgcaaatatgcaattcaaatggctcaagatgattttcttggaagagagtagaaatgagatcatgcatacacatgagttaggaactcatcccgcgcatacgcaaaacggacaactcattagtacatgattaattatgtattacaaaacagagtagttattttttttagaatagtactaatatgatttttaaaaataacttttctatagagtttttttgaaaaacacaaagtttagtaattaaaaaaaatgtacgcgtgaaaaacgacaaacataaggtggaaaatatggctgccgaacagagccaaaatcagttgcagtgtgcagaggtgtcagtgactcatggattagacagcatgccaccaaaacagagaaaaaaagagatagcaatacgattactatgctagtctcactggcacgtgggccatgcagctgacgcagcacagcaccgtgtctcaagggctgtccagagtttgtgtgggccacaaactaactacgcacagaaggttcaatgggcccatatttgcaatccgttctggcccaatacctgacagcccacagcaagcccaccagagagctgggcccacgcgtcagttacacgtagcgcgtgtcccctctcgtttgcctccgaatcgggtaaagccgccggtggacggaatcgacggcggagatcccatcccttccccttcgccttcacatattccttccccctccaatcccaacacagcagcagcaattctttacttaccgtctttgcaaccttatccacctcctaaccactcactgacatcttggacccacaccccagatctagccctccccgcgccgggtataaaacccgtcacgtttccccccatcctttaccaatgcccccgtcgcgagcgcgtccacgtcagcaaagtccctgcatgacccaccggtgacactgccaggtgggtccttcttcctcctgggcccacagtcagtgactacgcgtagcggacgggaagagaaaaggtaaattatttactcttacgattacgctaatttcctcgcgtcctttgcttgcttagattatccccaaaaaggaaattattaaactcaaaagactcttgtattttctctccccttggttttgaattcgctcgccgccgacgcgggtggcttccgtcgagaagcttctggaagcttccgggaccggggcgccgtcccccgcctcggcgttcgtgcgtgcggcggcgaggcggcccgtggctcggcgatcgatccgttgcttgcttgcttgctgcgggaggaaaggtattcccctctcgttaggattcgatttcccgtacacgttacgaatattagcttgtggttttagatgtggattaggcggctgctgctgccgtagtagtagcggagctgcgatttctgcgcttcggtggtgtttccgctgctgcaatcgccccgcgcgaggtggcgttcggttcaaagctgtgcgcatttggggagatttgcgagtcaaatgtagcgattccctgtgtgctccgttgatttatccgcctaggtaggcattagactcgtctgaattgcggggagcggttttggctgttcgtttgatttctacctgtgtgcttccattttattcgttttcaaacttccgaaactaatatatgttttcagcatgtttaggttatttggtttggtcttgtctgtactagtaatcatgtggattcctcctattgcttgtagtgcttgtagtaatcaaaagggttcctggaagttgctatgatgctaccatgattgaacactgcacttttaaatgcacaattgatcatgcagtaggaaaggagtgcttccatttattcatgtctgctgttctgcaattgctcctgtaaatttgatgctcatagtccatctttgttttcctaggccatttttgctcaaaaaaactgtataccccatgctctgacagatgtttctgtgaaatagggctcaagatggtcgtctcaatcattaccagagccttaatgtaagtagcagcggtagtttccttttaatttctggaaaggggcaatgattttggccacacctgttatgtgttttgctatcttttgattttgcagacttattcttggatatgcatacccagcctatgattgctacaagacagtggagctgaacagacctgaggttgagcagttgcggttctggtgtcagtactggtttgtattggacaccccctttactttagactatcattcttggatttaattctctacttgatcacatgctcagtgatgattttacaggattttactagcagttctaactgtttttgagagagttggggataattttgtatcatggtaatgtggccatctgttattgtggttttttttgtggttgcagtttggagggaactttcatgcttgctgatgatgattttgttatcatacaggttaccaatgtatagtgaagcaaagctggcatttatcgtgtatctatggtatcccaagacacaggtatgaatttcttatctctttttaatttcaaaatcgtatggcttttgtaatggagagcattttcagggcacttcctatgtgtatgagtcattcttcaagccgtacattggcaaacatgaagctgaaattgatcgcaatctacttgagttgaggactagagctggtgatatggcagttcattacttccagaagatcgcagactacagtcacacaaggttctatgaaatcttgcaatatattgcttcgcagtcagaggctcaaagatctcgtcctcaggtacttcagaaaactcttgaagttgcttgccagccataatctctcagttacttccatttgctggtggaagttagaagaataggtctgcagcatcgtctctctcttgggcagatcggaactagtaatcttcatgattcatgattgtatttaaaatttcagaatcaaatgcatgcagtaacatacgcattcagcaaatttgacatacctatgaggttatgacctattggttctatattcctttcagccctgcatttttcacatcccatgtctaccattaggtatttaggttcatatttgtgttgctgttgatgagatgcacaatcattttcataagtaagacttagcttaatcgtggtataaatgtactaccaagcctttctatggaaaggtctgacatatgcatttcagtgcattttttcttcttagtgcttgaagaatttgggttactatatgatatatgaatttgattctgatcctgtgggatatttactgaactaacaatgaaaatccaacttaaaaataatatcgcgaggttccagaaagatagttaacctaatgccatttcagtggattattcactatttctctatcagtggtaccttttttgagaacttatgtgcagctgtttgaaaggctgtgtttgactgcttgttgttgagaagttcacgccaactgaatgtatatgtccggctacgtgatcaccatctagcgacttacatttttcttgtttgtttcatcaatgggtctgttagggggaaccaatagttttaaacacagtagcttattttttaaaatctaaattaagcattgttcttagatgtattagtaatatctgttgttagctggtgtcctttatttctctggattatttctgagcttaggagcttgagctaatttgaccatgctgaatcaatttcttaatatggtagttttactagttcttgttgtaaggtgctggaaagtttctaaaattgcttcagcaagagaagcacaaccaagtggatccgattcatttaggtcgtgtgttattgtggttatcttttgccaagctcccttagcagtgactcctaactagggaagttattttgcgccctaattccatctgtgtttcaaacatgaccctttattttattatcttaacttggttaatcatggtgctgattttaccctccaaataacctgggtccacgaaccaattgttttttgggtctctaggaataggatgtggaaccttgctgatgtcgaaatggacctattatatgtttattaggagtaaatgtataggcgcttcatagttctgaagttgctattttttgtgttccaacctttcttgtcttgttattttaccatatttataatttttttgactgtttcatataaactattcattttgttacatggaaattaccgtgtatagtttggcaatgcaaatatttgtggtcattttctggcagggttcaagttgaacatctccaatttatttttgcttctagcaaagttttttttttttttgcagggatgcttctagcaaagtttgtttcatgcacattttttctcatgttaaattattactaccaccatcacactcattatgatgttacactactcgtcatagtactaatgtatgttcagtttactgacaaagtaggctatctgggcacagtttactgacaaagttggttaaattaaaactaccaccatcacactcattttcagtttactaatgtatgtctagtaaagttgttgacatgatgcatgattgagttgttatctgagcacttagaggtgtaatatccgcttcatgtttctcagttgtatgttcagatgattgtttttgaactagatatttattactaccttcatattttaatgtatgacgccgttgactttttatcaaacgtttgaccattcgtcttattcaaaaaatttatgtaattattatttattttattgtgatttgattcatcattaaatgttctttaagcatgacataaatattttcatatttgcacaaaatttttaaataaaacaaatggtcaaacgttggtcgaaaagtcaacggcgtcatacgttacgatacggagggagtatttattatcgcgtgatgcctgcatcagcttatatctgtgtagagctacacctgactctcaacgtctctgtttctgcaggcacagcaacaccagcagcgtccaccacctccacggactcggcaggtgaaccctgcaccgccgcctgttccttcaccgtcagcgcctccgctgccgccacagcctccgccgccaaggaaccaagctcaagctgacaaggccccaattccggtcgcccctccaggcgccgccgtgcctcctgcacagccacagccacagccacctcaagcaggcgctgaagccgtcacaacggagagcaccgaggcgacgcaggcggccaatccaccggcgacgacggcgagcaacccgcatcaagcgccggtaatacccgacgaggagacgctcatccaggaggcgatccggatgacacggagccggctcaggaggcgcatgggtggagcttgaactggaccgccgccgatgtacgtaaagctcccacgccacgggatcatttctcgtcatacgtttcgctctcgacgcagggtgcacactgcactgcatgcacatcctgaaatctgaatcctgtgtaaaaaaaaaaaaacaatctgaagcctgttggtttcgtttcgcggtttcgcaattgtgtatagatcccaccaggtcaccaggaagtagaacagtagattgatggacattgtgatggcacgagaagatcagtaaccgagtacattggtaaagaaagaaagatacttggttggtagatgatatgtgaatgtgagcaacttaggacaattgtccctcatctccttgccctgtgacaattgtcctttcctccttgccgacgataagatacaagctgattcttttcttttctatcactctcaagatactcttcggcctgaaaaaattgaggatatattgccaaagctgaagtcacatctttgtcacacacgagaatctcatggtaatgcaagaacttcattgtctgctaaggaaatcaaagtttgcacttagtttcatccctgccaatatgataccttcatatatttcctcataaagtataaggccctgtttagtttgcgaaaagaatttttttttggatgtcacattggacgaccggatgtcggaagcggttttcggacacgaatgaaaaaactaatttcataactcgtctggaaaccgtgaggtaaatttttttagcctaattaaaccgtcattagcacatatgagttactgtagcacttatagctaattatggactaattcgtctcgtgactttcatgtaaactgtgcaattagtttttctttttatttatatttaatgctctatgtatgtatccaaagatttgatgtgatgtttttggggaaaaaaattgggtactaaaccaggcctaaatcactccatatctaaacttccgaggccatctttcagcagacctagataaaagaaaacaacaacaacaaacgaacgaaacttcgacctcgttttatatttcgtttgtgaacttgtgatggcaccccaaaaaagggggaaaaaatgtcaggcaagaagccaacgaaacttcgacctcgttttatatttcagaactaacttcgacctcgttgatagacgatgcttcctatgtgaagatcagctacaggtttacttttgtcattctcgaaagtccctatctgtgtcgctctagttgaaatttcgccaaagcactgagaccaggagccaacctggatcaggtcccagctagctgttgatggcaacctggttggctgcttcctacaaccttatgttccattccgttgtgccagatatttagacatatacagtacttcatccgtttcacaatgtaagtcattatagcatttccctcatttatattaatattaatgaatctagatgtctagatttattaatatcaatatgaatgtgagaaatgttagaatgacttacattgtgaaacggagagagtatcatttgttagaaataataccattaattgttctaaagtaagcgtaattctagaatgtatgcattcaaaccttgattccttaaatcattaataatatatttgttatgaaaaaaacttccttctgattatattttaaataaattttataaatatataaaaacaataatgagacatgtgcattgtgtggatgttcgaaatgacaaagaaaataacgaagccattatagtcgtcaagcttattttccccacataactaaaacgtggttgcaaatgtgggttccatattatcacgtatactcacgtgatcatgtcacatcttgatggggaaaaaaaatcaggagccgcaccgactcaaaggttgcttaggcttcgttcgattgctctggagggggagtctaaaattaattaaatattaattattacaaatttaagaactgaatttatttgtttttaaacaacttctatatataaatatttttttaaaaaattaaatacaccatttatcagtttgaaaaacatgctaatgaaaacgagatagttgaagtttggagttgaagaatataacatggccttagtaggaacttattgttcctttctccgatgatcttcgacctgaagatgggccaggaatgtagtcaaaattgtacatattacccctttccgtattctcgttttataaataggccctctagaaaatttattttaaaatagacccttaactcaacggcattagcaatggaccgaagtatgacacatcggtgttacaaattttgtcgttgagaattgagatcctcgctaagctagcacaaactctatgtcgaattgtcaacaggtggttgccgccaaaaacattggcgcaaacattatacataatttgagaaattagcttacatttagccagaaaccaacgagtgaatggtaatttagtaatctgttgattacgtttacataatatttacatcattacttaagggcatatttgttggttaatctatcagtttacgtcaagctcaggccagctcagtaaggttcttgtattttgatgtcaaggttgatgctgggtttatttttagaacaaatttttagtcggtctatttgtagaacaagaacataagtaggactaagatgtaaaaattccggggtctcgtgaatctgtgatagtgataaatctgtcctaaattgtaatgaggacaagagttcataaatctaaaataggtagtacagcgacaactccccctgcagtgtgaaaaacaacaggtttatggttctatacgtactattaataaacgtgtatgcgcgtgtgaaattgggcataaatacattttgttccagaggaatttggttcagatataaaaggtacacgcatggtgaacctcacgaaatggaacactgttgactgaccagtatgtacagtgcgctccatgtttaacatgcacatgaccatcttgaccaaaactagccctagatactacaaacccatgattgatcttaattaacggcaattatattctctgccctgtttttaccattaacgcttaaacgaaatgttgcgaactgcaagtcgtcctggagcatctccaagctagacatctcttaaaccttgctctccatttacggtcccatctttttacttaatcacggaataagctaaacgatatatttgcaaacgaaaaataatttatgaataaatatatatatgtatatgtatgttcttagtgatttaaaagtataggctaaaaaataaacttcaatgaaaaactctaaaaccaactctaaatttaaagttaaaatttcaaattttggctaatgagtattagcatatcatcttttacccatttgataagctagctagtcaaagattcatctctatatttttcatgtgctctaacatgcaatatcctctccaaactacactcttcattttttttgtgggatccacatttcagtctatatctcatttttccttctcttcagcacaaatgagtgatttgaccagctattattctggcttgctagatttggccagcaaaggagtgattttactagcgggatggctcggtcaaccaaatatagcaagtctcttggtttgtttttttctcggggtttgcctaattttgacgtgacgagagatccacctttcttggagatgctcaaatttttagttgggtgccaatttttttaagtatatggacacacatttaaagtattaaacgtaaactaataacaaaacaaattacagattccgcctgtaaactgcgagacgaatttattaagcctaattaatccgtcattagcaaatgtttactgtagcaccacattatcaaatcatagcgtaattaggctcaaaagattcgtctcgtaatttacatgcaaaatgtgcaattgattttttttcgtacacatttaatactccatgcatgtatccaaacatttaatgtgacggaaaagttggaagtttgatgaaaaaattttgaatctaaacacggccatagtaatgcagctttcgatatttagactgttcggagctctttgttcccaactcctcttttcgttttacgcgcgcacgtttttcaaactgctaaacggtgtgtttttttataaaaagtttctatacgaaagttgcttaaaaaaatcatattgattcatttttttaaaaaaatagtaaaaacttaattaatcatacgctaatggatcgctctgttttatttgcacacaacttgggggttaggaatacgggtttccaaagtccaaacgcagccggctggttgacgaagatgacaatgtgaacgcagtggagtagtgcgtggtggagggacaggagggtgcaacattgtgacatatgcatgcatattcagtagtagtaaggtggcgtatttggatttcccgtcaatcggatctttggatactaatctgagagctactaattgtaacatagagtacttacaaaactaattgcaaaaaataagagctaattcatgagacaaatttttttaacctaattaattcataattaacacatgtttactgtagcatcacatatgctaatatagattaattaagctcaatagatccatctcacgaattagtccaatgttatgtaataggttttgtcattagtctacgtttaatgcttctaattagtgtcacaacatccgatgtggcagggattaaaatttaatccctggatccaaacagagtctaaatctccatcatctagtatatgtttaggttggacattgactgaatagcagaggttatcgttgactctgctctggttcaattaaacaaactaatgttgtatttaggggggaaattatgccaaaattttaaaattataacaagaactcttgtatttgatttagttaatgaaattaaataagtttataatattataataatagtactttttattcaattctatgcatagtatttgttttgttttgttttcaaaataagtgtttgagaaataattgatgatcggagttttaaaacataaaatattattttttttaccggaaaaagtactatacaaaaccaacactgccagccatgtgtgtcatagcaacaggcctaacagaagaccgatggatgggtcagcggatgcagcaacaaatcggcaaaaaatggttccttatctccaggggtatcccttcgatttcgctaattacaacgggaaattccaaaagaaaaactgaaatgatagtagaaatcacgtggtttactgatcattggacagtgggtgatggcactggcctttgttcattccatcgaaggtgacagtgaccggccagcacctgtactgcgagcattttcacgtgttcatgtacccttttattcataaaaataaacattctaagtacttcaaatttattacaaatactaaaatatcatagtactattcgtcttataaattacttcttatttaaatttcgtttatcctactgtcgaaacaagaattcgacaataataaaatagggtagcgcacgagacctaaaagtgaatggatgcggagacaaggatttagacaggttcaggctctctcgatgagatgtaataccctactcctgtttggggatttgaatccgtcgggtgtattatagatctgacgatctagttgtgaattataccccctagagggcctcctgcccaccttatataggatggggggcaggattacaagatagaaaccttaaccaatacgatatcagtttcctaaatctactttacaatattatcaaatcaggactttaggccgttccataatatacaaggaaacgtaatacccaagtcatgatccgttacatatttcataaatataagttatcccctataaccagtcggataaccataccgtgtgtgtatgaggtacccataatctccacacctacatcaacctgtcctcccatcccctatacatttctcattaaatgaggagcgtcaaagttctatcttcttgatcttaatatctacttaaataagctagaaatgcttatatttgtggatgaaagaggatatatcatattatggggatgtttggttattaatgagattggttgacaatatgatattgaatcttatcgaggtaaggtagaagaagacatgaactgattttatgttttattgatttactacgcgatgactttattgaaaaagatcatgctcacaatatcttttttcacttaggactagatatccatattatcaccattagtattataggagtgtttggttcatagccacattttaccaaatgtttagcaaagttcaatcaatctggtctaacgtttagttttttatatcgcttttgtggcatgctacaaaatccttcctaaagtttgtgtaattcaataaggatttcctagccacacaaattatggtaaagcagcacctcagttcaaaacgtttagcaaattgaaacatgcagccaaacaacccaacccaataagacaatgacgccgcacaacgtacagttcatatgggaaagccattttaccaaatagtgatatttttataatgaaaatttgactatcaaaatatgacgtcatacaagtatcataattacttaacacttcacatatataagtttctcaatatgtagattgagttttgagttagaattttcttttggaatgatatgacacaggagagatactcaatattcatcaaaatatttaaatattttttataattaatttgttcgggagtttataactaattaaaccacctgatcagcacagtcagcaactcagcattattcaagcgcttgtggatcccacacacacttcccatcttcgatcttcctataaatgaagtggccatgcattccactttttccatcccatctaaactcgcttgagcttgatatgccacagatcaaggcttagaagagatagctaattactctacgctaattaatccagcagcttagcttagcatagcttatctatggtttgccacgtcttctcgtccttctcctcctccctaattcgtgtgctggaggcgccgctgctccttccagctgcttcggcttcttcttcttcttcttcttctccggcgagccggagcggtggccgccgccgccgtgcagcccacgtccgcccttcgccggcgatctatcccggccgccaagaacttgcctctcactcatccatgctacccaccgacttcgacatcaaggtaagctacgtaccctaattaaacaattatttaggtagctactttctctattttgtactattatagtcattttgttttttccaatcagaatgtcaaatatgtttttatgctactcccttcgtagcaagagttagaaatattttatatttaagttcttttgcaaataagttgttactatttgtaagtctctatatatgcaagactttaatagataagtaaattaaatgtttgatcagagatcatccgatgagtcatcttaatactcattgcatttgttgcatacgtgtgcatgcaattcttgatctttgctatatgtagaataagttaatttttctttgatcatggtgccaaaagtaatatgtataatttttatgaaagaagggagctagtatgtttgttttatattaaaaatgttattaaaagtttaacttacataaaagtcaaaacgaacatgttatcaaatagtgaaaattaggtagctaataatgaacaccatgcatgatactactaatcaatatatttgattaattgctaatctagctcgtgtttaattgatctgcaggtgttgattgagcggcacgaagccctgacggacgacgtgcaggagatgctgcagcatcaacgccggcgacaccagaagacggcgagcggcggccgggagcggatagccaccgtcgaccacctcaggcgcctctgcatggaccactacttccaagacgaggtcgacgacgccatggacgcctgcctgctcgaggagctcgcccatggcggcgacctgcttgacgccaccctcgccttccgcctcatgagagaagctggccaccatgtctcagcaggtgagatgatcactctttatgtgcgaacgcgcgaaagggttgcacgtcaatactttagaagaaaaaaattatagttacacaacgcaatcagctagatcggcttataccaggagaagggagaaaaagcaaaataaaaagctgaagcttaaaaaactacagcggctaaatacaaaactccaagcagttgagaggggccgagccacgctacactcccaacaaatcccaaaaacggcaacaccagctaaagaacacagatggccctccgagggtgtgagatgatcacacactaatgatcatatatcatatgttacagattaatcaatcaactaaccatgattaattgtcaattgcagatgaggttcttggaagattcacagatgataatggcgaattcaggctcgattacagaaaggacatcagagggttactcagcctgcaagacatatcacacatgaacattggacaagaagcctcactctgcaaggcaaaggagttctcaaccaggaaccttgaatctgccatcaactacctcgagccaaatcttgcaagatatgtgaggcagtcgctggatcatccctaccatgtcagcctgaatcagtacaaggccaggcaccatctcagctacctccagaccttgcctatccggtgcactgccatggaggagctcgcacttgcagacttccagctcaacaagctactccatcagatggagatgcaggagatcaaaaggtacatattacagtacatacattattgaatcattgatatacatactagctagctagctactccccccgtcccaaaatataagaacataggattagatgtgatattttccaatactatgaatatggacaaacatcatgtccagatttgtagtgctataaaatatctcatctagtacttgttataatttaatttttgttgtaacaaaacaacaatgattcttacttagttgaaacacacttgtatcgaacaatagtacgattcatagaatcatagaaacttactatctccgttctagaatgtaaaaggctttagtgtttaacacggtaatcaagaaagtaggtagaattaggtggtgtttgaatctcctgaagacgaagatgaagataaagattaagtgtttcatacaaacttgaaagatggattgatctgattttttagaacaactttcatataaaaagttttcgtatgaaacgcaccgtttagtagtatgaaaagcgtgccaatttatccaaaagtttatctacttttttagtggattcgaaagggaccttaaatggagagatgttgtgattagggttgtgaacctataattggttggaaaaagaatatcaatggagaaattataatatgttgggataaattcttagttgtagaaaggaaggaatacatgcatagtcatagctacttgctatagtttaatttcctgtattaattgaacaaccgtgtttcttcttaattagttagttgaaacacacttgtatcaaacaactgtaagaatattcataagtaggagtagtaccttgctcttccatgcatagctacttgctgtaattaatttcctgtattaattgaacaaccgtgtttcttcttaattagttgaaacgtgcacgcttgtatatatcaaacaactgtaagattcatagtaccttactcctagctacttgctgagtaatttcctgtattgactgaacaacagtgtttcttcttaattactttattcattttataatataaaagattttagatagatgtaacatatactagtacaataatgaatctaaacagtctgacacatcctagtaccagattcattgtactaatatgtgtcccatccacctaaaatcttttatattataggacggagagagtatcaaacaacaatgtgattcgtagtaacttacatgcatgccaactacttgctgtattaattgaaacaacagtgattcttcctaattagttgagcagttgtatcaaacagcagtggttcatagttaatttgctggattaaactttgactatgagtgtctgaaaatgataatatgaactatgcatgcagatggtggatggacctgggattggctcaagaaataccagttgccagggaccaggttcagaaatggtttgtgtggatgatgacagccatccagggtgcctccttgtcaagatgcagaattgaactcacaaagatcgtctcctttgtctatattgtggatgatatttttgatctggttggcacacgtgaggagctctcctgcttcactcaggcaatcagaatgtaagtctcagcttaagatagataattaacatgagtcttcaacatacatttgattttccctattctcttttttcttattcactggattatttgctctacacatagagatatgatttttcaaaaacttcttgtctagctattttatttcttagactacttattactaatataagccatttgttacatttataatatttaatatttaatttgtccctataatcaagtagatatataccatcaactttcattcgcgaataatctatttagaacagagccttaatttaaattgttattatgattataagtaacaattaataatgatttttttacaggtgggaccttgcagctgctgattccttacctagctgcatgagatcatgcttcagggctctacacacagttacaaatgacatcgcagatatggtcgagagagaacatggagtaaaccctatcaatcatctgaagaaagctgtaagtaatttttcgtttgtgttagaacatttttttaaaaaaatctcattcacaacgaatttgcagcaggactgaccatgcatatgcaatgcaattgactgaactttctttctaccatgtgtatcttgtgcagtgggcaatgctgtttgatggattcatgacagagacaaaatggttgtctgctggccaggttcctgactcagaggaatacctaagaaatggagttgtcacctcaggagtgccacttgtatttgtacacctgctgttcatgctagggcatgatgtgagccaaaatgcagcagagtttgttgatcacatccctcctgtcatctcctgcccagcaaaaatcttgagactctgggatgacctgggcagtgccaaggtcaatacctttttctcaccatgtcaaacatgctactcccggcccttcaatttctttaatatagataatgtcgttgtcttctgtacatacatcgtctggctactgtatttggtttatactttaagtatgacttacattttttttcatatttacataattttatttctaataatatgaatagttaaacacatgttaaaaatcaacgatgtcatatttattaaaaaccgggggaagtaattactacacacttatacgtagcaaattaatcttattcttctttgaaatcttattctcatgttttaaatcagcgcccacacacacatcaaagcaatatggtatctctgatatcttctctaaggattgtaaaaatataattattttaaaaaaatgtttaaagttgtatgggagattgatctttgctgggcctatcgtgaactgaaaatgtatgaaataaaaattgtaggatgaggcacaagaaggattggacggatcgtacaaggagctatacctcaaggagaacccggggctcgccgctggcgaggcggaggagcacgtgcggcggctgatcgcgggcgagtgggaggagctcaaccgggagtgcttctccgctagccccagtagatcgtcgccggcgacgaccttccccgccggcttcacgcaggcggcgctcaacgccgccaggatggtcggcgtcatgtatggctacgacggcgagcggcggctccccgtcctcgacgactacgtcaggatgctgctcttctgaattcgatcgattgattcgacctgaattttaatttcatccatgtatgaacctcatcatcgtccatgcataatggcgtgtagagattaattgtggattaggtctttgtaaataggattatagttagttgagtgagggagatagtactggtcgattttgtagtaaataaatatgatgaatttttactccctccattatacatattataaggtgttttagtttttttttcctatgataaactaatttcaaattgaatgaatttgggcatgtaatttattgccaaagtttcattttggattactctttaacttatgtttttattttggaccatataattctacattaatttgttgcactttagaccacttcaaaccactttctgtaaccatatatcaactctagcactgtaataaactccctcaccatgctcaagccacaattgataattttgttggcagagtggcgtacatggctagagaaagccttaggatgataaaaaaaacaacaaatgtaaatttacctagtacaaaaatgaaatgattagtcaaagggtggttcagagaaaagacttaacaataaaatgtggtaaaaaagtgccattcactctctttaattttcacagaaaatatagcaatattttttacacaaaacaaatatatatttaatggtgaaatgtagatggtgctatgttttttcataactttgatcgaacttgaaaaaagtttgaagttaaaacaaaccttttcatgccctgcagcatggaacatagagacgcgcaatttttttttctaaaaattatgggcgtgtatttggacaatggatacgaataaaaatcatcaagagccttttgcattcatacgagcgcataataaacttggagtcgaaatactaaaaaatgtgaaaattgaaaacaaaaacatcaatatgaggatgacaagtggggcccaccgggggagggggtcctacatgtcatactggtcacgggccgtgctgccaagctgtcaatcccaaattcacctctcgccgtcacgcgaattccggcggcgacccacctgcccggcggccggctacccccgccacgcaccaccgccggatcaagcctccctgccacaaaccaggagctcttcctcgccggcgctctcctcatccacccgtagcaggtgaccatctctccttcgcgcgctctcctttgcaagggcaaggaagccctaccttgcttggatgacttgaatccaaaccggatctcgcttgtgccgatgtgttttggtttcaatcctctactggtattcgcagctatatttccattcccccaccccgcgtttagtccccatcgcgtctagtatgacgatttttttttttaccatagattgggggtttggaagtagattgtatgttggattccactctgttggattgaaatactctaatcattgtttgcagaacccagattggtgaagtttccctggtgtggaaattttttcattgtgctcttcaatgttgtttgtactatcataaacatcaaaagtagttcagattctctgctgcataattcacactaaatgtcccatcacgaaaatatcctctgcgttgttagtgatacactgataatctgatatacatgtgaataggtatggtatagttatctgcggtagaatactatggaacccatgcctaggcttatttttgtgtatgatttggattttagagaggccctggaaatgtgtgaagtggttagaaattttaggtgtaactgtaattcacaggctaatgttctatgtatgtgtcataatcggcttctgaatcttttcaacactgaatggcaatataaaggtggtgtaattttgactcaccaatcgtgaatcatcatggatttgtgaaccatagcattttttgtcatcttttctgcattccagcctgtgactaacattgtatcttacatggaatttcctggaatgcattactcaatctatgatctgcaaaatgaagcccaacagtttcagttgattttgatatttccaagatgcatttctgttaatatttttttatgatactcagttgacaaaagataatcaatcatattcttttttttgttcaaatttctgtcgatgctgatgtatgattgctttgttattttctgtgtaggaatggagaagtatcacagcaactcccgatttgctcccttcagagatgctccatttgctctccgtggtaagagattttcagtgatttggtatgctatctgtccttctgacgtagttacatgatatcaaacaattacaccacagacacactgaattggtaatattggagacatgcatacatctttttaagtatattcttgtatgtaggaggtaaaactgactgacagttgaggtatcccaaggctggaaactacattagagtgtcagtctgccaaatagtggttcagttgagacaagtctaatactgtgctgatttatcaccatatatagattgtctgcatagctcgagatgatcaaacacagccgtgtagcgctggtcatttattatctgaatgcaaaaggctgttgctggtcatacatgatttatcttttatggggacaagagtttatgcgtgtctgacatgactttgatcacttccggttggatataggtgaataattgatgtgtagttttagtgagaaacagccatctctagtgaatctttagcaagcaactgctaattctgtgtatacatgtatagttcacaatgccttcaatcagatttggtaaaatgcaatcaagaaccccccccccccccaaaagttttttgtgtgctcttgctctatgtatgtttttttttttttttgtttacagttcatttcacacaaccaggaattcctcacatttgttgccaccatactttcaggtgcccttggtagctcaggctcatctttcagcagcatcgacagcctcagacgctcctcaacccttgagcaagctagggggtacacatctcgtcccctaggagctgtgcggccaaagatgctcccatctggatgccgacccctgcacacaagccatcctctgtcggctcctgttgctaaccgccccctgtcaccccaccttcctctgaagaagccacagctgagtgctacattctctatctcgcaccgtatatttggtgctgcgttgggtgctgccattatatccattcctctcgccaccaagttcagcctcatgtttgatgtctgagagagaaatgtggtctgcatgatgagaaagaaatgctatatttctgtgactatctcagcatctgaatttgccttgcaatgcaactgtagctgccgttggaataatatctttgctgtgcttgtagacttgtgaataataaacaaaacatgcaatgaccatactccctgtgagatatgatgttttatgctaagtgttaattttctctaccctttattgttctgctgccttgtggaattccatgattcatttttctcctggcaaaaaatgcttgccatgcgtgcaatttattcactatgagtttgcgttgtttgtataatgctccagttgagctgtagttcttttgctgctgcaaggaagggttggagacaattgaaatgcccaatgagcttatagtgctgaattcaatgtcaatgatcattgccaaaaataaaaataatatattttagtatgtgtaaataatccttgctgaaatctaacataactatttgcacttttttttgtatgtacatcatcattgctaaaatctttaataagtatttacactgttttttttttaaaaaaaagtgtttgtctctgttattagtagggggagcagggtggtagtacctggaaaataaaagttcggtgcaatgaatcgcgcggcgaggtcgaggtcgccggaggacgcgtcggtggcggcggcgcggaagctgcacctcctcctccgctcccgggacctccgcccggcgctctcctacctccgcaccctcccctcgccgctcaccctcctccccaaccacgccctcaacgccctcctccgcgcgctcgccgccgccggccgcgtccgcgccgccgccgccctcttccgccgcatcccttcccccacaccgcactccttcaactccctcctcgccgccctcctccgccgaggccgccgccgcgcggcctccgcgctcttcgccgcgctcctccgctccccctccggctcccccgacgccgccaccctcaacaccctcctccacggcctttccaccggatccccggacccgtccactcccgcgctcctcaggctcttccggttcttgcccgacacctacgccttcgcgccggacgccatctcgtacaactcgctgctctccgctctctgccgcgccggcgacgtgctcaccgcgcgcaagctgttcgacggaatgcgcgtcggaggagaagaaggcagaggagctgtctttcctaacgttatcacatacacgaccatgatcaaggcgtactgcgccaagaggctcgtgaacgaggctctcgcgatcttcaagctaatggttgcggatggtgtggcgccgaacaggatcacatacaacacgatggtgcaggggttctgcgatgccggcaggatggagctagtgaaggaggtgttggagatggactcgtttaggccggacacttgcacattcaacactctggtggccgtgcattgtagggaaggccggatcgaggatgctatgaaggtgtttaatcagatggtggagctccgtgtgagacgtgattctgcaagctatagcatggtcatccgggtgttgtgtgagaatggggaatttgggcaggctgaggagcttgtggatgagctcttggagaaggaggtgctcaagaagagagggggttgcacgccgctcattgcagcgtacaacccggtttttgtgtacttgtgtgagcatgggaagacaaagaaggcaaggatgctgtttgggcagctgctggaccggaggagcaaggtcgatgttcctgcattcaagacattgatccttgggcattgcagagagggtgatttcgaagaagggtatgcattgctgctctcaatgttgaagcgggatcttgtccctgatgatgaatgctacattgccgtgattgaagggttttcacagaggggaaggatgaagtttgcatgggaagccttgcacaggatgttgaatagcggtcttcggccaagcacaagtacttttcactcggttcttttggggcttttgaacaaagatggttgtgcaaaagaagcagctgatttgattgagataatgctagagaggaagattcgccaaaatgttgatctttcgacaaatttggtagatacattgttcaggaacaacctaaatgaccgtgcttacaagattgttacatctctatatgaccatggctattacatcaagatggaaaagttaatcgcaaacctttgcgaggaaaagaagttcatagaagctgcagattttactttgtttagcttggagaagtctcagaattttggtgtagccattccaagcatggttctggatggtctttgcatgactggtagagcttcagaagcattccggctgttctatgaactcattgagaacagaagtgctttggcttctgtcgctgcacctcgtagtttagttgcacttcatcatgcactggaggaatccgggaaaatgaaggaagctgattttattgctagacagatgagacgtgcaagtgccagaataagggaaagaatctagtgggttgctttgtcccaaggagcatttcaatcgcatgccctttgcttctccaaacaggatggactaataagtgtgaacttaaaagaacgaacaggatgcagaaactgtgcctgatccactgccccataagaaatggatcaaccaactgtatgatgttagaatgcagattaattcagcagatatccttttttttttcagggaaactatggcgggtggattagcaccggcctgaacatttattgataaataaagagatagttacaaataaagataatttacatggaggaaggagaagttgcttgagaattcagaaaatacagaggggggaggatggagtttaagaaattcctatgtcactaagattgttcatccaggtgttcagagcggggcgtagatgctccgggcagcggtgtacccataattcagcagatatccttaaaatattggtccaatcaggactttgtatagccaaacaatcaagccaactttctctgtcactatagtatcaccgatctggatcatttcttctcaaggattgatatctttgggaggaaatgaagtgtgggaagaccagatcacaagagtactctgctcctggactttgaagggcagtagttgcgggagaccaaagaatccggctgaaagaaacatattgtgaaaatgtactgctttccccccccccccccccccctaaatgcatgaggcanagctccttgccctttgggctcaaaaaaaaagaggaaaagaagaaaagtggggaatttaactatttgccacttttacatttgacaattaaccaaatacccttcttaagattgtacttaagaatttgccattagagagagaagcttttgtaactttttgccactttttgccctgtggagtgccacatgtgcatgccaacatggaccaacgtgaaaaatgaccaacctaccccttctagctagtggttagtttctcagttgctaagcctgtccgcattgaatcttagtcataattcattcactggaaagataccaagagaaaccagcaacctgcccaatcttcccattttacacttttaaatttataaggcaacaacatcaatggcaccattcatgttacagtcagttcattaactttttgaggctgcattcggatgtcttttttctaacttctactcacagttattaggactgaccagaccggcggttggactggaaaaaaccggaaccagggcctccgccggtctgagttctactccctcatttttttcgcacgtttctttaataactttttaaataaaattaagttactttaaaaatatatattaatctattctttatttattaaaactcaaactaaattagtcatgcgctaattctttgctcagttttacgtgaagagagaaatatttccaaaccatgctatcgcacaccttaattgagctcactccaggtggcaccatcccaacaataccagccaaattggaataccgtttagcagcttgaaaaacgtacacgtgaaaaacgagagagatgagttatgaaagtgaacaaaagaactcaatctaagtatcgttttgaaagtttgttataaccatctcagtggatctattacttcaaatattgatttgttaactgatgtggaggtactcggtctttaatatagtacctcataaaagtgaacagcatccataccgatgcaactgattcgcgaaagcaatttgtccaaatattattcctgactcagcttatattacagacattactaacaagggtagattagtcatttcgtgtgcctggtccatgctggcatgtatatgtggcactgaacagtgcagaaagtggcaaaaaattacaaaagcttctctctccagtggcaaattcttaagtgcaaatctaagaagggtatttggttaattgccaaacctaaaagtggcaaatagttaaatttcccaaaagtgtgaggcaatttctatatcaagcattattattttggaagacaggttggctaacttaccatcagtctgcctatttctttacagaggagtgaccttagctcgactagcaaatattcctaatactttacagaggagtttccttgccagttgccacaagatgtattggttgatgtgtctgaacgtaaagaatcatactacaaaattccaatttcacattgtcgttctcctgttttgatgctgtttgtgagttgtgatagccgtgactcagtttatgtgcatgcattcagatactttgggggctcaccacagaactacacagtatcctgccaactcagttggaaattgaaacactgaaatgtgagaagtaggagatgatcataagaacattatgttccttcacccagttatttagcacagaacacatttaatcctactcggcgcagagaatcaatggaaaacgcgtgatgttcagatctcacagttccaaggaaaccacgaacaggtatataacacgcaatcacatcaaacgttttaagtgttcaacacactcgaaatactgagtgaattccaaggttactaccataacaaacagttctggtatcacgtctctagtactacagagatattcaccaccacaggaaagctgggtaccgccacaggaaagctggattcagcatggtaggcagggagaaacacactatttcgtgaagcagtgtcactcaatagattgcaacactcaagtaatcccctatctgtgaaagaacatagcaaataatcaattgatttttgcctcagaagaatacattgtaataacataatacagctctgacaaatacctggaatcctagctctgcaagagttttagcatcatctccccttccatggccataagagaaggttgaacccaccttcaatcaatatccaattatataagttatcacaaattgaacagttactggtttggaatataaaggaacatgggttgtacaagggaatttactgacatatttagtggtttaatggcacagatagaacttgtaacaagctacgttttagtacagagacaattatcacgatgtgactgaagtggctactggtaagtggtaactacatggggcctagtggtgtaccaatgacatgtgttaggtatgcatacctgagtttgcagaaaagagattttgatgtcattggaagcatgtcatgaatataagcacacaaaatagtaaccataactaaaactaatagcccatgtatagtgaccaaactaatagccaacgtatagtgacagtcaaagcaaaatccaactcattcacgataataacactcattccctattcagattaagaccaacgtgctctgcattttttccatgtttgtgtatcagaggaagaaaaacaggatgagcagaagaatagtcacaatggtcaatggggataaactctcacctctttgacaacgaaacgaccatgcttatcagggtacacgaaagcaaaagaaagccttgcatttctttttcttgctgcaagagcaacctctttcacctgaaacataaccaaaactgtgctgatcagatctccatctaaaaacaacatttagtcaaacgtagtgccaaaccccacttatcatcatcagactagtcaaattttgttgatttctagtttgttaagtagtataaaactaggtaaaatttcattttccccaaagaggacaagaaagcacaatattagaaaaattacaagatcagtgagctctcggagtgtggcatccttccacgtgtatatctgcacttcatctttcggctcctttcctctcacggcaaactcttcattttggtgatggccaccaacctgaaaataaatgaccagtaccacaatcagctttctgtgtcgctgagtgtttactcaagaatctgaagtctgtcctaaatgaatggcttgggatttaattttcaacaacactaccatgagttacttgatcgagttatactgcatagaagtgtgactcaactacaagtgcgatatgaacattacaattccatcaaggcaccagaacctatgattcggtaagattgcacaatgcaaataactagcgcaataaagtttctgactatttatttaacttgtattcaaatgaacatatgctctcctcagtcaaccacactaaacagaagtgtaaatcacataatgtgaacttatcatacatacaggaatacaaatgaacgaagttagcagtaagagagataacaagaggttttacctttgtgaaaacccggagcaggagagggcacgtctgcaaaagaacccgatagtgaacagtaagtaaacaaatcaatcaacatggttaacctagcagaatcgaactggaacacaatgccgtcgaatcgcaaggtagtacgcaatctactgctgttccagcgcatcgattgggaggggggcacggaggaggcctcaccttctcgcgatcgacgggttcgacgcgcgcgcgagccatgggaggaggcccccggtactgcatcggcggccctggccgcacaggcctcatcggcatctcgccccttcccgccatcgcaacgagacctccccctgccctgcccgaggaagaagaaagctagtacgaatcaatctactgctccggaatcaccaatcagcaagcgactgaccttgctcacctgctccgccgccgccgccgccgatcacttcagaaggggatgcgagagaagcaaagaaaaccctagtaaactttttgtagattgcaccctgggttcaaatgaaaatacaattttacaattcagtccacctctaaaaaagggacatttaactccatgccacttttaagatgtagcaattaattattagttattcattgtctatgatacgtgggtctaatggcaaataatttagcaccactagtaagagagtaagggcccgtttagttctcaaaaagtttttcccaaaaacatcacatcgaatctttgcacacatgcatggagtattaaatataaataaaaagaaaaactaattgcacagttatgggagaaatagggagacgaatcttttgagcctaattagtccgtgattagccataagtgctacggtaacccacatgtgctaatgacggcttaattagactcaaaagattcgtctcacggtttcccggcgagttctgaaattagttatttcattcgtgtccgaaaaccccttccgacatccggtcaaacgtccgatgtgacacccaaaaattttcttttccccaactaaacacaccctaacaaaatagttaactattactacctccttccctaaatgtttgatgccattgacttcttttaaacatgtttgaccgtttgtcttattcaaaacttttgtaaaatatgtaaaactatatgtatacataaaaatatatttaacaatgaatgtaggaaaagaattaataattgcttaaatttttttaataaaataaacggtcaaccatgtttaaaaaagtcaacgggttaaacatttagagatggatggagtaccttaaaaaaaagcgttgacttgttgaccacttcgttgaaaaagccaaaaaggaatccgccttcttctccactccacttcactcacgccttcctcgccccgcgtcgcgaaccaccgcgcgccatggtcggcggcgagcccttgcggcggcggcggcatctcgccgacgatggattcttccggttcctcctcccctcgccgaagccggccaccaccaccaccaccacccctcctcccgccgcgctgttcgtcccgccccaccgcctcatcgcgccacccgtgccgctcccccagccaccccgccccgaggagcgcctcttcatcgtgccccccacgcgcccttcctggctcccgcctctctcgatacctccgccggcgacggcgacggccccgccgccgactcgttgccctccgcggcggatgggcaatggtggtggtggttgctttggcggccggagtggggtggtggggtggaggtatggaggtttcgtcgggaatggtggacgtcgtggcttcgagcggcggagggtgggaggaggcttcatcggagcagcgaatgcaggcgaggccaccggcggcgagaggcgggcggtggtgcgtaagagggagaagaaggtgtgggtcgccgtggagaagaagggcgaggactgcggcggcggggatgaggaccaggcggcgatgggcgcgggctatgccggtggagatgagagggacgagcaggtggacgtcgacgacgacgaacaagacgacggcgacggcgatgaccctttcgacgtcgccgccgatcacgacctcctcgccgtcgtcgccgatggcgccggcagcgagaaaccaatggaggtagaggaaaactcgaccgagacttcaccgacgcttcatgctatgaaactcttcaccttgctctccctttcagcagctcggatcgccgccggatcaaccgccgccgccgccgccgcgccagcgagtcggaacgcggcggtggagggtggaacgccgccatgacatcgacgccttcacgcccggattgctctccctctacgaatccctcaatccatcagaggagcacaaggccaagcagaggcagctcatcgaatccctcacgaattctgtgagcaaagagtggcccaacgcccagctgcatctctatggatcgtgtgctaattccttcggaaattcgcatagcgatgtagatgtttgtctccaaattgacactgctgcagaagagaacattgctgagctt

SEQ ID NO: 22642 - DNA, 8555 bp, Oryza sativa
cccgggaaaaaataattcttcataattgatgtatttgaaaaatagcttcttaattgacgcaggttgagactgttcatcttctaatgcctgtcaaattcatgcaggctattaccagtgctcgagttccaattgtgaagattgcagatccaggaagtggcttgtcatgtgatatctgtgtcaacaatctctttgctgttgctaacacaaagcttctcaaggattatgcccagatagatgagaggttgcttcagctggccttcattgtaaagcactgggccaaactaaggggcgttaatgaaacatatcgtggaaccctttcgagctatgcgtgagttaaacgactttgcgttcatgattttcccctttttacagctatatgttatttgttgaaaatcttgaacctgatcttgttcttattaatttgcagatatgtgcttatgtgcattagcttcttgcagcaaagagagcccaagattctaccatgtttgcaggttctataccttactttttatctcaccaatatgtttcattcatatgaactactcgctgaagtactgatactttggatgcacacagtttaggataaaatcacttcacgcttgcttcatctgcatttagactcatgatgctgatacaggttaaacgaatggtctgcacacatttttattttcattttcatttttttatctctaaaatacttaacttctatctcttttatttgctggtggaatcgtcctgatttcgcattctcccttcatatatgcatgattctgttttggatggctcgacattcaactatggttggtcaattttctttcctttcttttcttttttttttcactaatgtagcaggtccattttttattctctttgattgatgttactaagagttgcttgcgtctagaattgttcagatgaaatcaggatctgcaaagttgtatatttcagcttcatctatgaattacttccgtcagttttatcctgatgcaatttgtcctctcaactcactccaattgtaggcgatggagccaacatatactgtggttgtcgatggcactgaatgtgcatacttcgaccaagttgaccagcttaaagattttggtgctgaaaacaaggagagcatcgccgagttactgtgggcattcttccactactgggcattccatcacgattacaggaacgatgtcatctccgtccgcatggggaacacaatcaggtgagaattgccaacgagcgtttctcaaaaaccgactaaacttcaaaaattcgattttgaactaatgtcacatatgcttcaaagaatttcgcgtcctttttaacttggttcgatctctggtcgatcgatagcaagcaggagaagaactggacgactcgcgttggaaacgatcgccatctgatatgcatcgaggatcctttcgagaccagccatgacctcggtcgtgttgtcgacaggcagacaatcagggttctcagggaggagtttgagcgagctgccaccattctgcagtacgacgatgacccttgtgtggctctttttgagccctatgattatgaatcttgattattattattagcacataaattaataactagcctggaaaatccagaaaacagtagctatcctaattctaggtagtagtgaagatccagtagcatgcttaaaacacttggtgaacagaagaacaacagcaggttgcattcaagtatgtcaaatttgatagaaagttggatcttaaaatcaaaagtactatgccaacccaaatttttcggaatgcttcccaagacctgtgaggcgtttcacacattctaagaaagttggatcttagaattcctttgtttttacttacagggcaatcctgaagaccacaaagacaaaatagggctttacttttgaagtggtgcatgcataactgaagagtaaaacaatcttatgctacaaaaaccaaaacaatataaaattcatcaccacgcatttagatggaaaaatgtttgtgtaatatatgaagggggtggctggaaattaactgaggcccggaagaagaggagcgatttgctcccaatgagaggccgggaaacctagaccaggccaggccttttaaagcccacaaggcctctactttctcttccagagtagatgggcctcatttcgacccagcccaagatgaagcagagtctttctcttccctttcttttaagagcaaaagcagtgcatcttatcttaaatctaaaatttgccacaacatgctaagctaaattttacacacgccctagtttttttttttgcggttatttgattggtgccacagttttagctagccacattacttaaatgtaaaatttgatgatttgacactttatttcttgtcactttaatttttaaaattgatactttttaggatgacgtatgggaccatgtaagtcaatgaaaatgaatgttaagtaatcgaaagccagctgagtgaaatatcaaattatcacatctcttagaacacatggctccgcatgtcaaaaactcgatttcttgtatataagaatgcataaaggtatggccaaggtgagttgcactgaagctgtgaattagtgacccgaagaaacaacagctgcattatgtggcgtgcacctcaataatattcattttgtgacgcagagctagtataagatattgacatcttttcgcggagaaagatgtggaaatttttgttcttatctatttttgctttcttctgcgtatgctcaattaactgctctttgacagccttcgtgtttgacagtggaaaacatttccttaccgtagcaataatgttgcttgcaggtataattcctaggacaaaactatatactactacctccgtcccaaaatataacaatttttagctatgaatctggacacacagttgtctatatttatagttaaaaatgcttatattttgggacggagggagtatatcatgacaggagaacgaattctaccctacaacttactgatttttcctggtctaatcttctgggccatcatgtcttgaattccgttccaaagatcatactatgaactaagtgcagcttctgtatgagagctgaggtgccactgatcagcagagattgcagaatgatctttctgggcttatgcaactcttttcatctttgttgtcacctcaggaaaacctataattcatactacttcttatgtggccttcaccttgacatactcatcatgatggttattgaagttttcgttatatagcatgcccgttggagaaagaagccgttgtaaagcacttccaaaccgaccctggaaaatggaaacagtattaaaatgtggccaggaaacatttggagtagcgagacattattatatagtgagaagtaagataatgcaaaaaataaggctcgaaacgatagtctgttatctttggtagggaactaaggatacaaatatgagaaaaagaacttgatatattgaaatggtcagatggccttacccactgaaacaagacaagtatccaccagcatccaggcaaactaccaaatttgttgcgaatgatctgttaagaagaaacgagatcagagaagtcgatcattaggatgtgactattgttatttgaacaacaaagaagattaaaggattttcaaaatacggacttaagttcttttagttgctagacagccatcacagagctttatgaactgagtgacagcattcaaaagtaggaagaagatacaatgttcacagtaccaatgcttttttttttctcaagctcattcaacataattgaagtagggacaaaaactccatctagcatcgatctaaagaacctatatctaacatcagtacctcaccaaaggagaaagaaaggaaacagtcatacggtcataccattagtagaaaggttccaatgccaaagcatgctcccattgattgactcaaaaacctgagatctcttccagcctgagaatagggagaaagtaccaagggatgtcatcacatttttccagcacgtgccatattcgactttgcattaatgtgctatttatctactccaataaaacgtaaaatatgatccccacttcccagtgttaaactgctagaaacctagtgccttgagccatgcttactagggaagtaatggcacttggaacaagtaaattcattttgacaaggttttcccagactccaaatgtactttccaggataattgctttaaaagtcagccaaaacaaatatatcagcttaccaataatgttccttcaagactatgcactgaaggtgtcaccaataatgcacagaaatatggaatcagcactttatgcatctgtcaacagggtaatggactgtcagtaagttctagacaaaatcgaaagcatttgagactgggggtcgtgaaaataaagcataaaactttctgcagatagactgagttaagccaaggccacgtcataggagacatgcgcaataatatgcaagtaaatttattttacaataatatgcaagtaaaattctatttctctatagagcacaggaaactaaatgtatataaattgaaggtaaagtaattatctaagatcataaggaccaccctaactggacctatgagtcagaatcaaccttttataatcatcatccgattcagtgaacagattctgcaagcatttacaaatccatagtgtacacaaatgatacaaccaaagtatcatatagagcagatgatgccaaattagatgactaacatcagatcagatataggagcactgaattttcttttcttaacagtgcaactgagttagattctaaaaggataaacggtactattgatagataagaaatggtagtattgatagtttctggcatagtgagaagcaatcagaatcgaatgcacttccagaacagtatgcagaatattttataagttatagagcaaacctgttggacaaccataaaatcattagtaaagagactaggaaaaagccacggaacaagtgttcctactgcccccacagtcgttccagttattgctccaatcatgacaagtgatttcaatagcatccttgcctggataaaacggtacctttagactttagtgtctttgtagtaatgaacttaaaaatataaatgcactttaatgtagaaaagaattccagtagaagatatgcactatgttagtcaatcaaagcaccatcagtgccgcacaggatgcatcaagtatgtgtaatgatgctgagcgtacaagcacaagcagaagcaactgttactctagtacaggaaaagaaggtatgtgtatggcaagcaaatgtatagaaacccttgatggcaaatgcacaactccgattcaaatatttattttagttcaatggtagttgtaaaccgtaaagatgcctcatgtcctaagaggcagcaaataagtgatgggatcaagcttttgttaatttcaacgaacaggattaatacaagagtctcagttgacctcttgcttttaccttcagccttttaactgtgtatcaaagctataatttttgtccagttaaattcgacctgccttgaccgccaataaagttgatatttatttgtggatagttttgcagcagatgtaattcaagattctaaatgatttaataagcttagtttgtgatatcagcattttatttagaagaaatgtgagaaggagcatgtactgaaaattacactgttgaaggaaactttgcatatcagttcggtttatcctaagttcttgaccagagaaaagcgtaaaaacatataaagtgtgcaagcatacatcatcaagctttacacatgattcctttggattaatatatcactaaggacaataataatgcagtacagaaattcacgtgaaattgagagctttagataggtaccttcatcaaattgcacttagctccatatatcaactctggcatgaatgactgtgcagtttgtgacaggggctcaccccaaacagtgcacatgcataggacattaaccataaccttcacagcatagattattttgtatgttatccacagaagaaagtacatagtagcactgtgttttcatcatgggtaagcataccaaaagttaaaaggtatgaacctggtgggctgcaagtgttattgctcccatagaagttgcagaatacgtaagtaacgcgtaaaatgctacctgaatggtttcaaataattaggtatagtaaagttgaggagaggacatggaatattagaacaaaaaaaaaagcataccttggaggtcattgttatgaaaacaggagctgcaatttcaaaaatctgcagaagctcacttgatgatgggattgtgaatgaaaaagctcgaaatcctctcttatttagattttgcatcatcataaaagctgcaacaatctgagtgtgtgtcaaaaaatagctatttatgaaaataatatgttgtcagaagactcaattgtgtaaataaattggatttttgtttagcataacaagtagctaaatgtctggcatacaagttgagtagacaaatcataaagaaagatcgacatggataataatatataaaattatgagcatgtggttccatcaaaaacataacattttacaatagataagtgattgctttataacttaactaggtagcatatcttactagaagatcaagaaacatttgtttttgttagtaatgtggtgtttcatccgattcaagtttcaaagaaaaatcaggtagtgtttattaaggctaagcattggtggcaatccacatcttgccaagtctaaagaatcatgctcaagtaaagatgtgcaagaagcaaggtatgatgaggtgattggaaagtatgcctacctgtgaaaccatagttgcccaggcagcgccagcaattccatatccacatacagaacagagaagaaggtccccaacaccattgataacactagcagctgccaatgccttcaagggaccccaagaatctttcatgcctagactgagttatagcaaacatacagtataatatgagaagcctccaatcaaggtagttgtaatgtgaaatcaaatagaagagctcaaagtgtttattgttatcagaaacatcacaaccaaataactatgtagcccatgcgagttggttcaaatggcaatatgaatatttcaatgacgaatagacattaagacaactcaaaacagatgcatctgtaatttggcaaaataaaaggtcaaagaaagaagacatgatagatttgaaggcaaaagaaatataacttctccagaacaaaatagatcccgtgcaacagaagaggagaagaatgagcatggtttttacctagcactttgagcaactaagccaaccagaactgcaggccatgcaaagcctctaatctgaaaatgaatgagtatacatattgatctatgtacttcatataaaacatggaagtcaaaaacttacatcctatagcatagtgcatagaattatcctatagtacagaacaaggtatgcaatatgcctgcagtcagaagcatccatggatttgcataggtttctgaaatcaataggtttgcagtcaggatcatcctcgtgtttgtacttcagtgcaggaaatgtaatcagcgtgcctcatcattcagtatccatacagaggtactagaaaatttcatcatgtttccacttccttgtatatgtatagctatagtatagctctatgaggtttagttcatagatagcatgcaattgaacttttagccatatttgtttatcctcaaaatttattgactatttgactgctttatacagttatattcaagaaagaaacaagcaattcaaaattgccagacaaacatgatttctcttggcgctaccccaagcatggcagatgtccttcaagccattgctagtgagggcgccctttggtgcctagcaggagcttctaagcttcgtgatcttttgtctagggctgtagagctagtgcactaggtttgttttgcttcttgtgggtgtgtggtgttggtgttgtacttctgggtgggtggatgtcagagtttatatctaatgccatccaccttttttcctctatcttgatgaaatgatacgcagatttcctgcgtgttcttaaaaaaaacatgatttctcttgctcattcaactagggcaacaatgaaaacaccctaaacagtgaaattaatgagagaatgctgacatgtacaaacctgtgcatatgtattggcagcagaaatgatatcatagttccccgatccagtaaacactgaaaataaaaatagaggttgcagtaaaattaagaaggtaggtggactcagacatgagacatgtgaaactctagatagcatgataaatacaagggcattcaatctgagaagcaaattaaaaggaaaaaacagaaataaggtgcactgccaaacagggagaaaaacagtgaaggagataatccagtggtgaagaaatccaccaggttttctccatcaatatgcagtcaggttcttcaaagtatgataaacaaggttgacagtcagtttcatcttattagcacagtttagtttcaacttaccagttaacacttgagtcccaaaaa

SEQ ID NO: 22643 - DNA, 796 bp, Oryza sativa
aaagtctaattgcctcaatgctagcaacaggagcaaaagtttcattaaaatccaaaccctcaacttgagtaaaatcttgagcaacaagtctagctttatttctcacaatcaaaccatcctcattttgtttatttttgaaaacccacttggttccaataatattatgtccagaaggtggttcaactaaagtccaaactttgtttctctcaaaaatttcaagttcttcatgcatggcgttaatccacgattcatcagttaatgcacgtgacacatctttgggttcaaaagaagcaacaaattaccatcatgagtcgttaccttagaccttgtagtccgctcacctaaattaccaattatttgttccggcagatgtcgtcgttgaatatgcaaaggagcagcaacttttgaagttgatccacgttttgtatcagtactggtcgaagtagtaatctctagaggaccatctcgatcagcatcaacagtacccgatcccgacgaccttggccggtctgaccgcacatcttgcgccggtctgaccggaggtgtgccggcggtctgaccagccgagccgacctcgtcgttgtcgctctcgtcttcaaaaatacgaccatcctccccctgaacctgtgacagtgtacctgcaatatcgggtctagtacctggactagcctcatcgaaagtcgcaagtctcaacgattttgttagactccaaaataagtacacgatagccacgagtatgtgcggggtaaccaagaaacaatccatcggtagaacgtgcctcagggctgcaggaatt

SEQ ID NO: 22644 - DNA, 1903 bp, Oryza sativa
atattcaacaaaaaattaccacaagagtcaaaaactttacttccagttttcttaaagtgaacctcaaaattttcatcaacaatttgtgaaaccaaaagcaaattgtactttaagtcctcaaccaaagctacattcttcaattcaaaattttcatttaccttaaccaaacctgtagcgagaacggcacttgtagaagcatcaccaaagataatcgattcagtcttggatgccttcttagagggaggagaaccaatttttatcaccggccatgtgccgcgaacaaccggaatccacgatccacatgttctccttccttgccaccaaagcctatacataagcagaagtcgaagcctcagtactggagttagatgataataaaaacttaggaatccagtactgagacacacgaccagaagatccaataggcatatatccacgtgcaaaatcaatttgagaattttcagaaaaatttctccgaggccggtctgaccgaggtacagtggccggtctgaccggtgtccggtctgaccgaggctctgcagctgtaacatactgaaaatttgctattttctaaatatgcatcatgctgattcttatgtttttaataacttcctaaacctaagaaattacaattagagggacctcctaaaactaacatgcataaaatccatgtctagtattaaaatctttcgtgcttttattctaaaattgatctttttagatcgaggtattctctttgatttgattttgcattttaaagcttctttcgaccaaaatttccttaattcaaatttagtttgaaaatcctttttacttttgtgaaatatggtccaagaaatcctccaacactacctttgaacctaaatcgaagcaattccaatcttattggaattaattgtcaacccatcctttgatttcaaacctattcttattaccaaatattcaagttcctccttttgatctagccaccaatttaatccctatggcttgatttcctatccagcacaagattaacaatattttaatgattgctcttgtgcttagaaaattccaatttattttcctcatccaaaattcaaattccctcaaacttcacctttaaagatgttgcactcaaataaaccagaaaatatctcttctggaaattatatccaaatataatttcctttcaaaccttcctattcaaatattctccaaattgaaatcccttgtaaaacttagccatccaaaattcctttgaatcaaattattcaaacctatatgaaaattagattccttccttttgtttttgggccgaattctccttctttcttactcggcccaggccggcccagttagctgagccaactcgtctctccctgtgggcgccgccaccaccgagcaccgtggccgcgtgtggcgcgcgtgtacgcgccgccgccgccgcccacagcgctttgctgccgccgtcgtcttgccttcaccgctaagcatcagccgctgacgtcagccgccacctcacatcgctgacgccagccactgcaccaaaccgacatgatcgaccaatcagagttagagccggcgtcgagttcttcttctccacccaaccggcgtcgtgctctccttctcttcctcctctccgaaaccgcctctaaccaccgcctttcctcgcctatatatagccgaagaggccccgtttccttccccatagcagagctcctcgagttctcttctctctctctccggccatgtccggccattgccgccaccactcgatctccctcaccggtgcattacggaccaaaccctcgcgccaccgtgcttgcctcgacgaggtgaacccatttttctagtttcccctttcccttagtaatcctataagccactatagccacttcttttatcgccggagcaaagcttttgt

SEQ ID NO: 22645 - DNA, 4545 bp, Oryza sativa
gactgtcgcatgtttttgttgggctgtatcagtcgtttttttggtcccttggattttgtttgagattcgtgctatctagacttttgttttcttttgtatgtgggcttttgattattgtaagttcgggcttccatacgtgggctaaatgggcttcttttttttttacatttttgtgggacccactttgtgttgccgatagagaaatttttttgtgagagtgttaatggtgggacccacatacactattcaaattttgaaatccgcaccggagagagagattgtctgaatcagactagagagagagtgtgagagattcattttgctttttgcctttttcctcgtcgtctcgtccggcgatttcggcggagatttcgtcggcgactccgggaggcgacgacgctgcgtaagctacgccgcggcgtggattcgtgcaggctacgtcgcggcggtgattccactggagtttgcggtgtgggcttctccatcttgtcctcgagctccttctcctctttttctctggtgagtatgttttgattcttctccagcttcatttgttagcttgctgctcgattcgttgttgttttgctccgctagttgtgctccttttgccgatggagagagagagttatagaaggagaggttgacgattttgtcgtctcgttctcatcgtctccggcgacgcggcggcgatttagcgaggcgacgaggctgctcttcggcgagccgcgccgtcgattgcgcaagattattccagtggctttcctttttgttttttttccttttttgttcatttccatctcctatttagcatgctacatgttgtgtttcgttgattctgtagtactagtcgttctagttttcgtagatctgagcaccttttgtttcggtgtttgtttcattgaatccccatgattcgtgttcgattttgcttttgtgattttttttaggtttctgtgatatatttgttcataaatttgtgctatgcgatgttctagaaagtttcgtttatgtgatgtgtgatgtgtgatctgtgatatgtgatatgtgatttacgaattgtgctctgtgatctgtgatgtgtaaagttagatctagtttttcccatgggaatttgagttgaatctatagttgctcccttgttctccggatgttaggttgtgatttgttgaatctgcgagttgctattttagtagatgcgtgtgatttgttttgaatgatgtttatgaagaagtttgctcatgtttggatttatagaagtttgtgttgcattattttgtctctcttactatttgtactttatttgtagtcttcaactatttgtttagcttgctagctgatgaattattgttagctgtagatctgatagtgaattattgctgtgatttatgtattgattatgtttctattttccctgtgtgctatgcaatgttctatttctcatttcatttttttccattgcttatgatatgtgcatccttataataactccttgtgcttttttttttgtctctctccctttgttttaattattagatgggtcatcaaaagaactgttgtacagattcagaaactttgcatcatgatgatgtgtgtgatttagttgtgtgttgtattactattgctacataagtactatatccacgttgtattttgttttctagttctttgtgtgtactcaaatgtaagctagaaatatgaagcctgagatattgatctgaagtgtagatcaatataggttttaacttatatagatcattcgattcctatatagacagccccttaatttaatttctgttaagttagggcaggcatgcaggttaattgattttgttacgctagtttattgagaactttatgatctatgcaaatttgttagccttgtgggatttggatgtctttttgtagctgttcataatgtttgtagtagactggattacactctagtgcaaaccccatttttgttattggactcgtgtttatgtacttaggtctaacatgtcttcccctttggggatttagacgccatttgtgtcggttctactgctaatgtttgtagtagactggattcattggattgcgtgcctctgcatagaccaactgtggaatggtcatgttccctagtgtgaatcaggtgtacagggcttaagtttgtgagattgtttgactttttatcatagtgtggacctctttgcatatatttgtgaggacatggagatatactataacatttgacttcaagttgaaagtactaaccaacgtatatatattgtactgggagttattttgttcgtttgccatgtttaagtaatgttcatttttttcttgaatacagtggtcaatttctgaggaattatatatctttttttaatgcataccttcacttattttataatttatagtctgccaaactttattgatttttaattgctatttttaatagatggttcaccaaaagcgttcaaaattggataattgtagccagcccataagtgaatctgatgatattaattcagagttttcgcgtgaaaaagatgatgattacaattgtgattttgatgataactcagccagtcatgtaagtttattttacatttcaatttcattgatttgaaatatagttgtttttttcatttccatttgtaaattcatgaagagtttgcaattatacattctcattgcttggtagccaatgtaatagtatgaccaatattttcttgttttatttgttcttgaattgtcatgttgttccaaggtcagaatagtatccattattctttcattattttttttcattagtatgcagttgtagctctgttgtagccatgtttcatagcacatttgcaatgttttaattgtttaatatgtttttttaggatatggatgtttcacaaccacatgtaaatgaaatttctacaaatgaacttctgaaaactttgaaaaggaaactcagtaagtctaaaagaagtgaagatgataacattaaggtaattattttgtttgttatttttcattttatatttttccatcattcttgtttttaattttgaattttttttaagatgaaaaggtctgaatctattgaattggacaatgatgtaatgataaatcaggttctacgtgatatcatacaaagggatcaaattatcaacagtttgaaaaaaaagcttaatattcatcacaacataggtgatcaaaatttgaaggttagttttttgcaatgcccttttatatctatgtttggtttttatttattgattaaattgttttattttctttttgtcaggacaaaaatgttgacactgatttgaagtctgatgcattctctagattctcagtcaaatatttctcaaaagttgattctttaagtccacatcacaaaacagtcattgaaaattcttgttttcaaagcatgctgctatttgacaagtgttttgttcccaattcttttgctctctggattgcaaaacaagtagatgtgaactgttctgatatagttttgggccaaaaacttattccattgaacaagcaatttgtccatgttgtgctaggcctccctgttggtggtagtacaatccattcaaaatttgattctggcaaacaaaagattcttcagatttttgggaaaacttctattccttctgtcaagttctttggagaaaagttaattaaaaatgaagaacttcctgatgatcaaattctcatctgctttatgattgtttccttgaattgctttctttgtccaaactcttctttgattccaagtacaaaatacctaagtgcctttgaagacatggacttaattgaaagtttggactggtgcaagttagtttttgactggttgatggaacacattagcaagattgagaaatcaaaaacttttggtggttgtttattccatttagcggtaaatttttttccctccatttatgctaatttatattttgtactaaatgactattcatttaatttctatattcaatgtttcataggttaattacctggattttctcaactttggttcacaaaaagtattacttgatacaccaagaataaaagtttggaaaagatctatgattaaggactattccaaatttgataaaatatctgaaggagtgtatggaaaaagaccagtcaatgatattgcttcaacttgttacccaatggtaaatgttcagttttttttttcaaattttttatctttttaagttctaataaattttcttagattggaattgaaaattctgttttaattttttaggggaataaaagagctcatcttcatttgctgatatgctcaaaagttctgttggtgatctgttgccaagtgatgttcaagacaaaatttgtcatttgctctgctatcattttggaaaagaagatgaaatctttgaagacaaggctaagaaacttcttataatgttctgttgttgttagctgattgtagttccaattatcctactcaacctgctgcacatgaaaattcaggttattacttttaatttacgaattttgttgtttattttatttttaatttttttccattca

SEQ ID NO: 22646 - DNA, 586 bp, Oryza sativa
aagcgcgcacacaaacacacaacaaattgtatgtctggcctagaagtagttagatacaacaaagatccagtcatacttctatattccttttgatcaacggcttcaccatcttcatcaggatccaacacagctgtagaaccaattggtgttgaaattggcttgcaattctccatcttgaaccgtctcaaaagatccttcatatacttcgtttgatgcacaaaagtaccttgaggtgtttgcttaatttgcaatcccaaaaagtacgataactcacccatcatgctcatctcaaattccctgcgcatagtctcagcaaaatctacaaccaaagcgtgagttgaacaaccaaagatgatatcatccacataaatctgaacgaacagttgattatcaccatgcttaagaacaaaaagcgttttgtcaacctttcccattgtaaaacctttcgtaagcaaaaagttcttaagcctatcataccatgccctaggagcttgtttcaaaccatacaaagctctagacaatttaaaaacatggttgggaaaatcaggattttcaaaacctggtggttgtttgacataaacttcct

SEQ ID NO: 22647 - DNA, 16687 bp, Oryza sativa
aactaatttgatgttgtaaatattataaatctatattcaattatagatttaaagtagttaaattgctccaactttgaccaattaagtttatagaaaaaatattaacattttcaatccaagatatattataaaaatatatttaattatagatttaataaaactaatttgatgttgtaaatattataaaaatatattcaattatagatttaaagtagttttttttgaaaaatttaaagtagtttaactttaactaaagttaaaatgacttataatatgaaacggagggagcatatacgtctgcaaattaatttatatacatcgatcgtacgtgcgtatcagatcgatcgagctagctagctagtacgtgcgtgcaaggtgttacggggattcttacttttaatatcacggcggtagaaaagattattaattaattacggtcgatgttattgcgtatctaatggaggatccatattccgatcgtttttactaagatactactataacatcacgtactgtaatatttattactactagctaatcactaatctatacggcatatgtttaattaactatttggttgtctgcactctagctattggcgagagacccgtacacgcttgattgatggctaatgtgtcttattcgtcatgcatgcattagctccaaacaagctagctactaatcttatcctcggcttaatcatttggcttgaaaaagaaatacgtactcctagtatgatagacaagctagaatcaattaattaaagaatggatttgagtttgcagaaactgacaaattaaacctgtgacttatctgacacaggagcaacacaatgatcgacatggcacggagagtcgtctgagaaattattacagggacaaaaataccaaaaaaaaataacggtcagatatgatcctactatgctactatacgcataagtaaagggtactgtaaaaataccccttaattaagctataccatatggtattcgatcgaggaggggccacatgcataggatcgtccaatgacgtggctaggatttagagtaaaaataatctatctaaatataatgagtcaaattaaaagatggttaattacatataatttttttatagttttagacaaatatctactacaattttagccttgagttaaaatcttaatatggtccataacctaccgtgtcacctagctagctccgcctatgtcatcgaggtccaaattaacatgagctacagctacaatctacatgcatgcaatggacatacttcctccctactcataaagtaagtcatttaggacaatgtttaagtcaaaacttgtgaatataaatcatgaataactctcaagttgttgagtttgaaaatgtaaaaattatatgaatagttttgtctcgaaaaatactttcataaaagtatacacatagataactttttaataaatatttttatagaaacaagaagttaaagttatgttttggagaccatgtcgctgtccaaaactaacgactttatttacgaatacggagggagtacgccatggctagctgctgcgtgatccgaatagtaaagtgtgcagtgaggcgatagagaaatgccttgtgtccaggggaacagggcccggccgtgtccacatcgattgagcctctttgcatgcatgcttgccgtaggacaattactacaaaatccttttggacgcggtagtatttattattataagtttattaattggtgaagtattggagatccacacaaatcaggaccaatccaaatcaatatatccacaccgatgcaactacatacaaaaagttcagacgatcgaccgatcgaaccatatatatggatgtgttggatttaatttaacgctatgtaaacctgcaaaattcaatttcaaattacagtggctgtctatcgatcttttttttttcatttgacatctcgaatcaacagggctttgaatttccatataaaaaagacgtgaatattagggaataagctaatattaaataattagaagggcgtgagacttcgaaccagatcatctagcccaccaccttgtgtccttgtggagctagccggaagacccctgggtgtttctcctggatttccatatctcaagtttaagttttttttctcaatattgcatcccagcctctacatctatatataggatgcatacaacaatactcatatttatgttgtcaaatccatgatttctttggaataaattcattttttaaggaagacctcaatgcaagaaggagggaggggatatatagttcctgctgctttatatttttataaggaacagtcaaatcatttttatactactataaattatctacacttaattcgtaataattacaatgtataaatttgtaactttcaaaatttacatagtaatttttataacacataatgtataagagaattaggattaaaaataatttattatttacttggaagaggagatagaagcatacatacttacttataggagagagtaattaccgagggaaaagtgactaaaattaagtgaaaaatgtggtgctataattttaggaaaccccgaaaagttagttaaccttgtttatatgggaaactggcacagttaattgaaagaaaaaaaaaactccacatggagaattaaaataaaaaacctgcagtgacacaactactgagactgcccgccgcaagtcatcgttgtccagcaaattgcaaatgaacaagcagctttgattttctatgatagtcggtaaacgatatccacaaaccccaattgtgaagtagaacacaataggcaaaaaggatacatgatcgatgacgctgtcaatacccttttagaacaccaagatcggatttctcatctgaagaaagagagatcagtagagaaccaccacagcgacatctctaagttggcggaaaatgacacccctagaccttaacatcatcggcaccagtggcaccagttagagattgggtaaggcttttcggtaattttaccatccttgagaaaataccgagaggtaccatactttctagtgtaaaatttaggctgcgttctttccacaagtttcccaacccctttccctcgttttccgcgtgcacgcttttcaaactgctaaatggtgtgtttttttgtaaaaagtttctatacgaaagttgctttaaaaaaacaaattaatccatttttgaaaaaaaattagctaatacttaattaatcacacgctaatggaccgctccgtttttcgtgcggtggagttgggttcccaaccccaagtatcaaacacagccttagtgtttctaaatactaagtaccttgaggtatcaaaaactttaatgtaaaatttaagtatctcgaagtatttttttgaagtacccagttaagctctctcaactgtcgatcacctttgtgttgccaaggttaataagtattataggttattgttgtctacctcgtcacacctgacgcaatggctctaactcggtcataatccaatctccacataagctatcaattcaacagcactcctatttcgttggaatatttccaacaaaattgcatcactttgaccagtttgccgatcccaaatgaagctttatcaattgggtaattttaccatccgtaagaaagtaccggaatgtatcatattttttattgtaaaatttagtatcttgaggtaccaaaagattcagtttaaaatttagggacctcggtatttttttcaagaaatataaaatttctcttattaattaatctccgtcaattacatcaaggtgatcatttttgatacactaccttgttccatcggtgggcaccgaaaacacacctgcggcagatagatcgagttttcttcagatctgcatgcatgcatggcagcagcaggtatagccaatcagatgaaaatctgatcacatggagacaactatccgatcacctccgtgacacacccaacaacgatagctctcgcgatcaatcggccttcgccaccgccgcccgcgagcccactgaccagcagccaagatcgaaacctgcacgccgcatgcttatttgcaactcaccctcctcgatcgatcctcatctgaatatactgaaaccgtgtgtaaacaaattgtaatcctatcaatatggcatttgggcaaaatcaatcagtgatattcctttgttcctgtctaccaccatgctgtgctagctagcttatgtctacatttgcgttgctgtgatattcctcggtgcgtacagtacgtacgtagggcatgtgcagaaattattgcttagctagctagtagtgttcgttctcttctgatgttcagtcaaattttcagtgggggtttcgagagatcggagagaaggaaagatgagatgcgtctttctcgtctgcatgcttgggcttcagatcgttggacatgactgtctgctctcccggctgcatctgtttgtcatggcatatgtgtttgtgcaattggatgatttggcttttggttggctgatgaccatctgtgtgcctggaaatggaggctgcacactgtgccgttttgggcgcctagcttgcctcatgcatatcattcagtcattcagtctgatgactgactgtattaatatctactcctccagtactccaatacactagtactactacttttgaactctgtctggttttggttacttgtgtgtgcatggttattttgaaatcatatcagcatgttcttttctgattttggcctggtttagttcccaactttttctttaaacttccaactttttcatcacatcaaaactttcctacacacaaactttcaacttttccatcacatcgttccaatttcaatcaaatttccaattttagcgtgaactaaacacactatgggtttttatttgcacgcttgcaagctcctacatggtgtgctttgtgcaaagaaagtttatataatttttttcttgaaatacttttctctttgtagcaaatttattcgtttacaccttcaaatagctattacaaaaatcagattattcatcacctatcttaaatgggtgtctttctttaatagttttgagctcttgattaattatataggaccagatcatcacagctctttgggtagctaaagataagttcagacagtcaaaattttgtctgcagctagccagctagccagctagcatgaagttagttaagctgcctatgtgtatggcaccagctaatctacactagaatttgaaaaaacctgaacttgttttgattactgatatacatcagtccagtatatagatggctacaaatgattgtctaggaggagtgtactcaagacttcagagccagagtcgacatcacgtctagtcgatcgtctatacacaataatatccgtataatgccaaattaacagctcgaccaaacttacacgaagttggtcatctagaaaattggataatgcataacgaaaattgacctgcaggagagagacagttgtctaatatagtactagtttgcaattatacatgagccaatcgaccaaaccgtgttcaaccttcagaagcacattaaaacgaacaaacggcaacaatccaaactcaaatcggtggataaaaaaaaatgcaagctagtcaaagatgaacatatgcaacgatgcacagctacctagctagctggcagtttcatgctgcaacacacaaaagttcaggatcttgatagaaacagcttggaagttgagcgtcccagatcgagtaatatggaagtaaggatctccaatcggattaggtgtgatatgcagcatgtttcatccggcaccaaccgtgacaacgccatggatgacaattttgccatgagaaacggcgtctcggccggcagcaacagatcaggttgggaataatttgcatttccaggctaatttaacctaacaattttgagtattaatgggccggttagtcacacagggttctgaagagaaagttgggccgtggactactctattctactgtgggctgttgtggcaatattggaaattgctgaacgtaagtgaaaaggctaacgggcaatcgatcgcccctagcgatcaccccctccttcacgtgttttttttttttgacaccacattacttttctattttaataaatttatgcaacctgtacacctcaagtttacacatctaaattttatacacctaaagtttagagactcaaagtttatatatccgattcaaatttgaatttgaattcaaatattttttatatacagtatttctatacatctaaattttatacacttaaagtttagagatccaaagtttataagtcaaaaatttatatacccgattcaaatttgaatttaaattcaaatatttttatatatagtatttctatacatctaaaatttatacacctaaagtttataggacaaaaatttataagtcaaaagtttacatacccgttccaaatttgaatttgaattcaaatatttttatatatagtattttcatacataaatttttctaactttattttctttttttttaaaaaattatggtgtagtatgaagagaagaagggaaggagaaagagggagaggagtgtatagcggggatgggggtgatcgccgtcctttagccatgcccgaaggtaagtgcatgacgatattgccatggatgattattcgcagttttctactcaaactccaatgtcatttataccgagaattccacgagcgatccgacctatgtggtgagagaactgacaacttgacagtaagtaaacattgagtaccaaagagaagtgcatgaatacaatagtaactcgaggttttgcatattgaaactgatcaaaacattgaagaaaactcgaggtttcagatctcaagccgcgcttttatctcatcgataacagatgggaaaccctgcataagacgcaggtaaccaccagtgactaccaccttcctgaagttgttctcttcaacgaagaagtcgaggcacctgctcttcagctccgggcagctgtgcatctcggcacaggccagagtctccgccaccgtctccactgtcacgctttcccacagcttctgggcgcacatcagcttcagcctgtccaacgcaaacctgtccgctgccgcgaacaatttcttgaaaaacgaaggagatagtatgtctctcggtggcaaagcgtccgtgtacacgaagtgcaggagagctctgaacgtcgccggctcgatgtcgtgcagcgtgacgcacggcatggtgccctccgccatggagccgaggagctccgcgctgaacaccggcgagcgcgcggcgagcacggcgcggtgcgcgcggatgagcgtctcgccgccgacggagaaggacacgtcggagccgtcggcgctgcccaccatggcggcgagatggccgcccaggttcggcggcggcacggctatggggtgatggcgatcgtcgcgcagaatcacgaggccgaagacgaacgtgaccacgccgtcgatcgcgtggagcgaatccacagcacttcgcttcacgaagcgataccagccaacgaagcgccagaataatcggtcgtttttctcgacgcgcaaaaggattgcacgtcaatatattagaagataagaatattcattacacaacgcattaaggtagaccgacttatgccaagagagaagggaaacaaaagaccaaagaaaaaaagactaagaaagtacgactcagaataatcggccgtcgtcttcggttttgttggatgattggatcctgatgatctgcgtacacctgtctgcatggtgcgaggatgatgatggtgcgccatctttgcccatcaggagagcttcgaagatgacgctgattttggggtcgttcttcatccccacgaagagagagatgtactcgccattaattgtcgctcttaagcccacgagggaagagctgaatttcggcattaagctccctggccgagattcttattccgggcaaatacttgccaatggcaagcttctgggattcgaggtagtcgagtttgtactcgatgaaaccggaggccagcatgttgccggcgggcggcggcgtatgtttgttgcaaggggatgaacagctagctgacgggagaatttagggcatgttcagattgctgccaaaataaacatttctaaaatttggcaatgctaaaattttgacaagtatgttactaaatttcggtagaatcgattatatatgttagctaaacgattttggtctttttcttgaatatatggtaatttagtgtccattatgttgtttcttagttgccttttgccttttactatgtctattggattttaatccaaagattaaaaatctatgtgatatgattataaaaatctttcgaaagatgcataggtactcccactgctaaaactctttaggtattaccaaaagtaataaactaaaggggtaagtccattttacacccctcaactcttaactttgtctaaaatacaccctcaaaatacaaaacaggatatttgataccccttaactatcaatgccggacactttaccccttgagtggtattgtgctggttttggtacacgtggaagtcacagggcatgccacctgtacaaatgctacatgtcaggcctatggttggttgtgggagaggcggcgagatgttgtggcctgcgacgcgcgccgacggcatggggacggaacagcggcgagcggctgccatgtgcgtcagtacatgtgcaggtgcggctcagggaaggagcagcggcaaggcgtcgatagcagtgcagtgtgcgggggacagagcacaatgagcacggccgtgggcttcatacccaccttggccctagagcgcggatcggctacaacgaggtcggcgtcgctgaatctggccacaaagactacagagagctcacctactgctcatacacgctactgcatccactactactagggtattcttctcccatgaccatgatgcaagtgctagctgtagaacaaaaggagtaatcacgaatcaagaatgtatagagctagcagcatatacagtatagcttaaggaaataatgattgattatttagctctccttgcaaatcctccccaccccatctctgcagggcggcgagttccgatctggtaggatgaagagagaagaggggaggaagaagaaagagaaggtaatgagaatgaacggtgggtccatcttcttttctgtttatttgttggttgaccggagtgtcggctcatcgccgcatgggcaaaaaccaccttcatcgggaacgaagaggtgtaaattagacagttttgaaagttgaggggtgagttatattcggtttaaaagttaaatgtgagttttagataatgcaataggtgagggggggctaatgtggacttatccctaaactaaatacatccacatgtttgccgattttatcaaaaaatgatatggttcaaaatgacaccaatctgaacgagctcttatactagagctagtatactacacagcatgctgcatgcagcgatatactcgtaataataatctagtgtgtgtgcatgattccaagtgctatggataaggcgatgcatttcgaagaaaaaaaatgagaggaagagacatccctccaaacattttttaagaagaaattatgagcgtgttcggaacacagaaccttagagttgaaaccacacaactcttgccactacactatcaagtgcatctcaactctatagaagccattcattcatctgcatctgccgttagcggtgcatttgaattttgtttgaatgtgtgatctggaatttggatgaattagagctagcttttcctcgcagaattagttttttttggtgaatttgggtagatttagtgtagaattatgatttttgatgtgttagaaatgatttgtatcaggttctgtgaagaaacagtacaattttcagctgcttcaaagcaaactttcaattctgaaaactgaattgtttccgatgtgcggcgttcagctgtcactttactacgtgaacgttgttcttctagggtaaaattaccagagatcgagatgaaaggagactgccatggatttgccgcttaccagctttaagagacttcaacatccaagaacaagtatatctatgataataacatggcaaaatattataaatacaatttatatcaaacttaactgctctctggctatatatttcaggtctcaactctcaagctatgcatttatctcgtcaatcactagtggaaaactctgcctaagataaaagtaacgtcgtcggtgaccactccctttctgaagttactctcttccatgaagaagtcgaggcacctggctttgagctccgtgtagttgtgcatcttgttgcaagccaaagttatcgcgacggtctccaccgatacactctcctatggctttagagcgcacacatgatctttagtctatcgagcatgtatatttgtcagatgctactaccaaactctcaaacaatttagtcctcgtcattgtaggcgccgaagaggctccgggtgacaaggcgtcaatgtacacgacatgcaacagagctctaagagcaaggataataattggccataagccaactataaacttatgtggaagagagataaataaaattgagaagggttggctcttatgcaaaagccagctatgaacacgctccaaaatatttactacattaaattcatagtgagagaaagagggagaagagaaaaggtagagccaaccttatacttaacttattagaaatgttacctataatatggactaatagccaatagtcaactatactagtagagtgtggaggatggatgcccccacttttatccatgattctgtaatccgttcaatgaaatacccaaagaacaattcactatatcaagatataataaaagaacaattcactatatcaagataacatgatctcttgtgcaacactgctacctatttcaagtctcaagcctggagccgtgcctttatctcgttgatcactaacgggaagctctgcataaagatgcaggtagtcatctgtcaccgctgccttcttgaagttgctgtccttcatgaggaagtcgatgcatctagttttgagctccgtgcagctgtgcatctccgcgcaagccagagtcgccgcgacggtctccgccgacacgatctcccatagcttctgagtgcatccgcaatggttatctatagactctctacaagagatctatgtcagcatatttttctacttggaagagattaaatgaagagagagcaaaactatctattagcctagagatagtctatagagaaaaacgaaacaatggattagagagctatagatacccatgtagacatattattagagcacccgcaatggtaaagtaaggtgctatctataaaacatgtacatctcagcaatagactagaataatagtaaaccatctcaatagtatgtctacatgggtatctatagctctctaatacattgcctcgtttttctctatagactatctccaggttagtagatagctttgctctctctcttcatttaatctcttctaagtaggaaaatatgctgacatggatctcttatagagagcctatagataaccattgtgggtgcccttaaagtggtttactattaatctagtctattgctgagatgcacatgttttatagagaacaacttcctttatcattgtgggtgctctgagcgcacatgagcttcagcctatcgagcgcgtatctgtccgccgccgctagcaatcctcggaagaactcaaccgccgccgccgccgtcgaagacgacgtggagctcgctggcaaggcgtcggtgtagactaagtgcagtagagctctgaacgtcgccggctcgatgtcgtgcagcgtgacgcacggcatggtggcctccgccatggagccgaggagctccgccctgaacaccggcgaccgcgcggcgagcacggcgcggtgcgcgtggatgagcgtctcgccgccgacggagaaggacacgtccgagccgtcggggcagcccaaccatgccggcgagatgcgcggccaggttggggggcggcacggctatgcacggccgccaccgccggcgatcgtcgccgtcgtcgtcgcgcaggacgacgaggccgcacacgaacgtcgccacgccgtcgaccacgtgggacgactcgaggtcgccccgcctgatgaagcggtgccaccccatgacgcgcgtgccgccggcctcgccgacgaccgacctccgtgctcctcctcgcgtgctgcggcgacggcgcgccatgcttgtccgtcaagaagacctcgaagacggcggcgtcgatccgggggtcatcgtcgtcgacgtcatcgatgaacatgaagatcgagacgtgctcgccatggccaccctcgatcccacgcgggtagagacggatccgcgcatggtgctccccggccgagaccttcgtttctggcaacgaatcgtcgatggcgatcttctcggattccagatagtcgagcttgcactcgacgaaaccggaggccagcatgttcgtgttgcacgtatggcgatcgatcgattgatctatcgatgaacagggcacgctcaagggaaaattgattcgtcggtcgatatgatctaactaaaccgatttcaatgtggataagtttgattaaggttccgttcttttctccaacaatcatatattaatctatttttcaagtttgtaataattaaaactcaatcaatcatatattaatatcacctcattttacataaaaaaaacttaattttcatcttcattttcgtctttaagagcatctccaatagatgactaaaattaaactcccaaaaatcctgtattggggacagccaaaaacatatttagcctaaaatacaccctcttctccaatagatgactaaaatttggttcccaaaaatttaaaatttttccacatcatcattagtgggcccttcccaactaattttctacctgctcgttaaaatcacaggcgagagcggagggggagatcgcgtcgcgcgtgagaggcgaggaggagatcgcggcgtgcggatgcggaggggaatgggcatggtcgacgcgacgcacgcggacggaaggagatggctgctcatcctagtcgcgcgcgagatcgcaactgataccgttggcgaggttatatatcagacgcagcgatatacgaaattgatcgaaggacacagtgctatagacgcacatagagctcttcctctgtcagcgccggcggcgttagcacttcactcaatcagagctcttcctctgtcagggccggcgacgttagcacctcacttaatcaggcaactgcagcaagcagcaacgattggtgacaggcacaagctcttgtgcagtgcgtgagtagcaaaattttgctagcaaccatgttttttactttgttctatttcctttttttatgtttctgatctgacaatgtcttgatggaaaaaaaaacttaatttgatatgatgaataaatatttggaaaaacggaaggccaatcacatttttttttaatttgatctgacaacgtcgcaaggggaaaaacttaatttattgtgatgaataatggtttggcagttgatttgatccaagatgagtcgacctcgctcctcgtttcaacagctcgtggatgaatcatcgtctgacgatgacgatgatttttttttgccacggcacaaatcgtccatagctattggcactctgtcaatgcaccaagacatggtgggtcagtcatgggacatgaagtgattgatcgcaacagagaagcacggcacttgagattataccaagactacttttccgataatcctacctatggcccagttttattcaggcgcaggtttgtataagtaaattttatataatttatttttgttatatgcatagatatgcatgtctcattagttatgattcgcaggaatagaatgagcaggcctctgtttctccgcataatgaatgcagtagaggatcacgatgactattttgtgcagaagagaaatgcagctggtttaattgggttcagttgtcaccaaaaggtcactgcagcaatgcgtcagttggcttatggtatagcagcagatgctttggatgaatatctcggtattgcagaaagtaccgctatagagagcctgagaaggtttgtgaaagcagttgtacaagtttttgaacatgaatacttaagatcacccaatgagaacgatacaactcgattacttgaacttggggaggacagaggtttccccggtatgttaggctccatagattgcatgcattggaagtggaagaactgccctacagaattgcacggtatgtaccaagggcacgtgcacgagcctacaataattttagaagccgttgcttcaaaggatctctggatttggcacgctttttttggtatgcctgggtctcataacgatatcaatgtacttcatcgatccccgctatttgcaaagctagctgaaggcaaggctcctgaagtgaactatagtataaatggacacgattatatgatgggatattatcttgctgatggcatatatccttcttgggccacatttgtgaagaccataccagaaccacatggcaacaagaggaaatattttgccaaagcacaggaagcagtaaggaaggatgtcgaacgagcttttggggttctgcaagctcgatttgccattgttcgagggccagctcgacattgggatgaaaagactctgggatacatcatgaaagcttgtgttatcatgcataacatgattattgaagatgagggagaagttgattgggaagaacggttcccagagggaggagaaaatgtcagagtgtcccacgatgaaatacctgatcttgataattttatccagatgcacaaaaaaataagggacgacgaaactcactatcagctacgtgaagacctagtggagcacttgtggcaacattatcttgataaatattgaggttttatttatatgtttgaattccatgtaataaatagtatacatatgtgaggatttgcaaaatcattttaatttgttcttcatgtattgaataaatggtgtactgttcggtttaagaatagtacaggagaattaataaaagtgcacttcctttatgcattttgttgaatatgtcggctggcagtgataaatgtgtcatgtggtcttcctgtcaatcatgaaaagccacagatgaggtagaggccccagaagcttttcaatcatgccaggaaacaatcaaacatcaggctctcagtgagagacaatacagattaccacaggtcaatagcaacatcaggctctcataaagtctgattcattacacagactaacaccaagggcatgataagggaagtacccatctactaacaccaacttcggacaaaacaaaaagacacaattctgaatataaatagtttgcattgcagacttagtaaacctagataaatttctaacaaaccactgatctaaactgcagctacgattgccatctctttccctcccattctctgatctggtcacaatttgttcagttgcttcttcacatgtacgaaggtctcagcgaggtggcttccctgttgatagcaataagatggagttcgaattaaccataatacatgtacagagtatagagctgccaagttttctagtctattttaattagtaatgtacaatatttgaagctacctatatgtttgtactgtaaacaataattgaagctagctagtactgcaagtgatttttttgactgatcactgtcgaaaatatggattcagtaacctatcattcaaactgaaattgaatatgcactcacatggatcagttgatcatgcagcaaggtatttgatcttcggctcttcggtctctgtaggttcattatcttcatcaacatgattggtagtatcatcatttgtgggtatagctttttccaaaccatctgtgcttgccttctgttttttggtggcatagggtttttgggatgttatttgcttcatcttatcatgccacttggattgtgacctcaagagagtccaacagtgcaggaattggaagggcttatcttccaactccttaaatacagcaatggcctgagcaatctgcacatgtcaagtcaagtgaatgtggttagcaaacatcatatcttttatttataaactaacataaaaacacaagctacataactatgtagtaccttgtcgtgtatactaaccccgctttgtcttctaccctcaatctggctcagatatccacaaaacttgttgacattctcttgtatagttttccaacgatgcataagtgaattctggctgcgatctggtgtggatttactcgttttgtataagtgctcgtatattctagtccaatatgcagcacgagtttgatttgtgcctagctctggatccaaacttacatgcaaccacgccgacacaagtatcttatcttcttgttcactaaaattcttcgatcttttttgatttgatctagccacggtagtcctctcaatagtggggaactgctgcgtgacaggctcgctactcatgccattctcatcaagctggttactcatatcatcctccacaggcatcgtactcaaactatcccaatctaaggaatcgttcccctcattcatcaaattagtatagaatccttcttcttccattatcagtaggacctacaagcaattatctccatcatgtatgttaaa

SEQ ID NO: 22648 - DNA, 6037 bp, Oryza sativa
ataaaatcttcagtagaatatgaaactagcatgtcccatttgtcttcttgaataaaatagttttagtacaattaagtggacttcaatagaactttagggtgagaagaatatggtctgttagcaacttgtgaagactattttggacatattcatctaagacttgtatcaacgaaaacaaagaaatacacataaggaccttgtcagtactaggatatcaatggggataatatcagtgagtcaacctcaattgaacacaaagagagttagatccatggagagaagcagaaaataaatgagttgttactctgaaattacctcaaacaaatccagtagcaactcacgtcgttgagaggcgaggtggacgaaggggcacagactgccgacggtccctggattgacagtcgatggtgacttggacggaggccgctagcgctctggacggaggggcggcagcgacctagatgggctgccggcggcgccctggacggagggccggcgacgccttggagaacctgcggcgtcccggacggacggacggctggcggcgccctgaacggagttggcgcgaggagaggaagctggtgcgaggaggggaagaaaggcgcggctcctcccggcgaacgaagagacggtggttgagggaaagcgcgggcgaggaaaaaaattggcgccaggaaaagaaaaaacggcgcgggcaggaacgattgcttcgattgggagcgcttctagttgcccaatatttggttcaggttggtcctggttttggaggtggctaaattttgggaccatgtttaggagtttgttggagggctgattttcaccaaattcctaaaatttatgttttagtaacctgtttagcattctcttggagatgccctaactgttggagtacgtatacatcacggtcagttgggccatgaagtgcaaaatccctaattggctaacgtgctagcgggccttaccaatttacgattttctattagagtaagtctacttgtactccctcaaatatatgtccattttgattcctatcccgtaacagtaataccagatatattgatccctccaactattaaaaccggtgtaacagaatcttgtatttgggtttaacttttgtaccttttgcattggagtgtgcgtttttgtattataatgtgtgcatctcttaattgtttgcagtcagttgttaaaatgtggcgaatggtttaaccttaagaagacaggagcgagtactctttaaccgcgttctggccggataatagttgtaatctcacatctctagatgtggatgtttttagtgagtaatatatctcttttttccaaaaacaaaagtggcgaatggttgaaccgaagcaatttcctgtctatgttatttctggcctgaacttgttttagcacaaagcataccatttatgggactttctgggacgtttaattatttaccatttttaagatgcgccaattaaagatttgtcacttgctatctatgacatgtgggtcctcatgtgtctatgatatgtgggtccactaacaaattctttagaaccacccataagagtggcaaatagttaattatgcccctgattcctcaatgagttaactctatggtttatcttggcatgtggattgaatgtttttaagctgtaggagtatttctttgttgtttcattaattacacaaaaaaatattgtcccattattactggccttattcagtaacatcttacataatgtttgctaaatatctgtttgatgtttttattagaaaataggataaacctggcttcacagctaacctgtttggtgttaaggcactacctccgtcccagaatataaggagttttagagttagacacagttatgaagaaaatatgtaaaattaaattgtggaagagattgtgattggtagggtgcgttcggtctgaccgaaaaattcggtctcggtcttcggtctttcggttatttcagtctttgaaaaatgaggaccgaatttcttcccaaaaaaactcaggaccgacaaattcagtctcggtctcggtctaaccgaattttgacagactggggactggctagagatggaggcggcgcgatggcggcgttgaggcagaggcaggctcgcggaggcagcgtgatggaggcggagggtggagacggcccgggcgcgatggaggttgaggatggactggcggaggcggcgcgatggaggcagagggtggaggcagcgccggcgtgatggaagtcgaggacggaccagcggaggcgccgctgaagccgccgtggacgagctgctgctgctactcaccgactgccttacctccgaccaaatctgggagagagaggggagggtagtggggacccactgcctcctccattgttgccgctgcaagcggcctcctccccactggccatatctggaagaggtagaggaggagaggagagttggggagccattgttggtgccccctctactgcttccgtcgtcgccgatctcctcccatcccgccactggatccgcctcccatcgccatcgcctttctcctgcaacactgccgatgccacctagatctaaccttcccataggtggtctggggtcgcgccaccaatctgcaacccctgagcggtcattgtcaccgttgccttcccgagctcccaccctcgtcgtggtcattgtcgagcttgttgccgctcttttgccaaggcgtgaggacggcgaggagcataagtgtgccaccaagaaagagatcgagagaggagggatttgcactggtgagagagagagagagagagagcgggggggggggggaggatgagattgagaaatgaatggtgagggatggcttgtatcacgacactttgaatatgctacagttgtcgaccgtgccatgctggtcgctagtttttgcaggcggtcccttaagtacaccacttgtaaaaatatccttattattccatgcaaccctctttaatctaccgtttgtcaaaatctattcttgcagacggggctaaaactagggcctctagttatttttacaagcgtaaattgttcttctgaaaaaaaaatcaaacctaggtgttgtgaaaaattgtttttctagtagtggaggtatgagatgatgtgtcactcatccggaagcttctcatagcaaatcaacatgaaagtgatgtacaactgttgttaagtggtggctataaaaataaaagggcaatttgggggtttcccatgggggtaaccttctgtattttgcctataaatatagagctaagtctagtgtttaataaggtgtatagcgagagaatctttgtgaggaaaaattgtgagaaactgagattggcttggtcaatgcaattttacttgtgatagttcaaattcacatttaatttttttgtccttgtttacccgaaaataataggagaaactcctattgtattttacactaaaagagataatatttacaagcatcacattcatatttcacaagcagcatatatctctccatgacttcagctaagcatgcatgctacaatttgttactatccataataaattgagtcgctgaagtaataacatttatctcgtgggacaactacatctgcaagcttcatggtaacctccgatctagatagacaaagaccgagcccaatcaaaatcgacaagaagcataaaaaactcaacaacaaacactagattgaatatgttgaatgctaaaaagaatctaataaacactagattgattatgttgaatgctaaaaagaatctaatgcaggaatccttcttctatcttcagttcaaataaggcagcacacaacttttattgaaaaaaaagaaatgcaaatataaaccaccagttagtgaatttgtttcaaaatctcatcatacaaagcagaaccacacaaacattctccaaaatatcaatccaccttctctagaatctcacatcccacattgtagttacataagcagaagtgttgtttcaatggtaccatttcaccatctaacataaagaactagagcatttttatacaagcaggtgttactgacaaatcatacaaaactaggtacgatgcttcctgaaaacactccctaaacaagacaactaaccagagaaagttatctatcaaaaagagctaccatgtgatgtcaaggttgttaaggagcatatttatctccttttaacaccgatggggagtcaatgtaaccctccctccgtggctacaatcttcctacagttgttgtcctccaagaagtattcaaagcatttcttctttaatgcaatgcaattgtacgtatcagcgcaccagagtggctgcaaatgattcatccgtcatcctttcccatagattctgggtgcaaatgagcttcaatatatccagagcaaacctatctgctgctgccaacaaactttcgaagaattcacttgtcgtctctcatagcagcaaggcgtcgatgtatatgaaatgcaatagtgctctgaacgtcgccagctccaggtcatccagcatgacgcacgggatggaactctttgccattccacaaaaaaaaaaaactctgcatggaacatcggggaacgcgcggcgagcacagcccggtgcgcatgaaacatctcgctgccaacagagaaggagatgtccgagccattggcgctgcccaccatgatgccgagttggttccccaggttggaaggtggcactgcaataggttcgttgtggttgcgcagaatgatgaggccacatatgaatgtaaccacatagcgagagtcaagttcactcagcttgacgaagcgccaccaggcatcaaagcggaagccctgggatgccttgcttaccagcagactcctctgggaatgttgcacggctggtaaaccatccttgcccatgaagaagatctcaaagatgaggtgggtgttggcgtcggtctcattcagcatcgccaccgcgagagagaggtactcgccattgtcttgttgacgcggagacagccaccacagaagacatgcattgtgctcccccgctgagattgttagctttggcagtctctatccgacagcgagcttctggatttctaggtattccaccttgtgctcgatgaaattggagacgagatccatcacacatggctgggtggggacgccgaaggctggggtgggagatcgggagatgaggatagtgacgggacagcgtcggaggctgggaatgcttctcgttggagagcgtaggagccgggggggggggcagccgtgcgagccgccgaagacgagggaggagaggtggggtggggaaatttcgctggagatgaagaagaggagtagcggaggaggtgggggttggggagtacggatggcctcgtcggcacggtgccggcggcgcgcgcgagggttgggggatggagcggccgcgatacacatgtgccgggtggaccacttgaacggctccgacgtgttcttcttcgtcggtggcgagacgttccatgcgcaccgggccctgcttgccgtgtgctcgccggtcttcaaggctctgctccttagctccacggcggaggcagcagcctgcagcatcaccctgaacgacatcaagccagcgatgttcgaagctttgctgcacttcatgtacaccggcgacttcctgccagcgggagcccactcgtcgtcgcctgacagcagcgacaccaacaccgacacgctccaccggctgctcgcggcggcgcacgagtataagctcgacaggctgaagctcatgtgcgcccgaaaactcgaggagagcttgtcggtggagacggtggcgaggacactgggctatgccaagatgtgcggctgctcggagttgaagagcaagtgtctcgacttacttcttcttggcgaagaagaacatcaaagcattggccacacatggctacttctggctctggcataacttcccttcggtcatccaagagattaaagtgttctggtcgcttgagcgtttacagatatagatagatactccctccgtcccaaaaaaaacccaacctaggatgggatgggacacattctagtacaatgtat

SEQ ID NO: 22649 - DNA, 13238 bp, Oryza sativa
tctcccatcccatcctaggttgggttttttttggatggagggagtacttgttaacatctcattcttatacaagaagccagagatcttcttgttctattttgggagtggatttttatccctcgaggggatatccctttgttgtttgcctgtcacccaaatagttataaatttgaaaaaaaaagaagatatattaacatgtgatatatcgctccacaaatatgcaaattcaaattcaatttctacacgaagttgaatttgaacttacatgcttgtagagtgatataccacattctaatacatcttctcaaattttttcaaattttttcataatcatttaggtgacatgcaaacaaggatgatatataatatacttcgttcctataaaagatctatcgttatagattctcctccacatctctgaacttcatgccatcacctttttttttttttggaaacccatgccatcaccttggacatgctgaaatcatacacctgttaccccgtaaacgcacagtaaactacacagaaatatacagtcggagcaatgcctgaatgccattttcagtaacacaaatacaaccaacgaatcacagaagaagaagaacagcaaggtgaccagcagctcattgatgttcaggacagcagagttgcagatgtacctcccggctgcacggggtgtctcgtagagcaggatgcggcagctcgcgacgtcgtccatgtggacgtacaccatcctcccgtacatggtgaatttcgttctcacctgcagtgcgatttcatggacattaagagtcagagacttgaaagcggagagcataaatgtagaagtgtttctgaaagattgcgctccattgaaatgcacgaatttcattcatatgaggtagttcatgatcagagaacattctctgcatttcgggtggtgttttgcgtaccatggaataggcctaggacgatatcggtggtagcggggcttaattcatggagaaaatcccctgtgtacacttaaaagttcacctaatcctttgtgtacccctgaattttgctcaatcccttacatacccctgaattttagtttggatcccttccataccctttccgctagttgaccgttagttgaccgttaaattcttatgaaaaagtccattttgccctttggtataaagaagcatataaattaatagagtatattgttggagaatagaaatttgttatatgagactattatgtttatgagatagttatgcaccatactatttgcgataaatatacttttaaatatgacataaaaaattaatacttatttattagttattaaaagatttttttagcatatgtgttctgaagtaataaacaaatctgttgtattactatgaaaacacatatgctacataaaagaacttttaataactaataaataagtatcaaatttttatatcatatgtaaaagtaaatttgtcacaaataatatggtgcatcacatactcataaatataatagtctcatccaataaatttttacatttcaacaatatacttcattaatttattatgtttcttcatagcaaagggcaaaatggacttttttaaaagaatttaacggtcaactaacggtcaactagcggaaagggcatggaagggatccaaactaaaattcaggggtatgtaagggattgagcaaaattcagaggtatagaagggattaggtgaactttcatggataaataggggattttctcttaattcatgacacaccaacataagtttggacacttcattcttaagacaaccaccaatcagttctcaaaataaatttattacccctatctctatatgtatacatctttctccttcttactacttgtaccataagtttattcactctctagtccctaaattgtttatcggttctcgccttttcggtgtttgaggatatgctaattggcttatcgaacctaggacaaatcgacgtgtgttcaccataacgggtttttttttcgagtgttcgttcgatgatatctatcttttttgcggcgatgggttttcagatgccgctgtgggttgcacgcaagatgtttaaggtgtggcggcataatttagtgtcaacaccctggtcattaggggagcctaatttatggcaaaaccatgatattcttttggagtaagagaaggcatataggcacaacacattatgagtgagtgtttgagtaaagatgattagaggtaaaacgatgtgggattaattaatttaaactaaaaatagattaataagtttttttaaagtaacttttgtatataattttctaaaaaaaagaccctttagaagttcagaaattgtgggcgtgaaaaacaagatattttccaatcttcttaaaatgatgctccctaggtagacgaattcataagacatgagttactgcacataatatacatcttggactgggcttcagcccatatgcaccaaagtctcaaatcccccaaattcgtagcaaattcggcattccaaattctaatttgaataatatgtaaactatttgagaaatacgttaatacggtactcgcgtagaaatactgcacatgatcgtcgtgctctactttacacgtctggatcgtttggcattttctaaacaaattctcgccgaaaagaggagagatcacgcagaaagttcatcctctaatccatccctttttctctccattctcttctctaatcctcctcttctcctcgctgcaacgcgacaaatcgaacagatcaacccaaattttgatcatcttaaaattctaaattgatctaagcagtggcatccattgctactcctcttcccactccaccctcttctcgtcttcgtcttcttccccgacacgtcacctcgccgccgatggagtcccacgacggcggcggcggcggcggcggcgatggggactcgctcttcgaggggatggtcctcttcaccccgtccctctccgtcgatcccgatcccgcgccgcccgtcgccgaggcccccgaccccaagccgcccacccctcgcgacgatgccgccgtcgccggagctgacggggcggcctcccagcagcagccgccgccgcctctggatgaggacctgttctccgatctcaccctcctgtccccgcagtcccccgtcgacctgagcggcgcccaccaaggtcaagatcaggaccactccgccgccgcgcccccctcgccggtgccggctccggctgcacccgtcgccgttctggcccggcaggcgtcctcctcggcctcctcgtcgctccgcaagaagaagagggccgtgcgcatcgggtatggccgctcgcctcaacccgcgcctccttcccctcctgccgttgcaattgctgctacgaccgccaccgcagctgctaccgctagtgtaatccatggcagcgtcctccccgatgcttcgatgcatcatcaatccgctccgaccatcccagtccaccacctcgaacaccttgataatggcgttgagcaggctgcagcggtagcggtggtggatccggatgagaattctcttcatgtgaaagaagaggatggtgaattggaggaggatggaggtgctggggctgaagcaatggggattgaggagagattggctcttcttagatcccaaatctccggcaagctcgagtctatccagcagagagccactgctgtggctgccaagaggaggcagttggctggtaggcggcgaaaggttgcggaggacgtgggctctgcggcatccaggcacaaggatttggagagggagcttgaagaggcgtgcgaggccgaggactttgagagggccgagaagatcagcgactcccttgcggcattggagaaggacaaggatcggttgttgacagcgctgcgtgatgcggagctcaattatgattcggtggatttggaattgcaggatgtgctggattcccgcattgccgcagaggaggaagctgcttcactcctggagcattttgcaaaggtaatttagctgaatttcttcttacgcactttgcatgagactctgaggtctggactcttgacaagatatgtacttcctggaatccaggctcccctgcaagcaaccattgcttggaaaccgataccaaacctgaagtttccctacttgaactctaatattttcaaatagctattcaagcatgacctaattctaagtgcttagtaatgaatcattgcagaatacattttaaacgcatggtccaataaggcaataaggcttcattttccagatatcctagtctatgctgaatattttggccactatgtcataaattcatttgcacagttgtcatattctcctacaaaagttgtcttgtggcattgcatctgatcatcatgaactatagactgtagtagtaagtacataaaaaactgaaaatgccgtgaaaagaaattttagcttaagtttgtaagttaaacctgagtgataaaaagcagccctgtatgcttcaaagtatcagtgcattgtgttctgttcttctagttgatattacttatcaacattaaaactctgttttttaggatgctactgatcacactgattcagcaagcaaggaggcagaagaaatatcattgaaagaaatagaagggtggcgagaatcaatggaattgctagaaacaaagaaactagagacggaagtagaaagtgaattggttttggcagcacgttcaggattggaagattcgatagaacatctggttgaagatgacaaaagagaaaaggacatgctgagtaagaaggggatacccttgcagaggagttaactgagctcctgaaattggtaaggttgaaagaagcagagatagctgaaaacaatgctcagatccaggaggttcaagaaaggatcactgccgttgtctccagattttatggatcccagacagatattgatctaaagctcaaaacccttcaggaagcacaaactaaaatggactcagaggctcaagcacttgccctaaaaaagaatgaaattgatagtttcatctccttatcagaacagaaagactcaaaattacgggaaattatcaatgattgttcctctgaagcaaaagcttgccagcagtcagtagatatcagaaggaagcttgcatcgtcaattttgaagtcaagggaggacagaattgggttgttaaaaatggaggaggaaattttgcaagatatccaagtgctcaggcaacaaacatcagatgcaagaatcagtcttcaggtacattaatcctttttcatgttgataaaaaagatcatcatgtttaatttttagaggacaccgtgtaagtaagaacacaaatatttttatgtacttattgagtttgatgacttgcaggagatatcttcaaggaaggctgtcattcagcaagatatagctacatttaagcagaaattgagctttattgacaaaaggggccctgaactagaggctgaaaagagagttgctgccgctgcaaggaatttcaaggaagctggaaggatagctgctgaggctaaagcgctttactctgaaaaggaagaacttcatgctaaacttgagaaagctgctactgatctggaggtaatcgaaaaggatatcacagctaccactgacaaaatacaggaatgcgaagggcttattatactcaaagaaaaagaatcagccatgacaagttacaaaagactcaggttggatgctgctgctgctagagcagaattgactgctgcaactgaaacagacgatagcgaagaggttgaggttctgcggaaagaagctgaagctgcagaatctaaagcaatggaactaaaaacatgctatgaccttgaactggacgacaacgaaatcatgtttcagcctgtagtccctatagtattcataaccaattcaacagggcagcacttgctagaaattgcgtcttctttcggtctatccccctagaagcaaacttcgacagtacttgcatgccaccatgcttgttacagtttgtagagttttgccagcgacagctgcctattgaagggaacatctgtgctgcaatcaaagcttatctccagatatacatgtcttcctcattgttcctccttacctcctagcatttgggatctactctaaatcgaggagaggttcctaggggacagccaagtgtataacatccattttgcgtactcaaactcttcagggagtttgtctccccctcatttttgtgtacattaagactgtaattcttttgttgttgtggtaattttggttgagctacagtaaatgccattcatccgaatgtaatcagtataagttatccatgaaataaactctcttctgcattgcacaactagtcacatcgagtcatcgagtatgtgttgaaagttagtcctagctaagaactgttttatagagttgttgcttcagcatgaagaagctgtgaacctcacaggccgttgtgaaatctatcctactctctacctgccaaatataatcaccaaaagggagtgacattttagtatactttttttttctgccttttgtactcctaatacatactttcacagttcatataaagatctcgagggtgaaatttcaggagcaattccagtttcagcttgggagaatggagaacactaccaagggcaaggtgtgtgtcactggggcttctggctatgttgcctcttggcttgtgaagcgacttcttgagtcagggtatcatgttcttgggacagtcagagacccaggtccatctttcattctgttctaattgagttcagtttacttgtttcatggtgatggatggacttgttaatttgagtttaaatttctgtttttggttactttggcaggcaatcacaagaaagtagggcacctgtggaatttaacaggtgcaaaggaaaggctggagcttgtgagagctgacctcttggaagaagggagctttgatgatgctgtgatggcttgtgagggtgtcttccatactgcatcacctgtcatcaccgaaactgactccagcaaggcatgctacactaactgtgaagaccactttcaccctgcaattatgcgactctcctttttatcttggaattcagatttaagatgccatctggttgtaggttttaacttttaacagatgtgatgctacttcatttgtaggcagcagtgcttgattcagcgataaacggcaccctgaacgttctgagatcatgcaagaagaacccatccctcaagagggtagtcctcacctcttcatcatcaaccgtgaggctcaaagatgaagctgatctgccacccaacgtgttgctggatgagacatcatggagctccatggagttctgcgagagtctccaggtgaacagagcacaatccgatatatacatttgcaggtttttggcattgtttcagctgctctgaacatctatctttgtacatagatatggtacgccattgccaagacacttgcagagaaggcagcctgggagttcgccaaggagaacggcatcgaccttgtggctgttcttccaaccttcgtggttggacccaatctgtctcatgaattaagtcccactaccaccgatgtcctcggcctattccaaggtacatgaaacgcaaccgtgaatacgaagaattttcttcgatttcagttagaatcatgaactgtctcatatgaaactcttgcatttcaacggagcgtaatctttcagaaacacttctacaaagacgctctctgcattcagtcctctgagtgaatgtccatgaaatcgcattgcaggtgagacaacgaagttcaccatgtacgggaggatggggtacgtccacatcgacgatgtcgcgagctgccacatcctgctctacgagacaccccgtgcagccgggaggtacatctgcaactcggctgtcctggacgtcaacgaactggtcaccttgctcgctaggcgattcccttcgtaccccatcccaaagaggtcaagaactccggcgaaatggaacttttttttttctgctgattgatcgattcattggtttgtgtctgtgtttctgaagatgacattgtcttgggatttctctgtagtttgccgtgcgtttacggggagcagacttatggtttcagcacggccaaggtgagggagctgggcatgaagttcagagatgtggaggagatgttcgacgacgccgtcgactcgctcagagctcacggctacctgctgaacagcgtaccatgacaattgacgacaaatttatcagaattcagaaattgggtatgccccgacgaagatgaagctgtagctagaatcatcagttgcacacaggaaaaatgtgtctctgtgtcagagaaggttgtgcgctactgaagaagtggagatgattatgtattatactccctccgtttcacaatataagtcattctattatttcccacattcatattgatgttaatgaaactacatctatttaagtttcattaacatcaatataaatgtgggaaatactagaatgacttacattgtgaaacggaggaagtagaagatttataacttgttgagaaaacgttaatcgtattgttcgtgtatccaaaacataaattttaaaaaaatattatctcgttcagattattgttagtggtgactattactccgtagtattttatttcgaccgcttgttagttaatgaggacgatgcacaaaatttcatactcgtgtctaagatacaatacacttagtaaacatgacatcttttaagtatttgcttttcttttcccaggagtagtcaaagttggatgatgactaattctgttgactgctacttaaaaatggatggagctatgtttaaaattaagaagatttaactgcaactactgtagtataatttttttttaaaaaaatatttttgaccagagggagggtttttttttttttgagagagtaatagggaggaggtttaaacatgaccaaaagcatgactcgctgatcgatctgagcccatgggccttatctcggcccaagattccgagacgtaatcaagcaggaggacaaagtcatagagataagccgtttttagcgcactcgcttgctcaggttcctcctcatcttcttctctcctcttatccccttcgccttcctcctccccgcctacacgaccagttcctggtttctgctgccttccctcggtctggatcaacaaggtgagtcccaatctttgacatcctgcctcacttccattcttgcacccaggtttgcttggatgatttctggtttcgttggcgacctgcactgcacctgttcgatgaattgccgcaatggatagtttcttgattgattgagtacgctagggtaccgtttgcactgagtgcactagatgtccgaacacacgctgagaaatttgagggatttttttatggttgttgagcagaggaggtcgtccaatggcgagtggtgggagcagcaatgccgggagcctgacgcagtggctgagggagaaggggttcgacgaggaggccatcgggcggatgtcgagacggtgcaagaaccttcacggccttgacgccggcgaggcctccggggtgtgggactacctcctgaacgtcgtcaagatcgagcggcggaagctccggtacgtggtcaccaagtgccccaaggtgctcaccctgtccgtcgacgacaagctcgtccccacggtgcagtgcctcaccacgctgcaggctaagcccggcgaggttgcgcaggccattgtcaagttcccccagatactgttccacagcgtggaggagaagctctgccctctcctcgccttcttccagacgcttggcatctctgagaagcagctcgccaagctgctcatggtcaacccgcgcctcatcagctacagcattgaggccaagttctcgcagaccgtcaacttcctcgttggccttggcattgacaaggagggtatgatcggcaagatcatggcaaaggagccctacatcatgggttacagtgttgacaagcgccttcgtcctactgccgagttcctcaagtcggcggtcgggcttgaggggtcaaatcttcagagggtgatcatgagttttcctgatattttgtcgcgagatgtcgataagattctgcggcccaatttggcgttcttacagagctgcggtttcagcaaggatcaggtcatggcattggtggctggataccctcctgttctcatcaagagtgtcaagcattgcctggagcctaggatgaagttccttgttgaagaaatggggcgggacatgggtgaggtggtggattacccccagttctttcgccatggtctcaagaggagcctggagtaccgccacaaggtgctcaagcagatgaattcaaggtgcagcctcagtgagatgcttgactgtaatcagaagaagtttgccatgaaatttggtttgcttgcagcagtttaggcatgcatcctctcttcagttcccatgtagcatgtttatttttcaggtgaaagtttttccttttgtactagcattttggacatcgagaattcaaagcattttgctttactgggtgttttctggaatgtcaagtgcaaatttgcctctttcagtgtcatgattaatgtataaccttgcatcaattcgcagaagagaaagcaatgcaaagcatatgaattttcttgtcggcatgctcttctcagttgaaatgcccaagtgagttgtaccactacagcagtaaggggaagacattactacagcattcctatccttggaagctatcacaatcacctatttacactacacatatacaccaatcatttgttatttgttcattacttacaagcacaattggggaaagtgggaaaacagtgcctactcagccaaactcctatgtatagtatatctgaaagatgatttgaaggggatccactcaacacacttgtctattcttctccgaagacattgtctgatttccttttgttgagcttcaggcatgatctcacatgccatctcaaccaagtcaggcaactcgagagcagcatccttcgcataatgatggagaactttaggtaggaagattgtctgctttctgactatgacactagcttgaatgaactcagtcctggcttgatccagttgatgattcactttcttggcagtgtacagcctcacctgcagaactttttacagtaagaatattgtgatcactttgcagacaaaattttagcatatctattctgcttacaggtggatctgaaattgctccagtggaaagagcaaaatgagcaagtggctctggaggatgaagagcatatggatgtatggagctccctgatgccgattttttcagtggagtaaatagagtccgtacccactgcatgtcaattattttgttagtttctttcctcaaatgtgtttgtctttgtattattggtggaaaatattgtgcaggtgtaaaccataccactgaagtgcgatgggattggcatccaataattgagttctggataatttgggcgtttactgaaagcccacccacattatatgcagcctgacaacagattgttcaagtatgtaagatatatcaaaacatttcaaatgatgacagtatcattgttcaaatttgatagttgtgtaccttcagaatcatgtctgtgtttttcatgcgtttctcctgaagtccataagccataaaagcctgttatatttcagaaaatactgcgggttaggtgtgcatgcattctgggtttaacactgaagtgtagaacatagcgaaggtgacaactgttgtcagtcataaaaaaaaaatgttatgactactatgcatacatgcatcaccaaagcgttgtggatgttgatccaaaaacagagctgctcttcatgtgccatttttgttgggtcaattttctcaagtcgttttatcagcgatctgagattaaaaaaaagtgaacataagtaaataaatagcatttcctgctttataggatttctttattgcagagttgcttacctgacagtctctagcattttagaggcatattcaaacttttctgcatccatatatatccttgggcatattatcatcccattgtattgttcacttttctcattcaatgaatcatatttgtcagagcttgtgttgacattgtaatggcatcggggactccaactatcaacacggtgctttaaagaaaatgtacttgatgaagaggagaatgaaggagttgataaagtctcaaaatccgccaaattttgtgatggctggcttgcaagtttgcagtatactgcagaaatgcatcttacgatgtcctccgaaagtttgcaagagatctttggcacatattcagcgattgaagcactcaagaaatttgcaaggctagaatgtcctgaagatgatctcgacagcccctgtgaaaaacatgaaagatagattttctcagtttgagagattttgacagaaaaccatatgtttgtgcctgagctaaaacctgtactttgaagaggaaaaagatataactgaaactggcacaaactggtaagttttatcagaagaactaaaagaagagattgttcatacatgtttagaatctgaaactgttgatactgttggcaagttgtaggatgctgactccttgatatttctcaatcggagggcaccttcatcagctttctttctgcttttctgatggtgtatttcttgatccacctgatcatgattgtaaacctaaatatactgtatactctctgaatttatgtgcagtatagttctgaaaattgatccatccaaggtgcaaggcatgtacctgggtagaaacacgaggggatacacctaggtgttgatcaaatgctgccctgtagagggaaagcaaatgcagttccttgcgaacaacttcctcctcaagggctgctatctcccaaactaagtctgcaatagactgcaggaaccacaaggtcagtgatcagatatcgataactaaatgtttataatttcatttgccttttcacttcgttttgaattttaaagttggaacactgttttcagagtatcattattatggcacatgatctttgttactattcttaaggcctcaagttattttgaaaaaaagcaagatgattagaacaaaagtacgggtataaaacctgaactgaacagcttttcttcagcttttggaaacaaataggaccttgagatcatgaaatactatgcaacttatgaggatgtggagcaaacctttgatatggttttctcactttgttctgcacttgtaatcacgtgatgctcaggcaaatgctctgccagg

SEQ ID NO: 22650 - DNA, 31640 bp, Oryza sativa
cgaaagagctggaaaagggggcaatcaaaatggcttagactatgggtacgtactgcatgcagtactgtatacatagctggtcctgcagtatatgagatgccgtcctatgataacaaatactctctctttcccaaaatataaacatttttaaaatagtgacaagttaaaccttttaaattttgactataaatagcaaaagaaatttaaaagattaatcgtataaatttaatgttactatatttatcattaaacaaattatcataatatacaactctttatttaaaatattttactttagtagatattgttggttaaagtagtatttcggagaatatgtcgagacaaaaaaaaatacttatattttgggtagagggagtaagttttttttttagggtatgttgattggttattatgctcttaaaaaacatagcattgaccatcgaatacttacaagtaggtttctgcttctgtaaactttcttttaaaggaataaacattactctgctcctatatgaatcttaaagcacatgtcgggtttaggtagagtaactaacctggattaaactaaaacaatcaaactatcaaaggaagattcccctaatgcagtcttcaatatattcatgtgcaattgttttcttaaaaaccacatcattcttgcataaccgaagtcaaagtggtcagtaaataatagcagctcctaataggacatgcattttgtttatgttcgtatacgtagtaagcctgttccaattattaatagaccactgccctgtttatgctattgtaacaagcaaatggtaagtatccaattggtgaaattttggaaaagatagttttctttagtttctagcttctatgcttattaatttctaaattctacacctactaaatcttaaaatgtggtgcgagaattttttttaaaaaccgaagccagcttaagttggaattatattaaggaggagagaaagtattaaccttaacaatatcaccaagaaatgtgaaagaaatcagaggaggcgaggaaaaaaaacacaaattagaactacacactaaacaaaaacttaagcggatattctcgcgatgtcttttgctctacacatgctacatagcttaatttcgtcttatattttggtaagtagctgcgacatggttttttcttgacttggtgcaagaatttggacgtttcagaagtgttgtatattcttaaatttgttgcggctatttttttaataaaaaacagtagaataggctagctcctaattattgcagctaccaaaagctcttcaaccagattctgtgacggtgcccattaaattaaacttaactaaattaagaagaagcaggcatagacgggatcgaattacagggatgcatggggggccaaaagagcagatggatgggacggagtgagctactactactaatcaacttgaggagggtaaaggcagcaatcgagcgaaagccgaaagccgaaagatcagcagcggccagcaaggcagcaccagcagcagctgctgctaaaagccgggaagcgagcagcgccttctccttcgaggagtccaagaaagagcccaaaagccgcaacggcaacggcaaaacgcgatgaaaccaacggtgcgcgcgcacgagcgagtcgtcctgcatttctgatctgcgccggcgctggaggggctggatcgacctgcgacactttacagcgcatgcagagacgacggcagaagcagcctcttcgcatcgcttgcttttcgccaacaaccacgacgatgataacaacaacatcagcggctagcagcaacgtgtcaattgttttttttctttaaagaaacacagtacaaacgaagatgctcataacacacgtatattcaatcttgtaaacacacgtatacaaaattattgttacggaattatggacatgttgttttcagggggcaatccccttcggttcgatcatgtctgcaccgctgcatcaatgagatggcgctttggacggagaatctgaaaattgagggtcggaatgtaatctctacttgtaaaaacatcttctcctcccctctaagatctctaaatatgatgtaatgaaaccttttcgtttctaatgtcataacatgatttaccccccccccccctccttctggtgacttagtaaaaaaaaacatatgtataccctgcctctctagacaccttcgaaagatttggaccggcacatttaatctatagtgctacagctttcgtactcgatctactaggcacttggcttctccatgatcacaaggcatcatcggtgcatcgccatcagaatcatctccgaattgaccaccactgcagcgcattaggcaccattctctacagtgcacacgaaatcgaccaccactacaccaccctaagaaagaaaaggaaaaaagaaaactcaagtatgtatcatctaattaatgtgtgtaggtgcatccgttcatgcatgtacagtgcacgacggcacacggcattatcagagaaattatacgggtgcagtgcagcagagatatgcaaagtgttactgtcatatgatggagctagagtatatgggcctgtttgaggagctttaaattctgagaagtagttgtttgttagtcagcttctgagaatctggaaaagctcttaaacccagcttctctagcttatggcttcttagtttatttttcaaaatctgtaactatatattctcagaagctgtgaactgtttggggcagcatctagcagaagccgcttttgagaaaagctacagctgagacatgctccctcaaacagggctatatatcgatggaagaaagggtcacgggcacaaaatatagggtgataggcacgcaccaccgaatggatggacggacgcgtgcgtgcgagcgagaggcggtcgcccgtccatcggtttctccgagtttgttaatagcagccgatcgacgagacgacgacgcgccaaaggcccaaaccgcatgtgacccctggggcacacacatgacacaaggacgcgtgcttggtacggtgaattggtgatcatcgcgtcgtctcgtcatcaactaacaaaaaacctggcatcacgtgactgtgcgaagcaactttttgggaggatcacattagttctttttttctttcttgaaagaaaagagggggtcatatgattgaagaactggagcattcgttaatttcgaaagtgtgtagaagaacgcatatacatgaaataatcgatcgtgtacgtggctgcactgaatgtctgcagttaatttgctgagcccacggtcaaattaactcgcgaacacgcatgcgtgcgtgcacaatgtgcagcttatgcgcgcattcatggtgcttgtgcatatttctgggcgagaggaagcaacggtaatcagtgtacgcgtgtggttcatgatgagccatgcacgcacgcacgcattcatagtcacagtcccacgccgtcggccgcgcgcgcgtgccggcggttgtcggtggcgggtggggaagggaagggaaggcaacgtgactgacgaccaaatcaccgaacgatgagtctttttttttcgcgaacgtaaaaggattacatgtcaatatattagcaccgaaaaatgagtcaccaaccaaacaattggggaggatcgtacggtcattgccgttgttgcctcacacatgtggagggaggggaagtcgcagccaccatcacccggaaacactaatgcgcgatcaatcgctaccgcgatggggtaacgatcaccacccctccccccctccctccctccacgttttcttttttggcaccgcattacttttctattttagtaaatttacacacctaaagtttatacgcctaaagtttatatacccaaaatttataaatcaaaagtttatatatccgattcaaatttaaatttgaattcaaatattttttatagtatttctatacatctaaagtttatacacctaaagttgtagacccaaagtttataaatcaaaagtttatatacccgacttcaaatttgaatcgggtatataaactttaggtctataaattttaggtgtataaactttagatgtatagaaatactatatataaaaaaaaaatttgaattcaaattcaaatttgaatcggatatataaacttttgacttataaatttttggtctctaaactttagatgtgtaaacttgaggtgtataaatttactaaaataggaaagtaatgcggtgccaaaaatgaaaaccaggtggagggagggagggggaggagggggggggctaccgatcgctaccagatcggtagggcgatcgatcgcccattagaactaggaataagtctatttttcctccctcatctattgcccttggtcgaaaaacatccctcaaacgcaaaaccggatataacacctcccccatcttcgaaaaccggtgcaaatcgacttcttgagtggttttgagtggtttaggctgatgtggcaggttgacttgattcaaatgtgctgatgtggcagccaggtcatcaaagggattaaaaatagaagtgggtcccacgtgtaagtgacaaatgctaaaataaaacaaatggtggggcccactcgtcagccccattttttcttatcttcttcctccctcctctctctttctcgcagccgcacgcgcggaggccaattcggccgcgcggcggcgcccttctcatcccagtgagcttctccttcgcgcccagccggccgcagcctcccggcgagctcctccaacacacgcgactagccgtggcctcccggcgagctcctcccccgtgcccggctggccgcggcctgtcacgcccagaaatttagcccaaatttccagactattttgtgtattaaatccctgtccaggaccagccagggtacacaaaacgacaagtaatatacagttccaaacgtaaataaagcgtaaaatacttacaaaagaggcacttagtcctcgcaccgaaacgaaaacagcagcagcggaaaaaggcgatcctagcggggcttcagctccactccacaggcaaaactcaactggggtctgagccttggtcctctaacttcgtcttcagctcagaagcactacacttctgaaaagggggaataatagcaagactgagtacaaccaccgtactcagcaagccacaccaacgatgcagacgtgcaaggggaacacaaggacggtttgtggctatttgcataaaggcggttgtaaaacattttattgagcaaaacagtaaaactgttgagtaattaaagtaacattaaatctccactgatcaacgctacaccacgttgaacaggcccaaccaacccacctaaactacagtgtattaggtcgatttattaagtgtgagactaatcacggtgaatctggtcgaccgcccataaccgcgggcacggctattcgaatagttttactctgatcagaggtgtacaactgtacccacaagacacagccccacgacacgttcccgtgcgccgacatgccaccacgacataccggaaagaggccgtgacaggacccttcgcataaccccctctaaccgatcgcaccacaccttagggttcgcccccgtccccagcaggcaacgggcagcccccctttcgtgccgcggtgaatccggaagccgatcaaccggacaccccggccgacccaactccatcacgcccaccctcgcctgggtacgtcggctagagaaaagctacactacaagcccagccgttgcccacgctggcttgtggtaagtacgataagttcttccagggcatcccgcgaaccggtccttaactgccatgggtgcgaccagcaaaaccatgcacccacagcccaccattcagtcgcattttagttggataattacgaccatgaagcatggccaggtgtctcgagcacgcagctcactctgatactaaaaaggtctaatactgcaattatcccatcaactgagctagtggtaattaagcatggctaagcatatagttctagctaggtcacataagtaacatgagctagtcgattcattacccaaggttgacaaagaacagatatcaagtaaacatggcacaagcgagcagataggtaaaaccctgaccccatgtaattagcaaaacatgcatatttgtttgcaaacagtaaaacatttgtaaattgggatcaacatgctcaaggggaatgtgtgacttgccttgcttcttcacttggatcttctgaactcttatccttgcgaacgcgatcttccgaaacgatgggaactacacgctggcatgcaaaacgaggaaaaactctaataaaaaccaagaaaacagtacataaaaagtaaaccaacatgtagagctcaattttagatgaattttgcaagttgaatggctcaattcgtaattcgaatgaattagatatgaattttagaagttttgggccatttaaatgaatttttagaattaaacacgatttattgcgcaattattaaatattttctcaaaggaaatggcattcgctgacgtcagcaaggggcgccgacgccgacaggtgggcccaacacgtcagcgggtcaaggaggtgcgggcttggaccgggtccaccaaatgagcgggccccacgcgtcagcgggcaaaaggatctagcccaccgtggaccgagtccacggtagaggtgcaaggcggaggggtgggttggctcgccgaccaacccgaccagacggcggcgcgcggccggacggccaccggcggcgacaccggcggcggcgcggcgcggcgcgacggcgacacgcatgcggcggccggcgggcaaagagagaaaaagaaagggaggggaggaggagggagatgctcaccgacgcgggaaggacgacgacgacaacggtgatggcggcgtcggcccgacgagcgagggggcggccggggagcggcgaaaacgagcggaggaggcgaaaagggaggcggcggagctcaccgaggggcatggcggcgaaggaggcggctgatggggctcgagcagagggaggcggcagcactccacggggcgaagacgacggcggtgattcggcggtctccaacgaaggtggaagagcggccggggtaccacgcgatgcagcgaagccgacggtggtagggcgcggcttggcagtggctggagcggcgaggagcggcggccggagctcgtcggtgagtggtggagagagggagcgcggtggggaggtggttccggcgatgaaatgggaaaacggagtggggccgaggtgcggcaaggcacggcgaagccggtggtgcaagcgccgcggcgcggggacgtcgacagtggcggcagcggccggctggagggtcgccggcgatcggcggcgcttgggctcgtgtggggagagcgggagagagcgcggggagtgcgggaaagttggggaaaagggagaggatggccgggggattgtttttataggggaggggaggcgggatcgagcccgggagaggcggagtcggggcggcaaccgccggtggcgtgggcggcatcgtggggtgtgggtggcggttttggaggggagaggtggggggaaacggcgcggacgtgggcggcgaggtcccacggacgagcgcgcgcgcggggtggaggaggtgggcggaaacggccgcgtcgtggggcggctcgggcggccatggcagcaacggcagctgccggcctgaggttggggatgacaggtggggtccacgggttccatctgtcggagagagagggagggagaggccggctggggaggcaaaacagacttgagggagagagagagagccgagcgggccgagggagaaggccggcccgagagggagataggggggaattgggccgaaaggggcccaaagagaggagggaggattttattttttttctttttattttaattgatgcaatgatctttgtgctattaaaactatttctcgagctccgaaaattcacggaaaattccggagagtacattagggcacaaagaatattacaaaatatttccggccaatgatttttaaaggaaaatttcaaattctcccattatttcacttgattaaattgatttaacttttatttaatttctagaaaatgtattattaattgatttttattcccgaacgaaaatcggggcgttgcctcccggcgagctcctcccccgctcccggtcggctgcgacctcccggcgagctcctccctcgtgcccgcccggccacgacctcccggctgcaacgccatcttctccacgagaccatggagccccgttgctcacgtcgcccatcggggacgaagatggccatggagcccgtcggtcccgccgcccagtggctcctgccgctccgccgggctcccgcggtctcgccgcctagcggctcctgccgcccccgccgccccgccgctcccatcgctccgccaggctcccgcggtctcgccgccccgtcgctcctgccgctcccgccgagctcccgccgtcccgtcgctcgcgccatctggtcggatgggaggtggttcattcgttcatggacgtcttccatgtcaccgaccgcctcggttgcaagctcaccaacgacagcgtcatcacctacatcgagcaggttggtgggttttcttggtggtttcttgattctggcacgagtgttcgacggagttgggattttctgatggcatacatggcttctttgcagtctctggggatgtggaacgggccaacgcggccgatggcgctcgaggggttgacggcgctggagctgacaggggccgaccggacggggctcatctcggaggtgttcgtcgtgctcgccgacatggactgtggcgttgtggagggccgcacgtggacgcaccgcgtccacctcggctgcctcatcttcctccgcgacgaggaaaccgacaccgagaggatggcatgaatcgaggccgcctcggacacctcctccgcggcgactccagcagcgccggtggcggcgctgtggccgctgtccccacccccgccgtcacgcacgccgagcgccgcctccacgttggacaaaaccacctccgaaaccaccgagggagatgatttgctctggtttttagagaagaaggaggtgttatacccggtttgttatacccggttttccgattgagggatgttattcacacaagcgcaggagatgagggaggtaaaatggacctattccttagaactacccaccatcaccgccaattccaccgtgcggccgtgcctgatccaccaatcttcgctgcctgacacgcccatcgacggcccaggctgtctgtccgtcacttcacattcggcccagtttctgtcactcccgttcggctaagcccatgcaaaatggcccggcgttacaggggcctagtacgtgctgatgaccaagtaatttgagccaggggtttgcagtattgatgaactcaaaaaagggccttaaattccattactctatccattcaaaatggtataacaaagcacaagaggattaaggtgcaatagggtaggatgtctttgtggtgtctctatacgggtgagtatacgcatgtgtatacgagagtctttgtcgcaaagagaaaagtaaaattattgttgctacttacccttgtcccaaaataaatggatgcgtagcatataaaaaacaatattgtggagaaaaaccaaaatgctcctaattattggaaagttgtattggacctcgttcagatgggatgatatatctgagatatctcctgctatctagtaggtattagctgatatctagatatcacgtgatatctctaaggtatcatttcgtccaaacaagatatcgccctataacacttttattttttttttcctttcgaccgtgattaacgcttcatgtgaggaggccatgtgaggtatgtcgcggaaaggccgtggggagccaagacccaatctctcacggcctgctagctgccaggcccatccaaacacttgtataccccagctagatacctatttagaaaaagaacggaaaggaaaaagtctactttaacttttttaaaagtacgccgaatctaattcgtaccctttaagcagaaaaccgggtaggatgactccctcaactattaaaactggtataatttgactccctcagcgattttggagggcggtttcgttgacgtggcattttgacttggtccaaccggctgactcagcatgtgggacccacatgtcaatgtcacattttcctcttctctatttcttttctcattttcccctctttttctccatggtgttgggcggtggctggcggcgacgtcttctctgcacccgtgtcgctgccactggtggagtacgccgagcgcgccacacgggacggcgtatccgtgaatttcaacgcactgcagctcatcggtgatggcgggagaggaggtaaccttcgtgtcggagtgaggcggcgccgggagggggggcgggggctgttcctgtgtcggccggggtccgagcgggctgagccgctgccgacggtggggagactgttccatgaccgcccctcggcagctgcagggcgtttgggtgtaccgcaccaccgcttcgtctccaagccaacccgccgcagctccccctctaggccaggccaccgccactccgctcaagaccggggcaacgctgcgcgtcaggaggtctagccaccgcttcgcctcgaggccacagcatcgattcgccttgggccatgtcgttgctccgcttccgagccaggttgccgcctgtcatgcccagaaattcacgaaccataatttctaagctgaatgtgcattaaacccctgtccaggaccagccagggtacacaaacgacaattgttgacatacagatccacgtcttacaaaaatataaaagattacagatgcagcggaaaagataaaagcgagataagcctaaagacttgactcctgtagcggggcgattccattccacaagcatccttgacggcagcgacgaaaccaacttcttcgagacatttccaactgagaagaacttcaactctggtgtgggggaaaagagagcaagactgaataccacccactgtactcagcaagtcgtaccggaagaggaggtatgatgcaggatatatccaaaggaggctaaaggtccttttgcataaagctagcatttaaaagcagtagttgaaagcagtaaaacagttgcagtaattaatcaatgttaaccaatcaatgtccaacgctacactacgttgtaacaggcccaaccaaccacctgaactacaccagttcattagctaactaggggtgggactaatcacggtgaatctggtcgaccgcccataaccgcgggcacagctattcgaatagttttactctgatcagaggtgtacaattgtacccacaagacacagccccacgacacgtttccgtgcgccgacatgccactacgacataccggaaagaggccgtgacaggacccttcgcataaccccctctaaccgatcgcaccacacctcagggttcgcccccgttcccagcaggcaacgggcagccccccctcgtgccgcggtgaatccggaagccgatcaaccggacaccccggccgacccaactccatcacgcccaccctcgcctgggtacgtcggctaaaggaaagctacactacaagcccagccgttgcccacgctggcttgtggtaagtacggtaagttcttccagggcatcccgcgaaccggtccttaatcgccatgggcacgactagcaaaaccatgcacccacagcccaccatgtagtgtattttaattaaccaacaccattgcggtggcactaatccaaagctatgccaataatcaaagtctatgctttaatgtaatcccccttttgtgtactagttgaactaagcatggctaagcatttcctaaaccaacatctagtcattttaatacccaagttatcaatggcataaggtaaacaatatatggctgagtaatagggcccatcccacatgatattgtaaaatagtgcaacatttaatagaaatgcgggacatttgtaaattgggtataatatgatcaattgtaatgcatgacttgccttgctcttgcactgatgagaccacaacaacgtcttcgaggaatcgcggatcgacgaaacggccgaaatctatgcgacaaacaaagcacacaagcaaaacatgctataagtccactgaaacaggaaacaaaaccatttttaatggattctatgcatttttatgaatttactgagacttgaatggacttaatcggagctcggataaattagatatgaattttagaagattatctgtgtttttactaataaagaaaaagccttaatgtatttattgcgcaatatgtcccagggctgacgtcacccaagggagggggtggtgccgacatgcgggccccacgggccagcggcacaaagagagggagagggggtggttggctggcgggccccactggcagtggcacaaggcgggagggcgcgtggctggtggctcggctcggctttaaagcctgccggccaagcgtggcgagcggcggcggcacgcgcggtcaccggctacggcaaccggcggcaaccgatggcaagcggcggcgcgcgacggcaccaccgctagcggcggcaccgcagcggcacggcaccacgacgcgacggcggcgcgcaagcggtgagcggcggtgagagaggagaggaaggggagggcctcaccgacgatgaacgaggggggcgagcaacggacctagggaacatgatgagagaggttagagggagagagggagtccagggcgcatggcatagccggccggaggcgatggtaatggagatgctcaccggcgcttggggagaagcgggctccggcggtggacttcgacggaggagggatggactaggtagcccttgacctcatgaggccaacggcggcaatggagtggcgcggcgacggcactagcgacggctagcggcggttggagacagcggtaggcggcggcgcgtgggagcggcagtatggcagcaacacgtggcaagtgagcagtggctgagatagcccccgtagcggcgaagctagcggcggcgagcgcacgccggcgcttggggagaagcgggctccggcggcggacttcgacagaggagggatggactaggtagcccttgacctcacgaggccaacggcggcaatggagtggcgcggcgacggcactagcgacggctagcggcggttggagatagcggtaggcggcggcgcgtgggagcggcagtatggcagcagcacgtggcaagcgagcagtggctgagatagcccccgcagcggcgaagctagcggcggcgagcgcacggcgtggtgatggctttagcaacggcggcgtgcgaccggagctcggcggcgagtggcggcactagcagcgaacggcgcggcggcgttagagagcgtgggagagcgcggcgaaaaggggaaatgggagaggaggacgtgtggttgctttttatatgcgcggggagggcggacacggctgggaggtggccggatttctcgccgacgtcggggatggagagagagagtggggggattcgaattaaatcccgcccttgcaggcgcacgcgcgtgggcgggagaaggcggggcgtgggggcggcgacgtgggggcgtggagcgcggagtgggcgcgggaggagcgggggaagcggtggcgtggggaggtgggggcgccggcagttggagctcggctccaatcggctggaggtaggggaagggctgacaggcgggccccacctgtcagtgcctgagagggagagggaggccgggtgaacttcaggagagggagggaggagcgggccggcgcgggaagaaatgggccggcggcccaagaaggaaaaaggagggaaaaagaaaacagaaaagggaaaaaggattttctcagggattaaatattgcactttgcttattttaattggttaaaattatttccaaggctttgaaattttcactaaaaatcctgttagcatattttgacatgtagaatccaagaaaaaatccacatgccgattccgattattatttacatttattaatttgatgaattagctctaggttaaattaaatcatttcttcggacgatttattttatgaattttaaagcaaggaggggaacttcagggcgtgacaccgccgctctgtttgatggcgggcctgctcctcgtccctgctcatctgcagctgtacctaggtggtccaagctagagggagtcggtggcatgccaccaccgccgctgccttctcatcgtcgtcatcctcgcctcgagcctcggcttcgggtcatcggcgcgcttgctgctgccgctgttgtggtcgtcgccgccgccaccacctacgagggagatcggcatcgcatcgcggatgagtggtgaaagcctgaaaatgggagatgggattcgagaggcgaggcgcacaccgggagggttcttctgcttcctagtctctgcctccatcaccgtctcccgcaatgacgatcctgtgatgtccgtcccatgtggcggtgctcggcgtactccaccagtggcagtggcacgggaggtcgggcgcagaaaagacgtcgctgccaggcgctagccaccgtgcaacgccctgaagaaagagaggggaaaacgagaaaagaaagagagaagaggaaaatgtgacattgacatgtggggtccatatgctgagtcagccggttggaccgggtcaaagcgccacgtcaacaaaaccgtccttcaaaaccactgagggagtcaaattataatggttttaatagttgagggagtcatcctaccctgttttctaattaaagggtactccctccatttcacaatgtaaatcattctaccatttcccatattcgtattgatgttaataaatctatataaatacacatgtctagattcattaacatcaatataaatgtgggaaatactagaatgacttacattgtgaaacagatgaagtacgaattagattcggcatactttaagggagttaaagtggacttttcctttccgctttctccgatggaggatctatcgcgacgcgaattcttcgcccatctcttcgtgccacacgtcgaaaaattgaaggaccaacgtttgaaccaatcagcaggcgctagaagcccgaattaaatttgaaaatatactttgattcgtttatttctcaaaaatattcggaatgcaaatttattagcagaaatataccgtcgatctcacacaattatttcacgaaagtgacgtgggagtgatgttgtgaacagtctcgcgtgaggagagcgcgagaccgcacggtatcgcatgatcatagcacgagaccgctcggtctcgcacgacgaaatcgaggacgtacacggcggcggcgtcagaccacgcggtctcgcgcggccaaaccgcgagaccgagcagtctcgctcagcgatagcgactgcctctgccgattgaataaggttaattagtgattaattaatcgctaattggaataattaatcactaattattgttaattaatcattaattatggtaattaatgactaattaagcagctccgttggacatgacattcggtctcgctgatttcttatgcgagactgttcggtctcgctgcttcatcacgcgataccgtgcggtctcgtgctcctactgtgtgacactggtatattttcgctaaaaagtatacatcacgaatatttctgcgaaaaaaccaaatcaatagtatatttttaaatttaattcctagaagccccaactttagatttttagatttatgcacacgatgcacgagtgcaattactatattacgttcaatcgagaataagcgaaactgtagcaccagatatgattctgttataccttcatggatagtacgtgcttaggctgaatgcttgtgttgagagctcactactagtttcaaattatctatagtcaatgtaatagccaattcatacgatagttgcttactatactattaatatatggtccacatatcatacacccattgcgtcttggagtccgtgctacagctggctacagatctgtagcccgctacttttctatatcttcttttatctctttaaaatatgtttatagctggcttatagcctgctattgtacatgctctgattggtatatagacacatgatgctcccatgcttgtgcagttgtgtaagcagtcgatcgagcaaagcgtacgtgtaagcagccatggctcaattgggtcaactcgacgccgagagcaacgtcgtcgtcgcccctaccgctaccggagacgagggagccgacatcgtcctcgcgtcgcttccgactagggaaggatggtggacggcgttcgtcctctaccacggctgctggatgacgccgcaggccgcgacgagcgtgtcgctggtgcgcgcccagttcgcgccgcgccccgacgacgtgctcctcgccacctacccaaagtgcggcaccacctggctcaaggcgctctccttcgacatcgccaaccgctcccgccaccccgtcgccggcgccggcgaccacccgctgctcacgacccacccgcaggacctcgtgccgttcatcgagacgccattccgccacctccaccctctctctgccctcgacgcgctcccgtcaccgaggcttctctccacccacctgccgcaccagctcctccccccgcgtgtcgccgagctcggctgccgcatcgtctacctctgccgggagcccaaggacgtcgtcgtctccacatggcacttcatgaacaaggtaggcaatggcttcttcctcgacctcgacgaggccttcgagctgttcgtcgatggctgttccctctacgggccgatctgggatcactgcctacacggtgctcttcctcaagtacgacgacatgatggccgacccggccggccacgtcaagaaactcgccgagttcctccgcgtcccgttcactgacgaggaggtcggcaccggcgtcgtcgtggaggttgtgaggctgtgcagcttcgagaagctgagccgcctgccggtgaacttctccggggtggttgatcggatcggcggacgaccgatggagaactcgtcgttttttaggaaggcgaaggttggagactggaagaacaacttgactcaagagatggcgcagaagcttgatgccgttattgcggagaagctgaaaggatctggtctcaccttctgagtatggggattcgtgcttgctttttatgcatgcattgctcctgtaaaagtagaacagtaatcttcagctgtaactgagttgtgtccaattatgtacgtgcacgctcgtacaggagttggaaaccatgtactgtgtattgatttcctcgtggacacattttatcccttcctccccatttattcctttctcttttgtattcctattcctcctcgcattcttggcaacggtggcgggcactcccgcccatccacgggaaaacggcagcggcctcgtgacaatgaaggagaagaggatggaaccaacgagtttgatgagttcgccagcccgtccgcgggaatgaaaaccgcttggagaaaaatatgacctgctcggaagttctatatgcaggtgataggaatcggatggatgagattgccatgcattcttttgatcacaccatgattgatgcacaaatccatatgaacaattcaaggcagaggggaaatagggagcaaattaacatcgatcactatattcattgatggtacgttgaaacgtaccgatactttgctaacatatactccatatgttccataatataaaggattttaaagagatatgacacattgtaatagggagtagctatatttatggcgccatattttaacaaaaaaatagtcagtatgtatttacattgtaagtttataaattacatatgtaattttagtgtatttacaatgtaagtctcaaaattacatatgtaattttagtgtatttacaatataagtctcaaaattatatatgtaagtcccaaaattacataagtaaattaagaaattacatatatgtaactagtatataatcatcactcatcattatgtatgtgtggaaataatcttcttctgcctcacggaagcacagttgggaggcctcaggcctgtgctgttgtgtggcataggcatgcatgcaaaccgactgtaatcaatggaattttacggtgccataaatttagcaaatctgttgtaatattataaatctagacagtggtatcatatctctttaaaatctcttatattttaggacaaagtgagtgctttaaaaaaacagagggagctagctaccctatataaaatattcatgcacacgatgcacgagtgcaattacttattacattcaatcgagaataaccgaaattgtaccaccatgatatgattcttaattttatagcttcatcgatacgtgttttaggctggatatgcttgtgttgattggtaaagacacaggataatatatatatatatatatatatatatatatatatatatatatatatgcttcctgcttcatgcttgtgcagttgtgttatttgttgctccaaaccactaagctcactcgtgtcagccgagcaaaacttaagcagccatggctgaaggtcgtcagctcgaagcccagagcgtcgtcgtccctacagccaccggagacaagggagacgacatcctctcgtcgcttccgacgagggaaggatggtggacgacgttcgtcctctacgacggctgctggatggaccggcaggcagcgatgagcgtgtcgctggttcgtgcccagttcgtgccacgcgacgacgacgtgctcctcgccacctacccaaagtgcggcaccacctggctcaaggcgctctccttcgccatcgccaaccgccaccgccaccccgtcgtcagtgccggccaccaccccttgctcacccaaagcccgcatgacctcgtgccgttcatcgagctgcccttccgccatatccacccgctcgcggcggccctcgatgcgatcccctccccgaggctgctgggcacccatatgccgcaccatctgcttcccccgcgcatcggttgccgcatcgtctacctgtgtcgagagcccaaggacgtcgtcatctccacgtggcacttcatgaacaaggtaatagaaggattctccattgatttcgacaaggccttcgagctgtttgtcgatgggtgctcccccttcgggccgatctggaaccactacctaggttactggaacaagcacgtcgaggagcccgacagagttctcttcctcaagtacgacgacatgatggccgacccggccggccacgtcaagaagctcgccgagttcctccgcgtcccgttcaccgacgatgaggtcgacgccggcgtcgtcgaggaggtggtgaggctgtgcagcttcgagaagctgagccgcctaccggtgaactcctctgtggtggctggtcgggtcggcgtcgacgagcggccaatgaagaactcggtgttttttaggaagggtaaagtgcgggactggaagaactacttgaccgaagagatggccaagaaattagatgccgctatcgaggagaagctgaaaggatctggtctcaccttatgattagcttaatctaatatcgttatgttgtttcttttaatgtatgctctcggtgtgtcttgtgtacaagtacaataatcttcacaatgccttgtaattatgctatgtccaattgtatgcaccattgtacaagagttggaaatattatattcctgcaataaaatgtgatctttctttgtgttctttttgtaggaaacctcaaaaaagggcatgagctctcacaatttcactatgtaagaagagagttgatccagtttatgaggaaaaccggatctaaaactcttacaacaacacggttttataaggaaaactggcgaaaactctgacattgtcatagtaagctatccacatggaccaaacaaactaagcttaagaccaactatctaacaagggaaattcctaagatgaagcttcaaaatgaaccaagtccataggacaacaacaacgtccgatccataaagaatctaaggttctcacgcggagagagacccctaagctagaggaaggccctatagcaacgcttccaagaaagtgaacggttcccaagagcatcatagtcgctagctctggcaagccgagcaaggctttcgccccaggattacatccaaccaccaaaaccacgaggaaagctacacaatatcgtctgcacacctaaaaccaccttcacagccaatgtccttgcctcgaagtccaaacaccgcaaagccatagctagccaccacaccacagaacaatgctcctcacgattggaaggggaggagccttatgcacaagcggtctgggcacaagcggcaacgcttggcccgacaccaagcaccgaccggccagccatgctgccacctgtacctgcaccgcatggaggacgaccgggcatagttggaaatatcggcagagagatgacaacaccgccagacagccacgctcccgagcgaccattttgttgccaccgcctcaagggatctaggcctcttgcgtcggatcctcgctgggggaacaccagatctggacgttggggtgctagattcagctgcccccctcgccgctgcctgccggtccgctgccaaacgcactgtcgagctcttgctctccttcacctaccccgccgctagcaagtctcgccactggaaccggtcgggatgtctggatctggccggtgcagcgctccccccgctgcatcgatgcccctcacgctgtcacgtcatttagggagaaagagaaccccaccaccgccgtccttgcagcctgccggtaagccaacctgtttaggcggcggcgaggtgggcgtgaggagggaggggagcggtggctggtggatgggcgcagttcgcgtcgcccctaggactggagcgacccggacgggagactggactagcgagctaggacgacggcgcttggtgtggtgcgttctttcgccatctggacggccggtggtggctggagataggaggcagcgtcccggaacaaatgtcagccactatctgccagacctttcagggctctaactccagcttaccgtgcagtagaatgaacgtcagttcttggtccttcttcatacttccaagctgcataaacgtcacaaatagaacagcacacttgttattttcgtactacagtcacagttttgtgttagtgcaacaactatgtcagccaattgagctgacaaatgaagcatacaaaatagtgtgtaagctcattaaagaggggatattttctgttaaatacttttacagagctgagccatcaagttgcaaaacaatgggttccaattcaaaagggatctggaaatataaaatttcagcagggatcaaagttctcatttggttacttatgaaaagtagcatcttgacaaaagataacctcttgagaagaagatggaaaaagcaaagaacaaaaaagtgctagcttttgttccgcggatgaaactgttatacacatgtttgtgaaatgccaacttgctaatttcttatggaatggcatgtatagatggccgaataggtcgcccggtctgggccgaggttagtcgggctggcacaacatgccgggatgcgtcgtgctagcccacgggctgcacacatggcccaataagactcgggtcgtgccgggtcggcccgaagacatggcagccgattgtgcttctccatagaataagtatattttttctccatcaactctttgggctgtgtcttatatagctgaaaataagtccattttatatccctcatctctttgggcctttgccttatatgattcattaagtctattttggatccctcaactattttcttctattgtgccggaccggaccggcccaccgtgccaaagcattggcccaggcacgacacaactgtcaggccggaccgtgccgtgcttgagccgggccatcgggtgggccttatggccatcaataatggcatgtactttaatttgaagaaaatgaggtcggctggtgacggcagcttcaacagcggcgagctgagaacgcccatgggtggctgacttggctggttctcgtggccgattggagttgatggaaggggtagaaagaaatcgtggcggagtggcaaggtttgaattttacaaaatttcagtagcacacacccgatattgttaatagcaatgacattttttaaaaaaatcggtaaatttgtaatggcatggatctaattaactatatttttatgccgaattttagttatttctaaattatatttctacttgaactcttttttatctttttgtccgatgaatgtgagaaaattaatctaacctccatagtaaacatggtgcctcatttcaagagggaatgcggtgcctaattgcaaggttgttttaatataatagatagatgaataatatccatcatatctttggttgatggttacatagcttcaataagaatgatacgaaattggtggtgattgggatagctctgctatcactagaagagataccatcatctcaatcgggcggtaaaccccatctcaatcgggcacggcgtccgtcacaggctagaagtcacagatgtgaagagttatttcaatcgggcaaacggccgtcacggataaatctatctcaatcgggccctaattaaagggcgtcaccgatagctttgacccagacgaccagtcaaactatagcccgtcacggatgaacaactacgcccgtcacagatgacccttatctttacccacgcggggatgaatctatctcaatcgggccctaattaaagggcgtcaccgatagctttgacccagacgaccagtcaaactatagctcgtcacggatgaacaactacgcccgtcacagatgacccttatctttacccacgtggggatgaatctatctcaatcgggccctaattaaagggcgtcaccgatagctttgacccagacgaccagtcaaactatagcccgtcacggatgaacaactacgcccgtcacagatggcccttatctttacccacgcgggaagttcaaacttcccggtcggtcacccactatagcccgtcacggatgaacaactacgcccgtcacagatgatccttatctttaggtcaagcacgcttaacattaaagttctttagagattagcttccagaaaagtagttataacttgttggtataagtattctattaatcctattaagccctaggccaggatgtcaaattggggttattaaatgatttcaaatggaaaagtcaccaaaaccaaagttgtagaactcatcgaggtgcaaaatttttattttggtcatttctccatctgacgctatttaaacaatttgaaatttgaaattcaaagtttgaaaagttcaaatagaattttagatcagtgaacgacttcaactgaaaaagtcatcaacaacaaagttgtataactcatcaagatctataatttttattttggtcatttttctatataacattttttgaaccgtttgaatttgaatttgaaaatatgacaacttcaaacaacattttcaaatactaaatgatatcaactgaaaaagtcatcaacaacaaagttgaataactcatcaagatctaaaacttttattttggtcatttcttcatacgacaaagtgatagtaacattgttcacaaaattgatatatctcttatctggttttataaactacaacattgttcacaaagaacgaggaacgacgctgaccccagatcgtttcgtcggtgttatcgacatcggttcttccgaaccgtcagtcctgcatctactcgaggactacgactcctcgtcaacaagtacgccacgtgaggtattggctatcgacgggacaggcacatcggcacgcgctaataccggggcggaaaatcagacgtctacaccggctcagcacatcaggaccctcaacgcaatactgagggagaccccttatgaccccgttctacacgatgacctcgcacaatggacggaacggttacgggagtcagtgaccaacctcagcaacgagttcgaacaggccgccgctgcaacccacccggaacagcaaccaactactggtgccaatggcgaaaaccccgaacagcgggaatcaccccatcgagccagccctccacctcgcggcaccagcgatctccgcgatcacctaaacggtcgccgagaagctcgtcgcacatgggaaaacgagaaccgttcccggcatcacgtttcttcacgacatcacgacaatgaagaacgaggaggccgctcgaacgaagaccaagaccgtgatcaccgccacaaccgtcatattcgcgacgatcgtgagcgacggacgccgggcgataccagtcgaggacgccgccatcatgacgaagacgacagagaacggcgccgggacaacaacggagggcgacgacaggattctcgagaacccagccggcattctcgtaatcctacaccggaaccaagcgacccatcgtcgtccttatcttcttcctcctcctcatcgtcagacagacatccacgaaggacatacgatcgccgacaacccaccgcccctagtgctgggtgtagggctttcggtcgttcgttgcgcgatgtccgatggcctgagaggttccgaccgggggcaatagaaaagtacgatgggagcactgacccagaagaatttcttcaagtctactccatagtactctatgctgccagagcggacgacaacgcgttggcgaattatttgccaactgcgttaaaaggctctgcgcgttcatggttgatgcaccttccgccctacttgatttcttcgtgggcagacctatggcagctgttcgtcgccaacttccagggaacctacaaacgccacgcgatcgaagacgacttacacgcattggcacagagctcgggtgaatccttgagggaatatgttcggcgctttaatgagtgcagaaatacaatccccgaaatcaccgatgcttctgtaattcgcgccttcaagtccggtgttagagatcgctacactacccaggagttagcaacgagacgcatcacaactattggagactgttcgagattgttgactgacgtgcccacgttgacgatgcacttagacgcaagaacgacaagccgaagaccgagggcgagaagaaatcagccacggacacacctgagtcaagcaaaaagaaaaatcgcaagaacgcgaaaaggaaagctcaagcagaagtactcgcagcagaatatgctaaccctcccaagcgcccaaacccacaaggtagtgacgcaaggaaagcatggttcccatacacaagtcgaacagacattctttggaagactgccttgtttccaaaaaatcgctcgagaagcacatgacatcggaacaaggcaaacgagtacgcgtggtcgagaaggatacggagatgaccgctcaggagtcggacccagcgtatccagactctaacctccacgtctcacacattttcggaggctctacagcgtactcctccaagcgagagtataagaaagtggagcgagaagtctgctcgacgtggcagggggctgcacccaagatgaagtggtctgaacagaagatacaattttcggaagatgaccatcccaagaccgccgttatcccaggacgctatccgatcgtggtcgaacccactattcggaacatcaaggtcgcgcgggttctcatcgacggtggcagctcaatcaatctcctcttcgccagcacattggacgccatgggaataccacgaagcgagttgacagccaccgatcaacccttccatggaattactccccagtcttcgtccaaaccaatgggaaaaatcacgctgcctgtgactttcggccaagcaaacaacttccggacagagtagttcaactttgatgtcgctgaattcgatacagcgtatagcaccatcatcgggagaactgcacttgcgaagttcatggccgcatctcactacgcgtattaagtgctcaagatgccagggccgaagggaacaatcaccatccaagggaacgcaaagctggcggtacaatgtgacaagcggagcctcgacatggtcgagcaaacgccaagtacacccgccacaaccgagccacccaagaaaatgagcaagacaaacaagacgctgaaaccggacggcgcaatcaagactgttcctctctctagtgccaaccccgacaagaccatcaagatcggggcatcactaaacgagaaataggaactcacgctcatcaccttcctccgcgacaatgctgacgtgttcgcttggcagccgtctgacatgccgggcgtccccagggaggtgatcgagcacaaactcatggtgcgacccgatgccaagccagtaaagcaaagactgcggagatttgcaccagaccgaagacaagccatacgagaagagctcgacaaacttctcaaagctggctttatcagagaagtacttcatccagagtggctagccaacccagtcatggtgcggaaggccaacgggaaatggagaatgtgtgtcgacttcaccgacctcaacaaggcgtgccccaaggatcacttccctcttccttgaatagaccaactggtggactcaacagccggctgtgagatgctgagcttcctcgacgcttactccggctaccaccaaatcagcatggcgagagaggacgaagagaagacatcattcatcacgccgttcggggtatttttctacgttaagatgccatttggactcataaccgctgggaacactttccagcgcacggtccagggcgcacttagtgaccagctcggcaacaacgtcgaggcatatgtcgacgacattgttgtcaagaccaagaaaagcgactcattgattgacgatctacgggaaacgttcgacaacctccgacgatatcacctcatgctcaatccagagaagtgcacctgcggagtaccgtcgggcaagctactcggcttcctcatctctggcagaggaatagaagcgaatcccgagaagatcaaggcaatcgagaacatgaagtcgcccacaagactcaaggaagtacaaaagctaatcagatgcacggcagcactaagcagattcgtcgctaggatgggagaacgaggacaacccttcttcgctttgctgaagaagcaagataaatttgtatggacacaggaagccgaagaggcatttattgcactcaagcgctacctatcagatccccctgtactcgttgctccccaacctaatgaagaattattcatttatattgccgccacgccatactccgtcaacactgtaattgtcgtcgagagagagaatgtccaatgaccagtatattatgccagcgaagctctccacgacgcaaaaccagatatccacagatccaaaaactgctctacgcagtaatcatgacatcaagaaagctacgacactacttccaagcccacagagtcacagttgtctcctccttccccctcggtgaagtcgtgagaaacaaagacgttgtcggccgcattgcgaaatgggtagtcgagctaagtcagtttgatgtccactttgtaccacgaacagccatctagtaggaaatcgtccatctatgacgttttgctcatgacgttgtataatttcgtcattgaatacaacatatctatgacgaaatttcatgtttcgtcatggatcactcatggcggagggtagacatcgaaactccatgacgaaatttaaaatggtgtcataaaacaatagataatttcgtcacaaaatggtgcgcaccattcatgtaacacacttatgacgctcctttattaatacaatatgctgaaatatatttcgtcagttgtaagtaaatctctattctgctgttgttggtcccaccttgcatatgtggctatctaggttgtcactggaccccacattgtatacgtggctatccagattgttattggaccccacattgtatatgcagcacaggtgcgttttcgggccagcagatgctttgtgcagtccacgtgaatttgtgcagcccatgtgtcaatctgtgcagcccatgtgaacttttttttcgcagcccaaatttgtgcagtccttggaccccacattgtatatgcagcacaggtgcgttttcgggccagcagatgctttgtgcagtccacgtgaatttgtgcagcccatgtgtcaatctgtgcagcccatgtgaacttttttttcgcagcccaaatttgtgcagtccgtgaatttgtgcagcccatgtgtgaatctgtgcagcccatgtgaactcttttttctaaaaaaaatgctgcagcacttgggggtcgaacccacgacttgtgactaaccataattctagcttaaccactacgctgcaaggagctttcatgctgatgatgttttacttttagttttcctttcaattctcgaacacaagaatgattgaatgctttatgcgggcgacctagtggtttggtcaaggagggaggggggcggtggcgcagggtttggtcatagccagggagggagggtggcggcggcgcaggcggagctcagtggggacggatcctagccaccgggacggtgcagaggaggaggtttcttatcccaccggtgcagggaagggcggctccacaggctggccggcatcgtgatgtggagcatcgtggtgggtggcggcgcggtgaagtgatcttggtcggtggggctgcagagggatcccggtcggcgcgggggatcctcgacgactgagacggatcggctgctcctcgcccaccgtcttatcctagcacctcctctctcaatcctgtcgtcagcgcgcacagcccatcaccaacgccgttcagtagatataaggtatgattttccataagtacattactctgagtatgaaatgcaagttcagctatgaaagattatgctttgtgttgtatgaatagagaaacaagtcagagtgttatgaacaaatcaacatggtttaagtcatgtagcaaccagctgttccatctaatgttttagaaaatattctgtcctaaaaaatggattagctttgtttgcctaattgctttttttaacatgccaaagcagatggacagaacttggatacatgggagacaattcacacctgcatacatggagggagtgaaacagttcatggaatttgttggacaaagatttgatgaacacgttgacataccatgcccatgctgtaggtgtcttaaccacacttcactgcctcagcaagaaatgcatgaccatatacatatttttgggatgtcatcaacatacacccggtggatttatcatggagaattagttgatacagaagatgtcgaatatttggaacaggtacatgaaactaaccataatgaagggacagatgtgggcgggtatgaacccgaggatgacaatggagttccagagttaataggtgaactatacactgcggcagaggaagatggacagccaccaaggtttgctagaattcttgaagatgcgaagcaggcactttgcccaggatctaaccattcaagattttcctttcttgtgaggctgctccatatcaagtcatattatcgaatcagcaatacagctttcactgaattattgaagttgttgtcctcggcattccctcaatgtcaattaccaaaatcttatgatgaggcaaagaaatatcttcgtgaattgggccttggatatgtgtcgatccatgtgtgcaagaataattgtgtgctatttcggaaggaatatgccaatatggatctatgcccaatatgtggtgaatccagatgggaagatggggttggcgacaggaaggttcctcgcaaagttttgaggcattttccacttatcccaaggttaaagaggatatttgcatcaaaacgaacagctgaagacacacagtggcacaaaatcaagcggaagccagtggataatgaaatgagccatgcagcagatggggaggcttggaaggacttcgacagaaagtatcgaactttcgcagaagatgcaaggaatatgaggcttgccatagctacagatggattcaatccatttggcaaggtgagcaattcgtatagcatgtggcctgtccttgttatgcctttgaatctaccaccatgggaatctgttgatccatcgaactgcattatgtcattactgatcccaggtccaacatctccaggaaaggattttgatttattcttggagcctctgatagaagaattgcttgaattatggataggtgttagtacttatgatgcattcagtgctagaaagttcaatcttcgtgccgccgtgctatggtgcatacatgattatccagctctaagcaccttgtcagggcgaactacaaaaggttattatgcatgcattcattgtgacaaaaatccgttgtcacgagcaccaagaaataagataggctacttggccaccgtcgtttccttccaaggacacacgcttggcgaagaagccatgcttttgatggacaccatgaaaaccaggttgagccaggaaaattcagcacagatgaggtcctcgagcagttagagaaggtgaaagatgttagaccgggtaagcatgatacaagtaagaaaagaaaacgtggagaggatgaagggccactaatttatagccgcaaagtaagtctgtggaagctcccatattggaaagatttgttgctgccacataatcttgatgtgatgcacattgagaaaaacatatgtgacaacattttgggcacattgctcaaaatcgagggcaagacaaaggacacagtcaattcgaggatagatttgcatgatatgaacataagacataacttgcacttacagcaggatggcaactcagttcgcatcccacaagctcgctatgtcttgaagaaggaacaaagaattgagttttgtaacttcctcaaaggtgtcaagtatccacatggatatgcagccaacctagcaagatgcataagttcagatggttccaaggtgcaggggctcaaaactcatgactgccatgtccttctccaaagaatcatacctgccggcataagaggatttgtggacaaggatatatacgaagcaattgcagagcttggtaacttcttcagggaattgtgtagtagaaatctaaggatagatgtcctcaaacgactgaaaaaagacatcccgctgatcctatgcaaacttgagaaaatttttcctccagccttctttgacgtgatggtgcacttggccgtacatctacctgatgaggcactacttagaggtcctgtacaatatggatggatgtacccaatagaaagacgacttggcacctttaagaattccatgcggaacagggctaggcctgaaggatcaattgctgagacctatgtagcaagtgacaccttgacattttgttcaaggtacatggaggatgttgacactagatttaatcgggacgcccgtcatggggatgggccattggatggtaacagctctgtttttatgcatggtgttaaactcataggatccactaggatacagtacatggaggatgaaatcatggataagctagtttggtatgtgctaaataactgtgaggaggttcaaccatatttggagtaagcaccatttatgtaggtttatttcacatgtattgtattaaatataatattttcctaattg

SEQ ID NO: 22651 - DNA, 26578 bp, Oryza sativa
tatatatatatatatatatatcagatctggaagctgaggaaagaaaatccaggggtggtcagtgaagcactatttgcattgtcatgtggtcctgatctccgagtaaagagttgtgcatcttgcattgtcaacggagtccggtatagcactgttgaccgtgagaaatacctccaaacgcagaatagtggtgtaatggttgatggtacacatgaaggggataacattgaattttatggtgtccttagggagattcttgagttgcagtataactctgatctagatatctatcgatcggtggttcttttccgttgtgattggttcaatcaagttggcaagacaaaaggagttagggatgacgggcatttcaaatccatcaacatccaatcattttggtacaaggatgaccctttcattttagcaactcaatcgaagaagatattttacttgcaggacacctctttgggcaacgaatggcgaattgtgcagaaattcgaacataggaacatgtataatgtgtctgaaaaagatgaccacatttttgatgtacaccaaaatgataattgttctgatacagaacatgaagtgcatgaaggtaatgctgatgaggatctagaccatttgcaggaagatggagaagttactattattgaagctaatttagaagaccttaacaaccaagctaacttgactgaagacagtagggatgatgcagatgaagatgacacaatattgcagtactgtagtgacagtggcaatgggaacgctgaagatgacatgccggaagacaccgatgatgattaaattatatcttgagttgtgtcatctatctgatatgtcatatgtaattgggatgagctataaactcatttattttgtgttatgtaactgagatgtcacaactgatttattctgtgaactcatttgccattgcagatctgaaacacatcgagattctgagctagcaattttaagaacagagttgttaccagcaatgatttgcatttatttgatttctttcccaggttcatggtgctaactcatattcctaacaatatgtgaagcagttgggtcaaaaatttcaggagaagagaaaatattttacttctgttttttgggcaatccagtaagtttcctggtgaaacagtatgcaaagtgatgtacatatatatttgttccaagtgacatactgcatatcagtctaaaactgtacagaccatgacatttcaagcagcaaaaaccaatttcaatctgtacaaacacaacttacacttcaagcatctgttcaaagcattacacttttttcttaattgtcatattcaattgacataaaaaaatgacacaaatatggtcttcacattttcaaaataacacaataatcagccataagtttattcacattcacgatctcaacctgaattcaccaagctgtacaaagaagtatcatttcttctcaagctactgttgtcgcccacatccaggaagcaagcagcataagcaccagaagcttgctactcgatcatggccagcaccaggtcctcttcaccagcagcgctaagagcatcggccttggagatgcggcacctggaccagctgctactgcggcgatgcggtcggagtcagagacgggatgcggtcgcacgtgtggtgacgcggcggccgcgctccatcggcagcagatggcgcggaggcggaagaatgtgtccggcgggaggcgtgccaggacgcgctccagcacgccgtcgtggaggtccccagcccacgcgtcggcgggctcctgcgcttcctgctaattctcaccgccatggaggaggaagctctttttttttgttacgatttggtttggtttggatctgaatccgttgttatatgtgtgttgatttacgattgtaccctcgttatatgtgagttctaccgataagaatgaggggtaagtcggtccaaaccacccggtccgttctattaaaactggccggtccaacatttttcctacaaacaccgaccggttcacccagtttaaagtgaacataaaatttttaaaattcaattttcaattggacctatatactccctccgtcccataaaaaaccaacttctgactataaatctggacgcaacatgtgtccaggttcatagccagaagttgatttttttatgggacggagggagtatccatgaatggtaaactgagacgattttatcacctgcctggctcaaatcctccgtcgccgatcatcctccagcttggctttagatccaccggcaacgccaccgaggctggaaccaggttcttgcattccacggtgtcgatggtgaatggcgaggtgagcaaccacgaggatgacatggaggtctcgatgacatgggagacgacgaccgcgcccctgtggtagacgtccacagcagattttgactatagaagagccgacaccaatactataggtgttggttttcttttttttaaaaaaaaaccaacacctttaatttgtcataggtgccaattaattaaaaaaagacgcctataatatattataggtgctagtttctaaaaataaattcagtcatgcttaaagtagtgttgtggaaaaccgtattccgtctgacaaccgtattccgattaatcggtgaatgcttcttaaactactaaattgtctgtgttttccaaaaagtttttataggaaagttgctttaaaaaaataatattagggggtgtttagttcccacattttttttccaaaaatgtcacatcgaatgtttagatacatgcattgagtgctaaatgtagacaaaataaccaattacacagtttgcgtgtaaattgtgagaccaatattttgagcctaattgcgccatgatttgactaagtggtgctgcagtaaacatttgctaatgacggatgttttaggcttaataaatttgtgtcgtagtttacgggcataatctataattagttttgttattagtttacgtttaatactttaaatgtgtgtccgtatactttaaaaactttacaccctggaactaaacacccccttaatccaaattttcaagttatataatattgaacggagggagtatatttttaaagtcaaattgttaatccagatagattagtataatttgaatgtttttgatttatggataatgttaattactcatggatggaggatttttcgttcggcgcctaaacctaccgccaatgacagccccaaaacattccattgccgcccatttgcccaaatcagaatgggaaatgtcacttttatcctccatctaacgaagagcaaaacaacacccaggggcatttgtgcaaccactatatatttacaaagcctctcacccaccaaaccctaatccccaaatccagccgccacaccatcggggcgccgctctaccagagccgccgccgactaccgccgcaccggagccttcccccgcaaccccgtcgacgacgaccgctgcgccggagccttcccgtgcaaaccgatcgacgacgaccgctgcaccagatccgtcccctacttcctcgtcgtcgacagccgccgcaacgacgccttccgctgcaaccccgtcgacgacgaccgctgcaccagatccttcccccactacgccgtcgacgacttccactgcatcggagccggtaccccgtcgacgactactgccgcaccgaagccatctcccacaacaccgttgacgcctaccgccgcaccggagccgggtaccccatcgacaaggtccctgcaccgtcgccgtacctagctgatgggaagacgtcgacgtccagtagcacgaggtacgcaaaattatcttgtcgtctcaagctcagatgtttatgtgtactgtctcaagctattagatgttatacatcatgtggattgatttgccgtccaacttctattaagaattttctgtgtgcaatccgattgaggtcactatctacaataacagttgatgctattgctagtttgctactgcatatggcattgtttctgtgttattcaggcgcacctttaaattaatcatgctatgttgattctcaaataaatttgtgcctcaagttgccataagcatcttccagagtgtggatttcagatcaacaatggaaattttatttagattctgctttgtttgtgtttatgaatgtaccaataatttgagttagtcgtataaatagatacagtttattaggtgaaagagaatgatataatggctatatcatttatatgaccaatgttgttcactgtaaaagtgtttccagagttctcatcaaaattgtcttttaaaatggaaaagtgaatcaccctgttgtttttactagatattgaagtaaagttgtttttcaccattgatcattaaatccccaatgttgatgagcatggtctctttttttttcatcccaaatgcctagatactttattgtttctatttctgaaaatgcttatatgcttaggaaatgccatcaaaatgccatctagtattctgaccattaaaatatgtgtattcatgtaagaacctgcacaaaacgaatatgaaagaacgcggcaagagaaaatcttgcagaatataagaaggatggatgaacttggcatcaaagacatagctgccactattaaacatatcgaaacacaacatgcatcttcaaagacaaaaaactcaggcaccaagaaaagtcatggagaaggttctgatacatcagagtttctccctgaagatgatgaacaaggggttcagtgtgatgatgattcatatttagaaccggagcagcccatccccataatgattgaggtgcttcttctatcttggctgttggggggggggctaggatatctgcaataatttttccgcatttaatttgtgcagcatttgattatttttttaatgattgttgctaatttattcacatgcttacaacttttgtgtttattattgtagtaccctcgacaaactagacgaaagaagtgtgcgacgaagaagaaacctaccctcaagatgccaccaggagtaaggatatcaaagagagtgagggcgggtgctccaaccgaaatgcctcctggagtctcaacaaggtcagcgaaaaggcaactcatagcagaacaaggtaaaggtaatggccatgaagaactgcctctagaaacagaaaacaatggtgatgaagatgtgggcagtggacatttgcttcaagataatgatgtgaacaggcccccgagcccggtgatggactggtcatatggacatgatgccaaccataaagagcaacctgcacagcaaaccaattctgatgttgaaggcaagttagttcaacgaagagaaatttattatttttaactatttgatgaatgctaacattgtaattgaatactctgtagtacctatacgaagaggcacaagaaaatcaaggccaccaactgcaggaataatgcttgacaagatgaccaaagctatgggaagaatgcccattgctgttgccgaagggaagaaaaggccagatgaaccggtgcaagctgccaagtttgcatcagaggctggtgttatcattaggactaaagttcctgtcttccctcattggaagcagtacaaggatgatgaaggctatattaacaacttcatgggcaagttatctgtaagagcctatctatattcttttatatttcatctattatatgacctagtgttactccttaatgattgcaattcaaaccatcaggtcaggttggccattaaccaaaaaaaccagccaacaagggatgcttgtgctgatgtattgcagaaagggatacgacaaacacggtataatttgaagaaggcctacttcaatggagtacctgctaacgagattagaactacctctcccataagtagcatgactgatgaacagtggctggaacttgttgcaaagtggtcaaatccaaagaatatggtatgtcatctctaatgacatatttgtttcatttcatacctgcgactatgtctaacacatacatcttttgtagcaaatctctgaacagaacaagcaaaaccggcttaatgttaggttccatcaggctacgggatctcgcagctatgctgcacacttgcacgcttacgtaagttcccattatcttttagcattaattgtagttaagaaccacttatctaatgtaatagatatataaaataattgatctgcattttctgtactgaaatagaaggagaagaacaaggttgtagagcttgatgttgtggatgcctttgaggactgccataccagtagggaaaaaggtctaagtgatgctgccaaagatgcaattgtaagtcactctgtatattcttacaacattgaactcaattccttgttacctatgccaacatattattaattcagctcattttatatttacatccataggataatttctgtccttagtgtgcagagatatttgcagctaagatcattacagacttaatggaatttatagactctaacaatgttagaatacataccaaactaaatttgtagctgctggaaacttgtcgctagacaacttaccatatacaacataagttgagattgggttaaaatgccaaataagctacataaacattttttcatcaattgatcctggttgcagtttgtatttttatcaatatcccgggtttgagggtgtgattcatgaaaactcatttttacctaagctgctgtagtggtgtttgcatgtattgaggttttgaatcatatgaacataagactgaatatatttcagcctttactacttcaaaacttatttcattgtaacttggaaaagtaaacttaattatgagggattatgtactccacactagtattttctttctaaacattagtggtttctagggaaaatatttaggcatcataggaggaatagaaaataaccaacgctaagtaacattgcaccccctccaaattttatgaaagtagttgaggggaaaaccttgttcttttatagctaccagggtgttccatcaatcaaaagctgccatgaaagctaatcaaatatagtctaaagtcagccttctgatatatgctaaaacagtatcctagattctgtcaagaagcatttggcctgcattgttgctagaggctagatagaaaataattacattctaccatagttagagctcaaaatgtttctggtctctttcacagttaagagggcaatgcaatatttctaaatatgggaatgcttggcttactcatataatttgtttctgttttggcttatggaaaacaaatttggttaaatttgcattctatacaagtttccttacctctagtttgtgcttcctggtagctttccatcagttttcagtgactttttgaatgtgttgtgcagctgccagtattttgaatgtgttatgcagcagccagtttttcatgtatctaatttcatagctaatgttcaatcattgctgcagtcaagtatgaaagctattatggaagaacctgtacctgatggtgagacaccaagaactagtgcagaagttgtgtccaaggttctctctcgggacaattccaataccacgtttttgaaaaatgctggtctgcagatgagctccaagaaatcagtgacaccgacagaagcagcacttcaggaagaacttgcagctgaaaagcaaagttcagccattctccatgcagaagttgtcgaactaaaagaacaagcaaatcttgcaaatgaagcgctggcaaagactcaaaaggagttggcagagttcaagcagcagcaggaagagaacaatttgctccttcgacgtatcttgagcctttcccagggtaacttaaatctgtcctagtctcctttatgatcttctgcactgtgatgaactccatctacttatattagttgtttgatggttctgtgaacttattgtcatgtggtggacttgattatgtgaaatgatgtttggtgctatggtggacttaatgtcctcctatggcaaacttttgtggacttaatgtgaacatatgtgtgctaggttctgtgaacttttttgtaatatggtgctatgtgaagttggtatatgtgatatatgttgatgttgggcctatttgtaatgtgctgtgaagttctgattgtttgtccatgtgatcaatcttgatgttgggcctattttcttatgtgctgcgaagttctgattaattgttgcttgaaatgggtgaatgctaaaaatttcctagatctcatagtgggatgggccacaacaatatgtgaagtatgtggccaaatgggctgggctaagaaaaaaaaaatgagcgggccttcatccctactgtgctaacgtgtcatccaaacaaatcaacacgtggcaacatcaggtaaagacgtgtgtcacaaatcagatatgtacacgtggcgcttcaaaatgagagcacgtggtgcctccaccttcggcaatgtggcgttagcgtacaccaccacgtggacatacaaaatgtaaacacgtggcgttaaatatgactgccacgtggtgtctccacctttggccacgtggcatcagcgcgcaccaccacgtggacataagaaatgccaacacgtggcgttaatatggctgccacgtggcgccaccacgttcgaccacgtggcatcagcttgcaccaccacgtggacataccaaatgccaacacgtggcgttaaatacgactgccacttggctctagcgtacgggagatgatgatccagcgtggcgtacacgtcatccgccacatcacagccaacatggactccacgtgtgatagccccgtggcatggacgacgtctgtcctagccagctgaaaagcagttctatgacgagcaccttcgtcatggatataagcatttctatgacgaaatctactgtttagtcatagaaaaacatatgtgacgcgacttctatgacgaatcccatttcgtcataaattcgtcatagaagttactttatgacgatttgcgcgtcttccatgacaaaagtagattgtcatagatgtgcctatctccactagtgaagtcccaagtactcgccgattttgtagctgactggaccatgcctgataatcaatcagacaaccagatcgacaacgaaacgtggatctcacgcccagaaattcccgaatagaattccaagcagaatgtgcattaaaatccccgtccaggaccggccggggtacacaaacgacaatattgacattcagatccacgtcttacaaacatcataaaagtcttacataaatgcagcggaaaaacgaaagataacaggagctaagccttgacttgaactgcagtgggaacaccactccacaggcatcctcgacggcacggacgaagcctactcctcggagaaaccaccatccgacacatactcatactctggggttggggaaaatagagcaagactgagtactacccactgtactcagcaagtcataccggaataggggtatgatgcagggaattatcaaaggagagctagagtggttcatttgcataaagcgagcatttataaacagaagttgaaagaattaaacaattgtaataattaatcaatattaatcatccactgtccaacgctataccacgttgcgacaggcccaaccatccatctatactatccaatttcaaaagactaaactaggggtgagactaatcacggtgaatctggttgaccgcccataaccacgggcacggctattcgaatagttttactctgatcagaggtgtacaactgtacccacaagacacagccccacgacacgtttccgtgtgccgacatgccaccacgacataccggaaagaggccgtgacaggacccttcgcataaccccctctaaccaagcacaccacacctcaggtttcacccccactcctcgcaaggcaacgggcagtcccctctcgtgcctaggtgaatccggaagcgacagaggccgtcgcagggcctgccccgctccatcacacccacccttgcctggatgcgtcagttagaggaaagctacactacaagcccagtcgttgcccacgctggcttgtggtaagcacgataaattcttccagggtttcccgtgcagcaactctttagataagagtcgaaccacacctcgcgacccctgagtgcctccacggcctggtcttttttcacctccaccatcgccctctcgagttccgcgacttcacacttcgtcttccaatattggatgcaacggtcttggccggcaagtctactctcgaggtctgctcttccattccgagaacataaaaaccaagttactccgggaagaagaatgaaggagatgaaaacaaagatcaccaacctacggaggtcatcgccatgcccatttccacgggtgagtttcgtcccatatcgtcctgcgacataggcgtttgaagggtaatcgccggggcgaccaccggtaacttgggctgcccacgctgctggacatcctcgacatcgacatccctacaaacgacaaccaaaagtactcaggaccagggtgccaacagagatcaaggcagcgattgcacgaataaaggcagttgaagccgacaactgttatacaaagtgtagtcgattacaaatgatctgaggccctactcttcaaaaagcgggagaacagactctcccagttcgccaacctcctccatcacgcccttacgagtgtcgttggcggcccccctgtccaagatctgccgaagatcgagttcgggatgcgccagtcggacacacgctaggacgtgacaggccccggtgtaaatcccgtttgacgcctcctccacgatcctggccatatgcttggagggtattgcctccatcgccgtagccagttccacaagtgaggacgtcagcgagaactcgccggggttcgctgggatggttgacgtgatgccacactccccggcgagctgatgaagaccggtgtaggtgacccgcagcgacccacggatccccgacaggttgttcttgagttccgacatccggtcctcgagtccccgccattgccgctcgttaccggccaccagctccctcatcttctggaggtcctcgcgaacctccgccaggtcgcgttccagcttgtcggcacgctcgttcgccgacgacgctgccgctgtcttcacctcctcgatctcgcgacttacgccgcgagcgccagcctcgaggatgcgttgcatctcagcttggagctccccccaggtgaggacattagcagatggcccgcgagtaggtccgagggcactggacggactgcttggcgtcgcttcacggctctttggcgcgacaacaacatcggttgaggttgctgcaggagacactccagaggccccttcggacttgtcctgcgccgctcttgcctgcgccgacctgcagaagatcctcaaatcaagccatcagaagacaaacgaggagaggatctcgacttccgcttacttacttctcgcctagcgtcaccagcttcctccgccgcggaggtggcgaagacgcgtccatggcctgggtaaatcaagcacgagttgagggtgacatctcttgaatacgagattaacgaaccaagggacttaccgatggggaggatgctctctggcggctgccgagaacggaggtgaacatccttcccgttttcgggacacggctgccactagtcgtggcagcagcggcgacggccacgtcgggcgtctcccgagcgacgctctccttcagtgaggccgccgcctggtggtccgcaaacggtccaataacgtcagtcagagggtgagcctacaccgcatgaaatcattttccgacccgggaagcaaaaatagcgaggttaccgagtacactcacgttgattgcggcttcgcgctcggtcacctccttatcacaaagaggcatggggacgtcgcttgccgttgtcgggccgttgatcatcaattggccgacgcggcgctccacagtggcgtcactcaagcctgcagatcaagaacagagttcaataaattagggagaacatgcacagaagaggatcaaattaaacacaagaaaaataccccgaggagaaacccgggtcgcgtcctccggcccagagtagtcaaaggctgggtgggggcgagcctggagcggctggatccgcctactaatgaagtcggtagcgacttcataacccgacaaacctcgcgctcggaggtcatcgatggcatcaatgaacgactgaagagcaggggtcaaggcgggttttgcggtccaagatgggattttgtctggttgttcctcaggaacaaggaaccacctcgcccgccacttgctacgagaagaagggcactggaaggggatatatcgcgacttcaggccatctcgaagtcggaaacccacacatccagataccctggtagattccatccaacgcaactcatagtagaagcgaaagaggtcgagaaacggctctaccccaatgtaggcctcacaaagatgtgaaaagatgctgaggaaggcaatggaattggggttcaaatggagcagagaaaggccgtagaaattcaagaccaagagaagaaacttagaaggcggaggaagaaagccacagagaatatagtcctcgatcgcaactatacggcccaggacaagttcaggttcaatacctcctggttccctctccatggctccgcggccggggaggacgccatcctcctgtagcttcttaagcgacgcgctggtggaggtagacttgccgagatccatcgccgccggagatcgccggagaaggggccgagatgaacaagctagggctttgcaggagcggaggagacaaggaacgcctggaggctggagagctttcttcacaacgggcggacttcaaaatggatcctcaaaatcctcttaaatagacgcatttccgacggtgcgaattccaaggaaaggagagagagattaccgccggaaatttctaggtccgttacgcacggcagtttttcggacttcagtttaaattcactcatgaccgttgggcttcacatggtgttgtcgattgcgtcctgtctctacggttcgcacaccgagaacgacaacagcctcgacaccagaagtcgcgatcggttacacgagtccatttaagcagaaatcgggggctactgtcagggttacgggtaaggtataccctttacccttcgatacatgccgcgtatcggtatggtatacctgcgcgtatacggacgctctctgcatacattaagggaatccgtcatggagttcacagatggaaagagtcctactcggacaagactgggtcgtcagtgcatcgtgcagggtccgatatctccgagttctacttggaaaccgcttgacctgcgttataaaagggaccccctgggaggacctaagagagggaatctgatagccaacatcaccaccacagcctacgaagtcggagcctgcgaaagccagattgccgagaggtctagtcggattaacccgatacgatctcgtcggtttcatcgagttccatatttccctttgtaacctgtgatttccatcatataatcccatactaactggattagggctattacctatcaaggggcctgaaccagtataatcttcgtcttctgtttgcttgatgtcgtactacgtagacccttgtaccagcgtaccccaatactctctatatccggtctacgggtatcacccgtggacagaatgttatctcaatcgggcctaaagttcccgtcacagatgatggtcatctgtgacggccgcaactttaggcccgtttgagatatggaatgttatctcaatcaggcctaaactacggcccatcactgaaaggtgtcatccgtgacgggcttaagttttatgcccatctaacatgtctgtgcgaccatatctcaatcgagcacttttcggcccgattgacatgacttccttgtgacggcccgctatttctaaccatattaaagttcgtcacagatagaaggatatgtactagtgtatgcgatcagctttatggaaagcccaaaatgctactccctccgtttaatattataatactttctagtattgcccatattcatatagatgttaatgaatctagatacggtatacattcatacagatgttaatgaatgttagtaatggtaaaaagtctcataatatgaaacggaggaattacatgttttaaaaaagttgccatacgagtattagacccccactggtccgatatatgatgcttgttattggatcacctattggtccatattgagatgcacgaagaaaattgtaatggggagtggctctgccaaggaaggtacgtagccgccaagatgttttgttcgatctagtcatggctagaaactggtcaccagccgattggagtgaagatgaaggatggaagcacctcatgctctgcacaagtggcgaacctaattatctaagacttggaccaaagagaaatggccttcaaatcaccatgaacgtggctccttcttgccttcctcttgtttcagtagccctatcttctccttttctgtaattttctttagtcgctctggtaaacctttgtattttgatcttttattccttctaatataaccggcagatctcatgccatcttaattttcaaaacaaaaaaaaagatgctctgctgatttttttttcttcatgctgtagttgatagacgtcttatatgtgttctggaaagtttggtcccatgcatgatggtcggatgacaccgttcgtacggcactgttgatcccgtacgtctagatgcatgagacgtcgatgagccggcactaaattcatgcgttcacaaacggtccaggcactccacaaactgactaggaatgcccaggagtaacaaacttggtgttcacctcgagtgctcaaaaggatgagcctaggttactccgttgcactaaacatgcaccagagaaaggagaggagtgggagagctaaagaatatacaatagagaggggggggggtctcatcttacattacatgaactcatcaaaacagaggagatgaagttaacttgtccattcactcaaaaactaataatcgctactaatagattaaaattggaagttcgaccctcagggggccgtaaaggagtttgggtggcatcaaactataacaacggaatacgacgagacaacaaactttcatattcaattttttaaaggtcataacgtagatgaatagaagccatggcgaaccggacaagcaagtaaaaggacggcaaatgagtaattctatgcggttggtgtgacttttaaaaactataaatgaaagcccgattatgataagttttaatttttaaaatcacaagacaataagataaatgtttaacaaattttaaacaaataatgtgtaaaaatttagatagctttgtataggtgttagccgcgcaatatgcacgccacctagctagttatattatcaagataatcttaaaagcatgcaccacgtttaatgtggtggctgaaaatcccacattagtcgaggaaaaagaaaaagatcttattattagattacggtgggtccggattataacggtgtagattgattaatatagttgtatacgagatacaattatatatgtagaaatagaagttaacaattatatatgaaatctaagcttacaaaaataaaagctaatagttgtatatgaaatccaaatatttcaatatataatggtacctatagaaataaaatttcagagttgtatattaaatttaactctaagtgaattatctacctctgtgcaaaactatgcggaacaatccccttactcactactctatccatcccataatatagcaacctaaaaccggatgagatatatcatgttcaaattcgtagtactatgatacatcagtacatctcattcagtcgtaggttataatatactggatggagacggtacatttaatcgagaatagtcgaaaccaggattctctttttcggtttagccgatttgatctgaggccaccgatataccgaaattttaaacaaaatttagttaaatttgaacaaatattaccgaaattcacgaaaaatttaaaaaaagtagaaaaaatccggccgaaataatatcgtatccaaacctagtcgactgtacgagaatatgattcttgaaatttcagtccgaaatttccaaacctagtcgactgtacgagaatatgattcttgtataccttcatcgcgtgtttcggctggatgcttgtgttgatggtacagagttacggaatacagactacagagacacaggatcgaagctagtgtagttgtgttgttgctccagatcactaagctcgctcgtgtcagtcgagcaaaccttaagcagccatggctcaaggtcaacttgacgccgagagcgtcgtccctaccgccaccggagtccggaggcgaggaagacgtttttggctgtttcgtttccgatcatgtttcctcgatcggtttcgccgccgtatatgtctttcgttaggatgtactgccaacatcctcgcgtcgcttccgacgagggaaggatggtggacggcgttcgtcctctaccacggctgctggatgacgcagcaggccgccacgagcgtgtcgctgcctcgctggtgcacgcccagttcgcgcggcgccccgacgatgtgctcctcgccacctacccaaagtgcggcaccacctggctcaaggtgctctccttcgccatcgccaaccgccgccgccgccggcgaccaccccttgctcacccaaagcccgcatgaccttgtgccgttcatcgaggtgcccttccaccacctccaccctctcgccgccctcgacgcgctcccctccccgaggctgctctccacccacatgccgccccagctgcttccccggcgcgtcgccgagctcggctgccgcatcgtctacctatgccgggagcccaaggacgtcgtcgtctccctgtggcactacatgaacaaggtcggcaatggcttcttcctcgatctcgacagggccttcgagctgtttgtcgatggcttctccctgtacggcagtacgggccgatctgggatcactgcctaggctactggaagaagagcatggaggaacccgacatggtgctcttcctcaagtacgacgacatgatggccgacccagccggccacgtcaagaagctcgccgagttcctccgagccccgttcaccgacgaggaggtcggcgccggcgtcgtcgaggaggttgtgaggctgtgcagcttcgagaagctgagccgcctacccgtgaactcctccggggtggttgatcggagcagtggacggccgatggagaactcggtgtttttcagaaaaggtgaagtcggggactggaagaactacttgactgaagagatggccaagaagttggatgccgttattgaggagaagctgaaaggatctggtctcaccttctgattatctgaatctgatatttgttagtattttttttatacatttatgctttgtgtgctcctgtgtaaaagtacaataatcctcagaatctcttgtatttaaactatgtcccattgtatgcacgcttgcgcaagagttggaaaatcttatatcgctcactgcaataaaatgcaatctatttcttgttttcaagggctggaattttgtgcgaacgtagaaggattgcacatcaatatattagaaagaaaaggagattttgttacacaacgcaatcggccaaacaagcctatgccagaagaaagaaagaaaaaaaaaagaaaaaaatactactacgaaaaaaggttactccaacaaacgagagggaagaggcggagccacactacactcctatcaaatccccaaaagcggcattgtctgcggaagacaactgacggccttccgagcggatggactctataagcacggataccgaggagagcgccgagtcgaaaactcttgagttccgttggggctggaaatattaatgaactactatctctatttcaggttataagacttcctagtattgtccatattcatatagatgttaatgaatttaatcacacatatatagatatatatatctagattcataatatatatatatatgggcaatgctagaaaatcttataactgaaacggaggaagtacatatttgggcctcatttgcaccgccaaaaacggctaaaacctacttaaaatctgtctagttctattgtactataggtagctacattttaacacgagagagtaaggggttgtttggttgatgtctaactttactacaactaaccgtaaagtgtgaaataaaataaaagtgactatgaattagtatgctataagtgtgacatggtttaaaaacataaaacttgtgagcctaaaatataagtcaaacacctacctaaaatataagtcaaatatagtttggtaaagtgaagagatgaaccaatcaacctaagatttaattttgatatcatggtctcctctcatgactggactagtatgacggcgctcggcgcggcgcgctcttccaccgcgtggacagccggtggtggccggagatacgaggcggctttcccgggaaaaacggcagccgccgtcctccagacctttctgggttccaagcccagcttaccgtgcagtagcacgagcgtcagctttgctgaaatttttacattttaatcctttttaaaaacttattttataaatagacccctaacaagacttaaaccgagaatggtcctttttggaccccagagaggctggcgccgtcctccaacatgacggcgccagccatcatggcgccgcgacagtgccaccatggcactagggctgtcgtagcgatgcggacttggcagaagaggggcgccagccaccttgacgccgcccctcatacgacggcgccagcatggatggcgcgcctctcctctgtgggccgcgcctttaaaccctgtggccccaccacctttctcctctccactcccatttttgcctgagtcgtagcctgagccgctgcttgttgttcttctccctctccccccctcacctctccacctcaaatccagtcaatttaaactcatttttcgcgggatttttcgccatgttagaggacggcgccagccactctggtgccaaaaaaaaaccatttttgttttaagtttttccagaggtccatttataaaataaatttttaaaaagtactaaaatgtaaaaatttcaggtcagctttgggtcctccaagctgcataaacgtcataaattgaacaatacgtggtcgttattttagtactactactgtcacggtttggactgccatttcggaaccagttagtgttttacttcttcttccaatgcaattatgcataaacgcgattgaaaagattcaaagttttgttaagaaccaaatgaatcagtagaattcaaatagtgaaattatgaaatcaaggccgaaactgcagttgtgcatcgtcgatgggtaggtggttcatgcgaagtcgtcagagcacgtacgcaccttgcatccgagggagcagaagccgaatcgaaggagtcgagcaggccacggccacacacctcacagcaccggccagcggcggcggaacatgttgcactcgccgcactgcgcgaagtatacctcgccgactgcagaggcctcagccaccgcgactacttctcttgaatcgccggaccaacctgcaatacaatgcacaacatcaaaaccaatccaggaagccgagcaattgctctcaacctagctcatcgaaaagaaaagaaaaacagaaatgaggtttggtcacttaccatatgcctaaatggtctctcttcgttgaatcgcaagaacaatgtgtcaactaaaccttgaacaggggaaatcccaagaacagaattctgctgatttgggatggaaatcgtaagaatgagtgtacagccaggcttatagtttgaagaatagtaagaatctgctcatgtccaaatttatagtattaaggtgtgttatctcttttactagatttgtttgttttgtgatagggagagtacgtgctatgctaaccttgcacctatagatggccatatggcccgagacctccggcccagcccaaggcacgccattttggtccggcccaagcatggcatggcccgattggggtcgtgcccgtgccagcccggcccgacatccgggccgtgcttgagctgcaccctcgacatggtgggtcggtccggcacggcatgatcgaagaaaaatagtatagggatgcaaataaacttaaataaccatataaggtaaggccaaaaagaagaggaatataaaatggacttattttttagccatatgggcatagccaatagagttgagagacgaaaatagagttattctgtggagaagcacgatgggttgtcgtgccttcggcacggcccgagttgtattggccgtgcctaggccgtgtgtgtagcccgtgggctggcacgacacggcccggcatgtaggttgggccatgccggcccgattaacctcggcccgtgcaagaaaaaaaaaagaaattgtcgtctttacgtgtttaaggcattgtcatcatgccatgttcagttgttcaccatgatcatgtcaaactgtcaagtgccaaaaactgagctgaccacaattagatgtaaaatcaaaagtgtttttgattattattctgtgatgaacaattggcatcggagattattggttttgttatttggaatttattcacgaagtggttttggagatgattggatttacaggtgaatcgcaggtgttgttatttcatgtgaccggtcagaccgggcagtgtgagccggacagaccggcgtgtatcgcgcggtcagaccggtgcagcccgcggtctgaccggccgacgctgtgtcggtttcggtttcgggttgtttgtttggatatccgtgattatttcatgattatggcttctagatggatactatacgtatgtaatactgttgtttgctactaatgagtcaagttggagatagcttggtctcggaatatggtttctttgtttatttcatgtgtaggtgactcgatgtctcggaagagtatttgcggtgatggaccggaagtcggcttggggataagacgacgtccgtggtggtcagagatcatgcggaatacttaggctagagttgatgcacgtggttgatggagattccatatggcatacgatggagttattgtgtgcgtatgggatgcggagtcgaatttggaaggagtccaaatttggtatgattggttatgtaaagtttgtttcttgtactagagggtttcctaaggtgtttaggactcctagtatgagtttggttcgtggctttaggctgcctacctcgggtataaatagagggggagcgtgaggcttcccagtatcgctttttagagcaattgagttgagttttgagttagggtttcgagtttagtcgaaatttttgtaaggagtgttgttggtgcactttgtaaacatagagagaatcaataaagtcgtcatctactttaagagttctttgatttctgtttcaccgggtttcggcggtctaaccggcgatataccggcggtcagaccggcggcaagcggcggtcagaccggcaggagcacggcggtcagaccggcggcggcgacaggcgcggcaggcgacttcggcggtcagactagagattcaacaccggtcagactggcggcatctactcggtcagaccgatagatcaatctcggtcagaccgacttccgtcaatttcgagggtaacttttatttccgctaaaagttttcggtttttgggtataccaaccattcaccccccccccctctggttggcttagttaatgtgattcgatcttacaagtggtatcagagccttgttttcttctttggatttttatcgatctagagtttttgccatggctactcctgttaggttttcaactaagcctcatgttttcgatggaacagatttttctcattggtgtagtaggatgcaatcttacattatggctgaagattatgatatttggagaaaagtttctcatccttatttgattccattaatattgctactgaaaaaactgcttttgaacaaaattgcaaagctcgcaacattcttttgagtggtatttctcgttcggattatgatcgtattgcgcattttcgaactgcatatgaaatttggaatgctttgagtaactttcatcaaggaacaaataacattaaagaacttcgtcgtgatattttcaaaaaggagtacattaaatttgagataaaacctggagaaactttggatgactatctttctacgtttaataaaattttgagtgatcttagatctgttgattcttcttatgatgctaattatccacaatctgagatttctcgtcactttttgaattgtcttgacatgtctatttgggagatgaaagttacatctattcaggagtcggttgatatgtctactttgactttggattcactttacacaaaattgaaaacacatgagatgaatgttctttcacaaaaagttgattctaagtcgagtgctttggtttcttcttcttcttctttggatgttgatgcttcttcatctaagccttcttttctagctatttttaatgccacatccgatgatcaactcgaacagatcgaggaggaggatttggctttggttgctaacagaattgctcgagctatgaataatgccaggaacaggaaaagaggtggtccaaatcgttgcttttaatgtgattcaattgatcatcttcgttcgcattgtcctaagcttgggagaggcaaaagagaagacaaagatggtgagaagaccaacaacaacaagtcgaagggttcatccctagggaggaagctggagaatctcaggaaggcttttcaacaagtttgcgccgccttcgagccactaagtgatgtagatggtaagagtggagatgatgacaagggaaagaacatctccggtgtttgcttcatggcgcgtggtgaatcggatacagagtatgaagataatgaggtaagtgcttttgaggaagctattaatattttgagtgtaaaaaataagaagtgtaagaagatgtatagaaaacaggaatttatcattgaatctcttaaatctgaaattgataggttaaaatctcttattcctaatgatgatgattgctcaaattgtgaggttttaatgaatgagatttcaaaaattagagatgttaatgctgcacatgatttgaaaaatagatcttctcttgcttgtagttttgctttgcacacacgcactttggatgagttgtttttaactaaaaagttgttgcaaaaatatcaaattgcttttcatgctagtttgatgtttaacatgatttctgctaaaaagttaaaacaacctcatgatgtttttgattgctcaacaagtaatttgaataagatgaaattgaaagatgctttagatcgtgttgagtacatggaagatgttgtaaaaaacaatgaagtgttttcttgccccagatgtcgtaaaagcaaaggtgttatggtagatagtgaaaattgtgctaatttggaaatggaggtttcttatttgaaaaattctttgctaagattttctgatggtaaaaagaacctcaacatgattttagatcaatctaaggttagcacaaataatcgtggtttaggttttaatccttatgctcataattctagacatcctcctgttgtgttaggtgctggtgctagaggtggtgagattttggttaaacctgatactaataaaattgtgtttaaatctgctagtattatgtctaccttgagtgcatcttcttcaaaatccaatgttgtgcatgcaaaacctcttgttactgcttatgttgctaagtcttctaattctaataatgtgtctaatcatcgtgaaaaatatacttgttctttttgtggcaaagatggacatattgttggtttttgtttcagattagctcataaacagaaaaaggagagagagattgttttttgcaaaatcaaagtggcaaaaatctggttttccctcgaggaaaccggtcagaccgtagtggatcccgcggtcagaccggcgatcggtcagaccggctgctgtcggatcccaaaactaatgattcggaaaccgacatgtttaactgtatcaagccctggatcagtagattgatacagcttcaacaatctggatctttattgcgtgcattagaacaacgctacaaacgagatgttgttccataaattaataggggaatataaaagattgtggctaactattacagtagaagctatagagtgactcaaccctaatattttgctattgacttaaaccatctaactaatctagatttgagaactaggttaaaataagactaacttatatgattgaactcctggcttcggcaagaacttcaatttaattctggaaaaaggggtttgaagcaagggtcagcaagctattatattcaataatgaatgtatgaaaaggtaatatttgagtaggattacgattacctgcagaaggcagagaatatagaaatagaaagcctgatgttttaaatgcagcagcatttagtaaaatcttgaattaggtttctaaccaaagtaccatatgagtcccgatactcaattccgtgagcacggctattcgaatagattcaggtttactttactgcagtaaatgtacgctttacccgcaatccatgacatgtcaatattcattagcttagtcatggcaaagcttttcggttactagcatcagtggcacctgttccatgaactctcatcctcatgcgctctgaacgtaattttatcagcagcgagaggagttctggcgttcccgaggtttttagagagggaactggtttgagagacccccgtcatctcaaccaggttttcacaatatacacacacttaactcaacaaatcatttacctgcgcctcagtaaatgttatatttgcccttctcggcatatgcccttctcggcataagtttgcctcttgcacgaggacttaaataagaaccactgtacagaggtaccacctttgctagataacttactttgcaaggtctgtccccattctagtattgcggccgtactcgttcgtttgacataagtacttggtaataactatatcgactgagacagtactagccacccagaaatcaaccaattcctacgtactgtcccaatctaagttcattatatttttatgcaaactaactaggcagggctaagcaaagctagcatatctggttttctatgttcaggttatgcattcaaaatcatgtatgactaatgcatagaatagagatataagaatataggatctttatgctcaaaggggatgaataataacttgcctttctccaacgcgaataaatccaaggtaggcaacctgattatccgatccttgaaatgccacaggttgccatccaaaataagataaactctactgaagaagaggaagagccaaattcaataaaagccataaaataaccagaaaacgataaacgtctaagagggatagggtttagggtataatctatctcctttaaagggtatagggattattgggttaatattttatgtggaggttctagagggttggaggttgaggtggagaggggatcaagcaactcatgtcatttatatttcatgtgtgggtcttggttgcttggagagtaagggatataactggttaagtgagtatgtggctagtattggctggtggtaggtttgggtagtataatacctagggtttggttatatttaagccgattgtggagtagggcaacatatcggctaggttctatattttatgtataggttctagaagagtaggtagctaatagtatggtggataggtgggtatggaatttggatggtggttggaatttaattaggaaggcatcggctagggtttgggtgtttgctagtcgttgctagagttgaacagtataacgactagaattggtatcttctctacccggtgtcaacagacagcataatagctagagggataggaggtttgtgtgggtttagtggggcgcaagtgttactccgacaaccgtgactggcggcggagaggctaggatcacacagagcccaagagctgactgtgcggcgtgctgtggagatcaaggaaatagtgaagctccgaccactatacgcatcgaggcttcgggtgccaggaggagcacttcgaccttaggtttggttttgccgggctttacaaccaacggtccgacgtcggggatagtaaaccgcgaacgtccccatgaaaggcgtaaagttccaaccggtggctttttagtggctaaagggtattttgggttaaaaagaaatatttgaaaagacaaacataaattcaaatagtatttgaataaattcaaataaaatattaaaagagtaaatttggggtcaaaagatagggtttgaatttagctggatttagatccaagtttcactggaaccggatctacggtttaggagatatgggcttctaaagaataggatttgaactaaatctagaaaagacgaaaatgcattgttcatgggcccacctgtcagctttcctttttcttttggggctatctatataggaatcgaatgatttctgaagctccaatcatgcagattttatctaccat

SEQ ID NO: 22652 - DNA, 2133 bp, Oryza sativa
caaggaaataaagcccaaatcataatccaacagcctatccaaaaaagtagtagggaccaaacttggaagccaagtagatgaaaaacatgtcacgtgaatcaaccatgtatgggaccacacttttcaatcccctacttttcaacagcactactagttcacaaacagatctagcacgaatcaaacatggagctaggagaagagaaagaagagagaaaaagaggatccaaatcgcagatggaaggagagagtacaatgtcagaatcaaagagtagttctagaggaaagaagaaatcaaagacaacttctgaacagaaagttgagatccatacaaaggaaacacagaatctggagaacacaaagaaaaaacaagaggaaggcaaaatcaagagaaacaagaaggctccagttcaaggttagttcaaggctccaattcttatcccctatatacaattcctgaaaaagatcaaagagagagtttaggtcaaatatacaattcaaaagaatacatgaaattgttgaatatgtcaaatgaaacaaggttaacaatccactttgctggataaatacaacaactcagaactgaaaatttcatatgtttgctatgtagatctgaactatgtaatgataaaagtaaaactacactgcattcagtactacaaaactgcattctggatgattgtattactatgtactattgatgaataccaaactaaatttataaaaaaaacatgacagattgattagtcttccaaccttactgaatttcactccgaagatatcacagttatacagttatacagaaatataacaactaggctatatagcatatcctgaattgtcatacattcaattttatcagcataatcaccatattaaactaatgacaaattcaaatctcaatgtcaaccacttgtctcatccaactcaatattacataaaagttcaatatctcatacaacacaaacaaaagagccaattcatatgaactcacaaatttcttaacatgttacagtaaaaaagtaataaaattacatataagaatcacagtaattctagtattaactcattgtaaaaagattagttcagtaaacaaaatagtttagctcacacaatcatgcacaaattcaggaacacattcaagatatgttttaaactcaagactatctcagttcaatgtttctctcatcatcagacaacaaaatgaagatttcagataatagatcattgttgatttgttcaatgtctcaaaatagaatataatgaaactagttacagtgaacttgtattacaaatatatagagtgaacactacaatttcaattgaaaatacatgtaactacaaagaaacaatgtaaaattcatatgaaatcatgatctaatgcagtttaatctcaatttcaagatgatttcagatttttcgagcaaaaaacagggtatcaaatacttcaaaagtagtacatatgtaaaaaccaaaacaaatcatatctaattgaaatagaaagaaatagaaaagaaaaggtgccatcagatattataagaaaaagtgccatcagatagtttgttccataagtaaattttacctggaattacagtagcattacactctaattgaaatacttatttactgtaatactacttatggaacatactcatacaggtttgaaaaacatttaaagactatcttgaatatttctttacaggtgtcatacaaaaggacaaagaatgcaaaagttctaaggaaatagaaggaaaaaatataggtaaacaagagttacagtaaattttaactggaattatagtagcattacactgtaattgaaatacatacttagtgtaatattaaaattattttgaaagaattatacaaattgattcatttgttcacttcagtgtctataatcaagtatcaaattgattgtagttggatttttaagtagttacaatttatgtttactggaattatagtataatttctctgtaatacaaatatatgttcactataaatggacttatgaaaaagattgggaaatacactctatgtttcagaacttgctggtttagaaattcaaaagttctttgcaatattaatttattctttctatgcaggtggcatacaaaaggagaaacaaagcaa

SEQ ID NO: 22653 - DNA, 3728 bp, Oryza sativa
tgtaaacatgtctcatagcttgaaagtaatattgtccagcttccagtaggcccccatggttacatgcagaaagaagagcaacaaaggttatctcatcaggggggaaggcatcaaataccatagatctgaagaacattagtgcatcctgtgcacgtccatgcatcgctagcgccccaataatcgcattccatgagataacatttttactaggcatttcactgaacaagcttatggcagtgtctacctgaccacaccttgcatacatgtcaagaagtgaattaaatagagcaacacctggattatggaagttatctctgatacagtcatgtatcatctttccagaagccaaatcgccaagttgcccacaggcagagaggacagcagccaaggtaaactcgtctggagcgaggcctagcaatttcatacggttataaagatccagcgcttcatggaatcggccaccttgaacatagcaagagatcatggcattccaagatattatgctcttctctggtatctgttcaaaccaatctcttgcggcatcaatagacgcacgtttggccagagcacaaagcatagatgtccatgaaacagcattcttgaagggcatcatgtcaaagcatgtatgagccatcaacaaatccccacacttaccatacatgtccaccaaagcattggcaaggatcaaatcaatccgacatcctctaaccagcaaatgagagtgcacaagcttaccaaattcaagatttccctccgctgagcaggcaaaaagcaggctgaccagcgtgaactcatcagccaagagtccctgacgtctcatcccctcaaacaaggagcacgcctccctagtatttccagcctgcgcatatccgttgatcattgagttccatgacaccacattcctgtccaccatctcatcaaagaaccggcgagaatcccccagtgacccggccgaagcataagaatgcagaagagcattccccacaaacacctgccccacaaatcccagcttaacaaccacgccatgggtgaccatcacatgctcccacgcctgtaccctcgcgcacgccttgaggaggaatggcagcgtgaactcgttcggcaggatgcctcgccggatcatgccacgaagaagaggcagcgcttcttgggggcaatggctattgcagtaggctctgataagactgttgtaaacgaacctgtccggatcaggaattctgtcgaacagttggcgggcataccacaccccaccaccagccggtagcgcgcagtaggacgcgaggatctgagaggtgacgtcgtccacgccgtggacgacgaggtgggcgtggagctggttgagacggtgcacggagccgcaccgccgcaggagctcccgaacatggcgggcggaggaggcgccgccggccgatggcgcgagcatcggagaggagactcgaagcgcaacctcccaacgggccgggccaagctagaggaaaggcccatgggctttcacctgctcgcgcatatggagagatcgagagaggggaaagcgagaagagaagacgcggccacgcaggcggaggcaggaggatgagggtgttgggcaagcacgtcttcccgaggcaggtggcgctgctcgccgcagggtaggtggcgccgccttgcatcctccggcctcgattctcctcgtcggcggcggcggcggcatgacgcggtgtgtgatttttgtagggtcgtgttcctcggggcgacgacgtacgacgtgcaccggtcgatcaagaacaacgagcagccgccgaccaaggagcagatggaagccctccaggactacatcaactccaagaagcaaaactagtagctagaaataatcatccatggttcccaataatccgatcaatgcggatcagcttgtgtgtgttcgtctgtaatctgaacagaattggagatgagaccaaaggtggatgggtggaggaggtggggcgcgcacgccatgtgttcggcgaaattcccctgaggactccactgcgtgtaagtgtatctgtaaatggcttgcttggtacaggtatgttagtacagttacgaacgtgtaagcttaactatgtccataaataattccattgtgtagaacatgattcatcttatcataaactccaaactgtattgtgctcactgcatcatggtccattcccaaccccttccaagaaccaagatgatttcggcttgtgtgcagtccgccgagcagcagatgtgtgcagtattctgcaggttgctggcagtgtcccagaagattccattatgcacagtattattacagcaacaagggaaccaacagtgatcgatctcaatcagagtttcttggtgcgttatgagcgcataaacaatggcggccgacggtgtgcatcacaacacgtacagctcggcaccggcatccagacttcagataatgtagtatatcatctgaatatgacgggcacaagatctctggtttgctatcctccacgcagaacgcataaacaattttcagttcaactgaaagaagaacaggtacgcgatctctcccctcttcaacaggtcaaacaaaaagaaaagctgggagaaagaagcacgcaatgttccaacaagattcatgtgaccttatgctataataggcatgtagccaagctggtatacaagttaaactactacttgtgcactgctagatatagtgactagttaactaccagctactttaattattctttttattagcataaactgaatttagtagtgacaggttcaagattttgctgagctcatgctaatgatccttcataaaaaggtgacacctgtacaccaatgttctataaaaaaaacgttgctgtttttgactaatagattggaaatctttgtgggggtacatacccatcttacatccatgctgataagactaatatttcatatagatagttaggtactttcacaacctagctgattgactgaagcaatgagtgataagctgacagcattatgcaagagtagtatgacctatgaaatatggtcatatatacactactctgtttcatagaaacttccctatatatacacaatgttaaagtgtacatatatttgcagatactgcaatactttgtacattgcaagacttgaatacaagataaattgtaacaacaataccacaagctgatcatgatgatgttaggctagagcagtgcctcactgaagaggggagcatgagtgatctgtagtaagctttaggcagagccacaatcttctttgcctttgggacgtaggccctcttggtgaagttgttgtaatcgttggcctcgatctcgtcaaggatttgtcggtacagaagtagagaagcccaaacctgcaacaacaacctaatggtcattcatacgtgtgaaccaacttaacataattaagaatgttcagatggaaattttaaaggatatgtagttgtcatttctcaccggccatcggctctcctgattgagctcgctggcgccttcttcggcctgtctgaaaaacgccctcgctctcgtgatctgatccctcataaaacatctccatctgtccgtgacgcggccgtcgaagatgtcatcttcagagagtccggccatctcgagctcgtccattgggagatagatcctgcctcttcttgcactgcaaattaacaagcatatatcaggacccattagagatggctgtaactaatcaagaaataatcgcatagatgatgatctctg

SEQ ID NO: 22654 - DNA, 3752 bp, Oryza sativa
gagcacagtcgccggaagcggaagggaaagacaaaggataaagacaaagagaaagatcagcaagaaaggaggaggcgaactgggaggccatggcgccggttggtctccctccaggctttagatttcatccaactgatgagagcttgtgaactactacctcaagaggaaggtccatggcctcagcatcgacctcgacataatcccagaagtagacctctacaaatgtgagccctgggaattggaaggtaatccgaaaacttaattgctcatccatgttctcacttctcatcatcactcctgaatcctgattcggctcgagatgttttatttgtcttcttgttttgaaagagaaatccttcctgcctagtaaagactccgagtggtacttctttgggccaagggatagaaagtatcccaatggatgccgcacaaaccgtgcaaccagagcaggatactggaaatcgacggggaaagatcggcggatcaactaccagaacaggtcaattggtatgaagaagacactagtctactacaaaggtcgagctcctcaggggattagaaccagttgggtgatgcatgagtaccgcatcgaggaaagcgaatgcgagaacgccatggggattcaggttattcatccatcctcctcaccagctgttagtctcagttaaatcattttgagttgtatctgctatacttggttagctgaggctgcatttcagagtatcaagcatagccaatcttctcagttagcaggatttgtatgtatttatgttatgcaatagtgatcatatttcataatatgcaatatttgagatatgtgcctgctaaaacaaaattggcaatagaaacatacagaagaaacaactagggcatatttgctagttcagggaacctacgttctttatgcatggagtgcatgaaaagttagggctcttctctcttcttttcccccatatccatcagtgatagccataaagtattccttgcttccatggaccatagctactttacaaagtacattagaaggttttctcagttctctaatgggtcacacatggttcacttttctaggtgctcttgataagacaaatttaacatccaattcttggttcatgtcgcgatgatgtgaaatcctacaacatgattgtacaggggttaggtgcgtcatcgtttcatgatgcagagtataaaaatctaggtcagttgcatgttgatgctaccttaaagcttagacatccttcagtgtggccctgtgtagtgtcggtggctttacactttattctccccgtcaacctccaactttactcactagtgaaaaccataactgaacatgaggactgatcccatgtttattgtaaattagatcaaagtgcacatagtgatacatattgtatgtccactcttaaatttacattagtcgtgttcgaagactctgcattagttgaactgttgacatttatattaagtaaacatagagttcaaccaaaaccattggtgactgaaacatagtccgatttcaaacaagtggaatcttgaaatagcaattcagcaactaccttaataaaaactgctcaaaagttatggggttgttcagattgatgctattttcaaccataccattttttggtaaagttaccaaaaaaaatgtctacgtttagtttgttgctaaatttggtaaatacataagaaaattttggcaatattgtcatcttgccattgccaaaatttggtaaggtttattttggttacaatctaaacaagccctatgattgatggtctaagagaaatcaatagcagcataaattcaagttgcaatttttatactgttccctgccgaacttgaagttgaatcctcaagaattttactctaaatttgtttagtactgataatgaacattcaatccaaattgaaaatatgcacatgtaaattagcaaacaacaagcgtagaatgtagaagcatataatccattaactttgtaagattacagctgtatattatcagtaaacagaaaattaaagaagcaccttacttcggttcactagtgcgctgaaataatttttcatccacattgttgaacttgaaatctccccatgattccaatgtagaaaagtccaacctgtgcaaaaggaaataaagtaatttagatcatttattcattttcatcattttagttacaggactcctatgcgctatgtcggattttcaagaagaatgtggtgttgggtgaatttgacaagaaaggggagtgcagttcatcacaggctaaaggaaatgaagaagttacagatttcggggatgctggacaatcctcgggagcaaatgagaatgataaagacaattcatggatgcaattcatagcagaggatctatggtgcaccaacaaactaaagtgaactagaaaactgagagaaaacagcttgttaacttcatctaaccagatatttcggtattagttatactgcgtgtatcttctgtatatgtttgataaggacacttctcactttgcataggaggaccactttaagtttggatgctggttcttaaattaggtttatacttttgttcctttagtactggataatatatctaaaattgtgctactttgtacttcaatcttcaattaacatgtacctatcatctaatgaaatgatacaaaaggagaaatccaattttatatatccaccatgtattctatggatatatgtgcaatgtgaccaatatggattaagcaatcaccatatatcactaataaaagaaagttaaggatggttcagttttgaaaaatcaattgattttgatattccggctaacaaaattttacggtattattaatggcaaattccatcaatgtaataatgtttatgtttcaaggttcttaagttgcacaaattagtataagaatgtggcaaccatgctcacatctaacagctgctaggacctattcagcctaagcctgatacaatttccatgtagttttctagtttttttttttttgacgcgatacagttttctagttgcaggctgtaagtatctgtttgggcgatcttttattctcagagtttaatttagatcaccttttacccaaaaatcttttcactttggactaactaatattgcgactaccccaactctattctcgagccagagactgcaataagtatgggtaactaaacccagatatataagcctaacctttcggactccagcccagtactacagtgttttaatcatatatgtttgaagatgcccacttagcatttctgatgttttttttttcgcgaatgcagcatttctgatgttgcattcaaccaaagaaaatcagctgcttcaagtttttatcccaactaatttaaagttgcagtaatttcctcaaaattagtgtgtgctttcagggattagagtccaatcagtagagcatacatcaattccagtcacgaattaaagggtaatcatatcaagctttagaaaaagacccaaatctagcgtgagaaagtcacaaagcaaggcaaagcagatcaataccggagggaccagccgcacgaattccggcccaagggtgaggactcggactcgagcagcccaaggattgcagctcgtcgcggccacgcccaatgcctcctcctcctccaggcgccgcagcacgatcacacgcttctctcccgtagtctcatcccagaggcgaatacctgaggcaaccacgaatgttcatcagaagcggtgcatttggtggatgcgcagcggcggcggcaa

SEQ ID NO: 22655 - DNA, 10392 bp, Oryza sativa
gcggctgctctcccttccctccgctcccatggcgagagatccgtgctttcgacttgtctccttccccttcatctgcgctctgtggcgacgagtcggtgggttggaatttggaaaccgactcgctgacccgcggtctcttcctcttcccctttgaataattttgaaaataatgggtcctctttcgaaattaaattttaaaccaccttcaaataatctgaaactgagtttaggtgttccaaaattcaaactccaaaacccaagcgggaaatcataaatttagcgctcgggatggttccaaatttccgatcgcgcgcactgaatttggaccccgcgtcaaccacattgcaagatacctcatcacctcaggagattcctacatgaatatgggcatttccgcggttccgccccccaaatcgcagcgggaaatcacaaattcagtgctcgcgatggccgatggttcgaatcaggtagccaatactgaaaatcggaccgtgaaaatccaaatagggagcaaatcagaaactgctcgtgctcttgaaatttcaaaatcgctcaaaacaaattgggcaatacaggtcaaccagtgtcaccaactagaacaatgcaggttgcaaaacgttcacatagcacggcaagagattgcaactgaatttagagggtaaatcactgcagatttcctattccattcgaacgaacgaaccagtagttcatacatccctaattaatgaaggaacaggagacgagatgaaacaacagctacaggagaagaggctaggctactacgacgaactgaagaacatggcactaatcgaatccctatccaatcgcgtggcctcgcatcgcctcgcctagccgccgaatccgtagagggtgcggccctggcgcttgagcgcgtagacgacgtccatggcggtgacggtcttgcggcgggcgtgctccgtgtaggtgacggcgtcgcggatgacgttctcgaggaagatcttgagcacgccgcgggtctcctcgtagatcagcccggagatgcgcttcacgccgcccctcctcgccagcctccggatcgccggcttcgtgatcccctggatgttgtcgcgcagcaccttcctgtgcctcttcgcgccgcccttcccgagccccttgccgcccttgcctctcccagacatcgccgccgccgccgctcgccgccggtcgcgaggaagaaactttgacttggtgaggagtggttggcggcggtggtgatgaggtggggaggagaaggcgtgtgggggcggggctttatagaggcgtgggtttaggggaagcgatggggggcacgatccgcgtgctgctggttttccgcccgttggatgggagatggacggcggggagtgggggaaggtgggggttgcgcggatcggtgacgtggcgtggtggtgagggggaggtgtgtttcttttgtgaggatgtggcgggggtgcgggaattcgagcggggagtgggctcgtgttgggtggatggcaggtgggccccgggtttttgggtggcgggtctgcgcgcggtctagaaatttcggatgggttctatctatgacaagtgggcccatagttgggtgccatgaggttagtaaaatacgtttctgtagtttgaaggcgtaaaaggctttgagccaaaattatttgtgagatgaattaagctggccatgttaggtactcctatttaactatgtaagtcaaccaaattaaatttctgaagacttgcaaaagcttcacaatgcatttgtgactgtaaacaatcgtgttctcttctctgacaaaaggttacaggtaataagacacgtataaaattgtaaaaggacggcacgaaagaataatttgcatatgccaaatgagcgtagctctactcatcatgtttcttttcctgaaaccatcccacccgacatctacgctaggggcctgttcactttcatgcccgacatctacactatgtcaaaattttagtatgatttcttatatagttgtcaaaaattagctacaaaataaatgtagcaacttttttggcaactttaccaaaatttgataaggtttaaaatagcatcaaaatgaacaggccctaggtgtatcattgtcactcctacttataatcggtgttttaaataacgagataagatatttagtagttgaccttcccaaacaactatagcgggttaaatgaagttatagcggctaaattatacatgggagcaaatggttaggacccttctcaaacgactatagtcggagatagcggtaattatatttttgtatggtatttcatgtatggaaaatgcagggattaaatagcacaaattataaagtacgttgattttttaaaaaataaaaattataaatgcgaggctagtccagttggtacgtgctgatgcactaagatacagactttgcatatgtagtttaaatattctaacttgattaagatatggattttaacttggttttcgttagcatgactttcgaaatgctaacgttgtattccgtgtaaaaactttctacatataaattgctttaaaatatcaaatgaacatatttttaagttaaaaaaaataaaacttaactaaccctgtgctaatggttttctcgtttgtgtggcatcacttaatatctattttcatcagatttaaacagggttaaccaagcatgacgaaccgatgaggtcaacaaaatataatgtttaagagcctgggaagcatatctacgataacccataagaaaaaaaaaacgtgaccttattcctaggcaaaggatggttcacatcaggtggtctagtgcaaaccgcttccttttacaaggaatagaatgttggagaattaggctatgtttgaaatgatgtgataataacttgtgattaactgaattttaattattacaaaattaaaaaaaaatggattaatctgatattttagaataattttcatatagaaaatttttgcacgaaacacaccgtttagcagtttaaaatacgtgccatgaaaaactaaaacttttatctcgaacagggccttaatgcacatgcttcctatggagtactcccttcgtcccacacagggacggacttaggcctcaggccacgtggcccaggaaagaaacattatcaggcccaacaaattctcaaacttgggccaaaatgccatgtgctagcccgggtctcgtgagaaatctggatatgtccctggtccaaaaaaacgaatcttgataagtttctgtctagatttgttttactatgatatatcacactcagttataggtttgttttctgtgagacggagggagtaagttctaaatgtggtatcttttttttaaaaaaaaaacaaaaccatgtatgtatttaatagaaagctattataactccgatgtagacttcacagtgtttgatttgtttgtacccttaaataattatcatataatcattcatctatttgaaacggtaattatacccttgaacttgattaaaagttcatgtagcacccaaaactttaaaaacatccatccaacctcccaaattttattccattcatattcatataatccactatggtggttttgcaaagtgtttttttttctaaattacatatatattttttaggagtttaactacatgatatacacattggtatcccattttgcaaagtagtcctttttgtctaaattgcatatccatttttcctacctccatcccatattatagctacttatatcatttagattttgtcagatgatatagctacttttctatccaaaccaatcacaagcctccctcattttaatatcaccatgttacttaatttcttcaaaatagcattcataagtcactataaaaatgagacaaagggagtacatcagttctgttaacatgcatacaaacatgtgtataagtgaatcaaacatcgccctcacgccaatttcactacaaaattcctacgacactctttggcatgcaacgtgtagccttcaaagaaatatccatcggtatcactcgacatcgtccattgttttttctatccaaagagaatttattcgaagtgttggtaagatagctacctacttcattcaaccatcatggatccaacataaaaggtgaccaagataatatcactttttttgaaacctaagataatatgactctccattgcacaaaagaaatgcacgattaattccttccaattttgaacatgacacttgtgctcagctgtactggtgtatcaacaaactcacatgtaatgatcatggtagcatcacagaaaaggagactccgatctttcggccatgcatcggtaatttgtcacatcctggtcaaaaatagtcaatccacacggccacaagttgctcttgcctctgtgtttgtgtataagcatgctaaagattgcatttcccagtgttgtcgacattgacaaaagaatggcatttgtgacaagaaatgccaatattgatacttaaaaggaaatgaaaaggacacccactacaatttttttctttgaaatgaaccgcacgagacagtgcgagatttcgtatcaaagaatatagcaaagatgaactgcaccaatatgggttccatgagtttgccggtcatgtttagcaatgacatgggccacatggcccatctctcacccggaacaagaacaaattcaaccaagtatcacaggagagaagggcagcaatcttgttcttgtcatcagctgggatcaaggaagaagagggcattgtgctcaaatgcttggaatattgggaatggaattgccacgataatgtctataggtgagtacacttgtctgaataatctttcactttagttgattgtttgcatcaatcagacatgattctccacatgagattgtgaacaataatcaacgcctaaactccgccaacttcttggttcatcttgtgctgtcagattagtattttttcctcttgcgactaaacatagctttcagatcagatgcaccgacagactgataacatgtgctttgtgcaaccattatgcaataatttaagtgcaaattgacagctgagcaagcgaggcgaggatgccatgtctgaacttcaaagcagctcaaccggggtacagtacttgcttgcaatgcaaacctgaaaagcatcgtaaaatcgaaattaattcttaatggcgaaagatcagtagcaacaaacacaatgaaaatacagaaacttctcaaaaattaagcgatcagttatgcagggatcaccgaaccgaggagcaagcaggaagatgcttcggagaaacaaaccactgcatcttcagagttcagagaacaagagatgaccagctctgttgcctcctgatcgaactgtgtggtttcgttgaattcggggagaccgatttgagagtggcgtgctgtccttctctctgaaataccttaacgaactttttaattctcatgagatgtcgtaagacattgacagtatttccaaattaacgcctaatgtttcaattccaggacccagattcagatcacaaatccaaccacaatacaccaatctgaattcgactttacttgctttttcttcaaaaacaaccagcttataatcatgattagaaacagaaagagagttaattacacagacggccacacgaggcacgcagcccaatgacacgctgtcagcaacagacttgcaacagcttgcgccgttccgtccgtctgcgatcacgacgccgacggtgccggcgcccgcagccaaaagttagacggcgacggtaacggccgtcaccgtcccccgcccgccacgtgtccgggatccaccctaacgccgtcacggccgcggcacatcccggaacattccgtcacggcgtgtgggcgacgggacggaatcccgcggcgccctataagaaacccgcgcttgcattttcctcgcacacacacaacgctcgcactcctctcctctcatctgacatatctcctcccgtcctttcgaagcctctcgaatcgcatcgccgagccggatggcggtcaccgccgacgtgaagctcgagggcctccgcgccgccaccgacaagctcgaccagatcaggtgcgagttcatcccactccacttccactggatctacccgcgcgatcgtttcgtccccattttttttgtgctgattttttctgtgtgtgtgttttttttgctgttgtttttgttgcagcgagaacgagaagtccgggttcatcagcctcgtttcgcgctacctcaggtgagatcccgtagtgtttgcttcgattgatttgctgcttccgcggtgggttttgatggtgatggtggtggtggtttttgcagcggcgaggcggagcagatcgagtggagtaagatccagaccccgaccgacgaggtggtggttccctacgacacgctctcggctgctcccgaaggtactagcgtctcgttgtgaattgggtgatctgagatgctcgtgtggtggttttttccgaaccgatccgaggttcagtgactgtgtgtgaacactgatcatgtggtgatgtgtggatgtggtgcagatctcaacgagacgaagaagctgctcgacaaactcgtcgtgctcaagctcaatggaggcctcgggacgaccatgggctgcactggtcccaagtgagcacaattccatcccatcctgtttagaacttccagttggattgattagatcgtatatggccgtcatgctattcatagccagtataaactaagtcttacaaagcaaactagattttctcctgcttgtggcgtttacaatgatactatagtatggttgcctgctttgagtgatgttgatattgtactttgttaatttggtaactataaggcttgctcacgcatatgcaccaatttgccaaaaccatttcaaagttgttcagtgtgtttgatcagatcgtgggaaagtgtgaattatgtgttggttttaatgccacttgcccctttttaaattctacatgttattatattatatgtatgctcttctgtctatgtctcttagtggagttctcaatgttaacgatatggaaggactcaatattgtaaaattcttgttgttgctttcaagagctcttgcttttctgtgttgcagctccaaaaaatagtgtatagagtcctctgcgtttaatgtacaggcactaataatggagcaaatttatatttgctaggcatgctcattctcattgcaacatgccaacatcctcaatatgttgatacaaacatgcaattcagtgaaattgtttctctgatcagtctgttatgtcttatggttctctcttttctttgttttagatccacaattaccatcgtagttcagggcaccatatagcttacaaggatatgcattatctgcttgctgtgtggactgatctattgagtcatctatggcatattaatttttaaaggagctgatagcaacaagcattaaggctattgatgatgtcattgctgtgtgattttgtttgccccagtttgctgttactgaacttctgtgagcttgcaccctgttgcacatgaatctagtacatatgttgcaacttaccgcattgggatgatttgaatcttatattttctgctctactttgagttttttactgtttgcaagcggttaacatatctcactgtgcccctcaggtctgtcattgaagtccgcaatggctttacgtttctagaccttattgtgattcaaattgaggtacacttattttaactgacgagtttttgttgacaaatggaaatcatatgttatataacacatgccttacaagttttacctctgtgcagtccctgaacaagaagtatggatgcaatgtccctttgcttctaatgaactcattcaacactcatgatgacacacagaaggttgttatttctcttcaattttttttagatgtactaggattttagtatttgggccaacttgcatgctaacggctttttattttttctgaagattgttgagaagtactccaactccaacattgaaattcacactttcaaccaggtatagagctgcttctgtgctatgtttctgatttgtcgcatttttgcaccatggtgattgttaattaacataatcgtgtttcatgcagagccaatatcctcgcattgttactgaagacttcttgccacttccaagcaaggggaagactggcaaggatggctggttagtattctcagattattccaaaatggctttggtttatacatttgactataaccacttatagtagcagatcaaacctccctaaatctgaataaccagtttttgaatgtgcaggtatcccccaggccatggtgatgtgttcccctccttgaataacagtggaaaacttgataccttgttggcacaggttagctaaagtgctttgacctttcatgttggcattgttgttagcatcactacttgattcaaattggttgtaaacatgcgcacatagtcatgcaccacactccaaagatacagacactgagctgtgtgatgtgtgcttatgcttattcatcacacggacagcttctttgccatttcacgtttggtgaaactgcattaatcttgttgcttgagaaaattagaggaataaaaacatgttttccaaagaaatagtaaccaaactatgacatcaccttttggggctaacaatcataaaaaatgaatgcaatactatgactaaaaatatgtgagttctttattgcatattgatactcgtgtgcttacctattttcccattcttctcagggcaaggagtatgtctttgtcgcgaactcggacaacttgggtgctattgttgacatcagtatcctaatatgaagaccaaaatcacatgttttttcccatgtttttatcacttattaatgcacttcatcttccatcagagtttgaatccttaaccatcacagagatcttaaaccacctgatccataaccagaacgagtactgtatggaggtatgcagcaatagttactatactattgttattgaatatgcacaacatgaaaattaactcctgtatttattccaggttactcctaaaacattggctgatgttaaaggtggtaccctcatctcttacgaagggagagttcaggtacttgtttgttctcaacttggtgtcataatttaattgtctgctaagaattgtatccagaaattactatgtaactagcaaaatgcaatgttaaaattgaaacaaaccactctattatcttgttcctattattttcagttagtgtctgttcctgttaattccagtcatatatatcactaagctttgaatggtatcatgtattttttttgtgtgcagctgttggagattgctcaagtccctgatgagcatgtatgtaccctccactatatcgttttatttggattaatgagcggcaagtgctgatgattatttttcttgtcttcttttttcccaggtgaatgaattcaagtcaattgagaagttcaagatcttcaataccaacaacctgtaaggaagttatgctgtctgtctatctgtctttgattaggaatttctcgcttgctaacagcttctggtaacaggtgggtgaacttgaaggccatcaagaggctggtagaagctgaagcacttaagatggaaatcattcctaaccctaaggtatgccatctatggttctgcgtgtatctgccccgttctattctgtccattggcatttaccaaagcagttggtattcacaggaagttgatggtgtgaaagttctgcaactcgaaactgcagctggagcagccattcgggtatttaactcttctagaaacatgatgggttgctgctccatttttgtatcatttaaatgctgtgctctaacacctttgctttatctagttctttgaaaaagcaattggcattaatgttccccgctcgagatttctgccagtcaaggctacatctgatttgttgcttgtacaggtatatctaaattcctcaccatgcttttgttgatttgatgtcatgattcagctgtgctaagctcattttcgtcctccagtctgatttgtacaccttggtcgatggctttgtcatccgcaacccagccagaacaaacccatcaaacccttcgattgagcttggacctgagttcaagaaggtaaatcagtttgtattcgaaacttttaaggcagcattaactagaaaagaaaagcaaatcaggaaagcagtgactagtgaaagctgagttgtgatcataactttcctgttctggatgactataggttgccaatttcctggcccggtttaagtcaatccccagcattgtcgagcttgacaccttgaaggtctctggtgatgtctggttcggctctggagttacactcaaggtaaacctactctagtgatttgatgacacttcttgagatactgtgacgctaataaaaacatgctg

SEQ ID NO: 22656 - DNA, 13574 bp, Oryza sativa
ccgccaagtcagggaagttggagatcccagatggagccgtgcttgagaacaaggtaacatacccatacctcttaaataaacctgactttcgcaactgcttagctcccctttgtgaattgtgatgctcgacctgacaaagtgtccattggataactttcaggacatcaacggtccggaggatctttgaggctgctcacggaaaccttccagatatatttagctgagcgttttgtaattgtcgtgtgcattcggcagccagggctcgatgatcccattacagaataattgtaatcatcttggcacatccgtacttctgttttttggtgtgccaagggcgttgtatttcatttacttaaatgatctcgtaataccatagttttgcatgcactgtagctgggagctcgtagtttactggtaattctattcagagtttactactgattgccacttcgtcagcttggcagtcgatgtgcgacgagtcgcacattacgacacggcctattgcgcggttgagctgaaattcgcaatcgcaatctaaccatactagtcagtctgccagcgaccatggtttccttgtcgcctgagcaggctggcagctgctcgtgctttcctctgcctgatgctacatgcctagtccatccgtagttctgtgtgattcagaaggatatgagattgcataattctacataaatatcttgatactttgtgaatgatacttccgtgagattcagaagggcacagaacgcataatgattcagaagggcacagaacgcacaattctgcatcagtttgatgatttgatatttcatttcattcttgggcacccacggaatggaaatatggagtgaaaccgagagacgctcagaacgaacggtcatctgagcggtcgagcagcaggcagaatggcaagagagtatagtaacatgttgcaggaaatactcgctttgcaactggaataaaccatccacatcgcgcaggatcactcaatccaagctgtgaaattcccagcatatgccacgttacaacctctggtccttccacaaaaattgaaaaagaaaaaaaaagcaacatctctagaaggctaaaataaacacttcaagaaaccgaacatttacaattccagcgcctagaatctattccagtgtggcgagatgccatgcaaggcttgaacagagattcgacactcagacaacagttccaaatccatgaccgatgcgatcgctgtgttgattatgactgctgtatatcccgaaattaatctcatcatgcaacatgattagtcaccagacttctcaagttcacacagccaagtggttgtcaatatcaaaactgcgaagatctgaagcaccagttcctatcctgaaacatagtaacacaagttggattttaggtacaatcgagatgccatgagattgcttccgttgtagaactccaagcatgcaagataatccattttctgctaattactaacacacacacacacacaaaaaaaaaacagaaatgatctgatagcagttcataacataatggccagttggctacgagactacaactaaattattgcatgcttgaagagatggcaggtaaatcaactaaagcaagattctgagtttagcaaacttgcaagttgcaatagccatcaggattgtcagacatggtaatgacaagtgggtagtggtcgtaccttttgtttatagtgcagtagtggaatttgatatttccggacttgacatcttcaagatactgcaacaaccaaaattcatctcatgagcttgtggtgccaaaatcagaagaagacaaaaaaaaatgaagaatgaacagaaagatttgagtatgggaaggcgggtttaccatcctcaaggtgacaatgatcgaagaaaatgctagagaatcaaatggtatgtcatccaaggcaaaaagtgcacattctagcgattcaggtccaggtgagaagttgggggtcttcaatcttgctcggaaaataatgtaactctactgcatgtcatcataacaaacaagatcaacttagtagagtattgagctatcatggagactctgacaatgctaatttcactcacttggccaatcagtggaatatccaactgagcaaaaggtgaaagtatctctacatctgcacaagcttcctccaatgtttcccgggaggctccttccgctgcagactctccaacctccaaataaccagcaggaagagtcctgttgatgcaaccttgattaggattatggaccaaacaacaagcaccaaaattgactgggaatgactgcctatgctttacaaatgactgggaagagacaaaagcaatctcaacattgttgcattagaaaaataggaaaaaggaacaccgttttacatactagaatcatatcagtcaccagtcgatgtgctaaacataaaaaagaagtgtatttaaactggattggcaagagtgaaacaaaaactaacactataatgtaaagaactgtacagttttaaactgaattggatacagcgtgcatgtactaaattgattttgattattatattcatactcaaaataaagcttgtacagtaaaattggagcatggtaagactgctagttctctagtatagtagtatcacaacaccagtaaagtagaaccgtttaagaaaatgcatggagttgataaaagtagcttaccaaaggccataagctggttcgatctttcttctgcaaaggagtactttgttatcatgttccacaagacagccaacaacctatcaatatgacataggttaatggcaaaatggaagacgaaagccaagtcatactattaaacatatatacgccttcaacaaagatatatgtgtgtagtaaaaaaaacagagcagatatgcacagaagaactccgaaggagctggaactctatttgaatcaagcaagttacagtggctaaattctcaagtctaaatgcatatgcatcttcgaagatggtctttggtcctaaatttcgttctacagttcgtaccattttggggttctcatagtgaactcttccacaagaagagcagacagccctcatcttttcatctccatctggaatagccagtttcgtcgggcttccacaagatgggcaaaagcgtatctttgacttgggcacctgtagaagggaaacttaggtgagatcaaatgtgtatgtaacaacatgacaacttaacacttaaatcagtacaataactggaaatcgatacaacgatgccatccagtgttacatttattatgataaaacactagctgaataaccaagcaaagagccaggctaagcacaaaaggccaatttccaacaccaatagtgcagaaggcacagtgccaacatcgttttgaccttatacacagctaattagagctggcacaggaataggatttccgagtggattggttagctgatcaattgcactctttgttgcttcccactactgtgcacccgtaccgtaaaatgttcaatctaaataaagtcatcagtattcctggttgctttataaaaagaattgcacaaggtagatgcatgattcaatcagagaacactgcaattctacaaattgtttgcagaggatgcgattatagaggctcagtaagcgctcctcgctaggcaattggtaaaggtaattaggtcactggattagagtcaacgccctaggtgaccacgcacagcagcaaaattctgggtgcggcacccgcccaagcaatcccaatctcactccctcagcccgatgactgcagcgcggacacgagatagagcgcgcgggggctcaccacggggggaggcggcgagggggcgggggagctggcgttggaggaggaggccgacgacatgcgtggcgggcggagcctactggccgcggaggcggcgcgggggagcggcggcgggtggcggaggaggaggcggtggaggcgcggggagaggcgggcggcgtggtggtggcggtggaggaggaggtggtgggatctgacgaggagcatggcgatggtggattttagtagtaggcgagaggaggggagggttggtgggcggagcggaggagaggaggagagatggaatggcgaggacggcgtccgtccgggcccgggtcaggtcggcgaggtgggggccccggggggtgaggtaggtcggtcggtcgacacgcatcgcgtcgccgccaatggggtcgacacggagaaaactatggtcggcctgacgtggcaggtttatcaatggttttttttaagagcaagtttaaaaggacagtctactactggctccaaatcatctataaccaatattatagccaattcatataatagttgcttactatactattaatacttggtcccacctgtcatacacacattatgtcttggagtccatactgcagctggctacagatatgtagcccgctgcttttctctcttttttttatctctttaaaatatgtttatagctggctcatagcctgctattgtacttacactaagaaaggacttctttagttcccaaaacaaaatcaatgacacagtttacgtgtaaattgcgagacaaatcttttaagcctaattgcgccatgatttgataatgtagtgctacagtaaacatttgctaatgacgaattaattgggtttaataaattcatctcgcagttttctggcggaatctatatttttttgttattatactacgtttaatacttgaaatatgtgtctgtatatccgatatgataatcaaacctaatttttttcctaactaaaacaacatgcgattaccgaaagaatctttgaatcgggcagccgatcttaaaaaaaaatcgatcggtcaaatgttgcaattgaccactggtgaaacattgagttatatatggtgaaaaaaaatcacggaaacatttaacttggacttgtgaaggggtagaaacattatatcgcgtgcgtggctaggtcaataacaatcaaagcggacagaaaacgatcaagaattaatggaagtgttaaaatgggagggaggtgaactttagatgctattaaagtgaacttttgatgctataaccaattttgcctaaattttacggcatagctaaaaaccagagagactaaagaattagaaaacttacaaattcaactataatatattagtaatataactacatcttcactcataattatattaccacacgtaatagtaatatataaataaaatataattacattgtaacttagaaaaatattatcacatgcaattgtaatataaaaaaataattacattgtaacctaggaaaaaatggtatcgctatgcgttgctactttttctctctccaactgacgtcatctcagatctaatctaatctaaaagtggaaaattagtaagttttgctctctgatttctgtcgacggaaatttagctgttccgcatgttatagtcgagtgtaaaaaacgtacctaactaaacgggtggcattagaaaaaaaaactaatataaaaaaattagaggaggtgacttcaggtgccggggctttcatcaaacaggtggcattggcaacggtggccgcgacgtcacctcccggaagatggccagtgacttggcgagggcgtcgtgtgccctcgcgcgctcccggagatggtacaaggccttgtacgccattatcagcacgaggaaggccacggcgacacacatcacgaccctgtcgctggtgctgcagtcgcagacgagatgtggtagaacgacgaggaggacgaagacggcggcggccgccgcccccacgccggcgacgtgaacctgaggacgaattcagcgtcgatcatgtcgcgtaccagcgcgtccgcgtcgtcttccgacatgcccgacgccaccagcggcaggtacttctccatgtacgccctctcgagcttgctgtcgtccagcaagcccagcggcgccgccgcctccagcaaggccagcagcgccgccgtcgccgccgcgctcgtcacggcgcccgacgccaccatctcgttgtggcgcgccgcgcaccagtctctcctcttgaggaagtggctttgcgggccttgcggcagccatccgacgtgcaagtacttccagacgtcgtcgttgctgctggccgcgtttttcggtggcgccgccgtgttcatcatggccgaccggtttgatgcgctctttctttttagaaaaagaagaaaaatcacggcacgaaaccaccagcaagtgccggtctggctggctggaatcctgcatcgtatccggattttatttcgtcgttgtaccgatccgattcggatctgtattgtatctgcatcgtatctggattttgtttctgtattgttttttgggtttttttatacataatttatattgttgattgatatataccacctttttgttatgagtgatggttattcaagatgcatggtgaaatcaattaatcaatcaaaaggcggtcctcccgtgcggacgcacgcattatggtcaaagataatccttaatttgaaccgatcggttcgttacttaagaggctaatcagtaacggaattatctccggatccgaaactaattatcaggccgaccggatttgggttttcgctgaataaaaagcaaacgacgacgcagagaatcagagaaagaaaaaacgaagaagaagaagaagaagagcggccatgagcgacctagcggcggagaggcggtacaaggaggagcaccggaagctgatggcgtacgggatggcggacgggtgggcgtacgggatggcggacgggtgggcgcgcgacctgatggacaaggcgaccgaggctcggtggagggtggacctggggtcgtcggtgtgggtgatcctgctctgcgtcgccgcctgcctggcgctcggcgtcggcttcccgctcgtcgacttcctcgtgctgcccagctccgagaacgccggcaggatcatgctgctcgtgtgggcgctcatcggcgccctgatcatggcgtactacgcctggagccattaccggaagcgcgcggcggcgcaggacgtcctcgccaaggcgcaggacgtcttcaaccaggctggggtgtcgtggccactcccagtttattgttttaagaaacccagtacaaacttataccccgacaatatgggtccaatcacaatcagattaactgtaccctctgtagacacctacaatacgagtacagtcacctcctatgtagccaccgacaatacgagtacaatcacctcctctacaattgtacacccgcacaccctcccactttagcatatgttgttcacccagtttgttattctttgtacagtggaaggacatgtcacatagacgttgtagtgacttaactagcacacccaagatagttcaaatcttcatatgagcaaaaattcataatctaaaaaggccgtatatatcgggttggatgtagatgccgggtaaaaaatacccttttctaaagaaaaactatactatgtactaatattacttttggggaatttgctaaaattatggtgtcatttttcttacgtaatttcattcatttttttcctatgtgattgcgttgccaaaaattatgtatttgtgtacttttagggctctaagatttttttcatatgaggtattcctccatccttggaggggcatatacctccctattattttagtgatacaaattaaaaaaaatgaaaatcttagagccctaaaaccacacaaatacacaatttttggtagcgcaatcacatatgaaaaaaatgaatgaaattatgtaagaaaaatggcatgataatcttaacagattccccaaatactacccaaatactattttttttcctatgtgatagcgctgccaaaaaaactctgtactaatattacttttattcagtttttttatttctctcaaatcagtccaatggttaaaaatttgtaagatattagtagaagttttctatcaaatgaggagtagacagtcacagtcccaattaattaacgttgcctgcacaaaccaaacacgacatatcacaccgcctcatttttacggcttagtgagggagatgacgattcatcctttgagaacaaaatcactcgtaatcttacatatcatgtaaataatatttttttaacaaataataataaacagtaatataagaaatatcactccacgaatatgcgaggtaaaattctgagttctataagttataacaaaatgaacaaaactaaaccacgggaagttaaattttaagttgcatgctgtggagtgtggagtgccaattactatagagatgaacccaatccagaatatgaaccgtaaaagaaaacacctattaaaccaatcacagcaataccggttacagtacctatcagccaaagaggaattcttccagtagtatcggccatttcccctactttcctccacattttatcaagtggtcatgctagagacaaaaacagtcatggatagttataaggatggtatccttccaaatggggataagagaattcttactactctctttctttctctcaattgaagaagtaattggaaaataaaacagcaagtacaaaaatgagtaataaaccccagtatagactggtacgattcaattcaacattttgttcattcgggtttgattgtgtcatagttctatagttggaatttggtttatcgttggatgaactgcattgctgatattgatcccaagaaaaaaacagtaggtacagctagtccgtgaacagccagccatcgcactgtaaaaataggataggttcgatctatggtcattgagggcctcctaaaaggatctactaaattcatcgagttgttctaaagaatcaaaacggtcggttattaacggaattccttgtcggatatactttatatttatctaccttatcattttatttccaaacgttttaataaccacttaggtgacataaaaataaaaatgaggggatttcacttttcactcgttgagagcgaagctagccatcggccccaccaaaaaaaaaaatccacaatacgcgcggcggcttctttcctctttcgctccccacacccttcttttgtcgcgctgatccccagacgccggcggctactgcgtttgcgatgcccgccgccgccgccgccgccgcgccgcccaatcccaacgttctgcagctagccccacgcctccgaggcctcgtctccttcccctcctcatactcctcctcatcgccgttctccaaccgcctccgcctccgcctcccccgcgccgcctccatgtccgccgaggcgcgggtgcccgtggcgccgccggcccaccccacctacgacctcaaggccgtcatcaacctcgccctatccgaggacgccggcgaccgaggtacgcaacgtagatagcagtcgtgtatgccgtgacaccacaagcaaatcctgttcctgtagtggtgtagtgtagtgtaggcacaattaagtactaacatttgttttttggtattcatttctggtctgtaagatcactttgttaaggctctctttgtttaggcttataagccaacttataagctgaaaagtctaagcctaaacaaacaagcggcttattcatttgacttttctaaagttataagccactctaacattattaaaccaaaaactaggttggagaagttttttttgacctatttgagatagatgtatgactccaccactaaatttagcacattaaatccaccagcttataaaccataaaagccaataagctgacttaaaagtctaaactaataagcctaagcttaaacaaagagggcctaagtttcgcggtggtctgtaaattgcaatcccatatatgcaatcaatttgtttggggtacatttatatctgttgttttttctcttcagttctttaacagttactagcatagtcatgaacgtagacactgcggttgtattagcaaaataagtttatcatcattggagattcctacaaatatgattaactctattggagctaaaggaacatattcaggtgggctgctctgctttagccctctgtagtctcctaaatagtactagtaacaatctagtatggtaatgctacttaagttcttctatctttgacattgaactattgctgtgctttgaacttatttgcagttctcatctttcagtatgagtctgacactcttggcatcatatttacaccttcaggggatgtatcttgcttggcaaccataccttctgacgtgaaagctgaagccacctttattgcaaaggaggatggtgttgtcgctggaataagcctagcagatatgatatttaagcaagttgatccatcattgaaggtatatcagcttcatagtttcattttgctgtttggcagggcatgattctgcacatttcatatatggcattgataataccattttgggggccattttacaggttgaatggtttgaaagtgatggaaattatgtccataagggattgcaatttgggagagtatatggtattctgcctaaaacaacttattgtatttggtagtgcctaagttcttgaattgtgttaacctggtaggtctaacacacttttcacattttcatcatttgtatttaggttgtgctcgcaacattattgttgctgaaagagttgtgctcaatttcatgcaaagaatgagtggaattgctacaatgacaaaggtgattggtgaccttagttgatagctaagatgttcgtctttttcgcagatgaagtgaaacataggcaactgtttatggactttggacatgtttcactattcaaacagccactctagttgctccttacatattttcctgataggtacatgcataccactttccagatttgatgataatcagccaaggctgattctcccgatctgatttttcagtaaaccactttgatgtcttgcttttcccagatcaagtatgattaaacctggtgggctgtgtacatatgatttggatgtaaaagctgggttttaatctatgttctaaaaattaatataattataccctgttgtgtgttatgtgagaatgaatttcatgcaacatacttttttattacattcaggccatggccgacgctgctcatccagcatgcatactggaaacaaggaaaacagctccaggtttacgcctcgttgacaagtgggcagtaagatacctgtctctctttttttttttgccactttaacacttgtggcttatttttcattccttctgttgcaactttaatcgtgcttgtacaagcataggtactaattggtggtggaaagaatcacagaattggcttatttgatatggttatgataaaggataatcatatttctgttgctgggggcataacaaatgcaatgaaatttgttgatcgattcttggcgaaggaaaagcttgcacttcctgttgaggtatcatctagtgattacatatatcacatctaaacgatgcacttatgtttgcatgtgattctgttttagctttacatttttctctccaggctctttagttagaaatgtgcttacgttcttgtttaaaaaaaaaaagctaaaatgagaatgtgcatatgttgacagtgattacattttatgaatcaggttgagacaagaacacttcaggaagtaaaagatttattggagtatgctgctgagaacaatacctctttaactcgtataatgttggataatatggttgtccctcttggtaacggtgatattgatgtatcaatgctcaaggatgccgtggagttgataaatggtagatttgagactgaggtgtggcaggtttaactttgcaaagcatacatttcctgcagtgttatttacataacatgggtgggggaagtgacaatttacttttattgatccttataatctgatgatgtcttgaactgctgttattattctatattgcttatttatactcattattaacttggggaatttagggtaaatatgatgtaacggtagactgcagggcttattgcatagtgaattcccttgtttaactgacgaattacaatgaaatgtgactgttgcttcaggcatctggaaatgtgactattgacacagtgaagaaaattggagaaacgggggttacctatatttcaaggtatcggcatcttgtttctattaactgctactaattatttccatttgtcaactgatatcatgtgcactgccttctgtttgagttgagatatgtttgcttttcagagcaattttgtaatacgactttaattgccagctctttgtttttgtttgctgttttactgtagaagaacaacctgatatcttgaacttccaaatcatttatttcaacaatttcttgattttcttttcagtggagcattaacacattctgtaaaggcacttgatatatctcttaagatagacactgaactcgctctccaagttggaaggcgcacaaatcgcgcctgactctacagaactaatgtaaccttgcaagatctgcaggtacgtttagttccccatatacaacttgacctttattttcctgcttctctaagctaactctttggagccatcagggtgtttctgtggcgtggcttgccagtctatcaatccatgcccttctcatcaacttgtaagcgttgagtgtacaacaaagaatgtgttttcccatatttatgggatataaaccaacaccacataatacagcaaaataataacattaccttgtaggcttgcctaccgtcctagcatttgtatttggtagaaaaaaaactgcagattgcggcaagttatcgaattttactcaggtattaataagactttttgcaccatgaaaaattagcaagctggacactgtaaatgggatgtgcgcggcattgaacttgcagttctgcacttgtgtttgaccaaacaaacactataaaatggtgatgtttgtgatctacaaaagaaaaggaagtctaacacagcagtgcattctttttcagattccatgtactcgtattgaattcatgttctcaattatagtatactagtatcattcaaccgtcttgtctgcgtactcgctcaagggggaaaaatatataaggtcaacttttttttccattaacaacagcattctgtggtccttctggacacatgttaacctatcgctacttttaccgcatccataactcttcatgatttaacccttctgaagattgcatccacaaacaagccttgcctgcagcgagacattcagaatgttttgctcacagagttattaccaccatcattatgttctatgcagctatcaagagggataaggggaaaaagaaaaaactttatatccgaaaatgcataaccatggtggtgtagcccactggttttgtcaatttgctacgtcacgctccccggaatcgacaagtgaattaatcaaaatcaaatcaactggagaaggtggctgtgtacgcctgtaataagtggggctgcggctggagtagccgctagtcggatccgttggttcaaccagcgcgattacgcgagcttgaaagttgaagccccagtgcggtcgcactcatgcgctcagcgctcgtagatgagtccgaaatgatatcattcgtacaggaacgattttaagttggcaagcactttttttt

SEQ ID NO: 22657 - DNA, 2440 bp, Oryza sativa
aattgagacattcaaattttatatataactaaaaaatttaaaacgattggaaaccatacttaggttgtgttggttgggagtgggttgggaatgaatcctcttgtacgtaaaacggaacaactcattattgcaggatcaattaagtattaattaaaaaattctgaaaataaatcaatatgaatttttaaagcgattttcatataatttttttttaaaaaaaacagcatcgtttagcagtggctctgtttctgtggtaagatttagtatagcatttggttacactttataacttccatcctactacccttttcctatgcggttgggtcaactcatttcgggccaaaacccaaggcctcaccgaatgcgttttgccgccatgggatgggaccgtgtcaccacgggtgttcggttcgttcgggtgtgttcttgcttgcagggtctcgagatgtgagaaagaaatcaagaatcttcgtggctaaacacaaagggggcagcagagctgcttaaagagacagaggagaggaatattcaaaggtttttcctttaaatgaaaaaataaagagagaaattccgatagcacacaaaagagatcatactacagtagcaaggaagggtcctagatcggtcagagctttcagcatcttcctcaaaaccacgctttcccagatgctatattctcctcctctctatagagctaagcaacgaaggctagctactagccatggagtttatggtatgtttggagtagcttctggtaactatatcttcttctacaatgtccagctgccatgaactttctcaaacaattcaaatattcactcagattcaaaatctatagttgtagaatataaacaataaactagaagctaaaagtttttattagcttctctaaattttcaccatctaatttctctttagctgcttcacgtaatcttaatttctctttatctgcttcacataattttaagctttccgaaaaagtttctcttctcctcggagtctcccacagcccaaacccagcaacgcgaaatgccaaatgcttcccatctcgcaagctgccaaccctgcagcagtgcagctgcacgtctgcgcggcacaattcggcacagaaatggagctatccgggacagggcctgaccaaccgaacggcattaaacaccatcacttgtagttgtagtacaggagtcggtctctcttccacgcaagagagatttcgatttctcaattcaattcaacaagtaccaaacacacaaacgcgagaacgccgaggaacaaagaggagggattcttttgattggcttctgtcaccggttttgctcatctcctacctatcaccaactaaaacattttcttaggtgcccacagaacagcaatgaacaaactaaacaaacactttggatttgaaattcatagcatacaccgagcaggttactgaatatcttttggtactaacatcatactctaagataatagtctatctatctaggagactaggagagtagttgatgagggatctacaggagcagaagaagaacacccacatcttgtgttcttgcctgcctacccaatttcatcatcatcatcatccattggctgatttgattctacaagaagaaatggaaccgaactagtactacaaagagatgatcaagctgctgctaaacaagtaataacaaaaatcaagattaaaccacaggaaggatgcaaagaagaagagtaatttctaagctaaagctgcttctgcctactcttcacatcaacatctgcacaggggaaacccggaaacctatgtacagttgagtagtacaagcccttgtctgcttcacgctttcatggcgtccgccgccgtgtcaccgtcgtcgtctccgactccggcgaggtcggcgccggcgacgctctcggagagcaccgtctcctcggcgacgacgccggcagcgtccaccacgcagccgtcgcggtggcggtcgcggcagagggtttccacggcgaggaggcggcggcggaggtcgtccatgtcgcgctccatcaggaacagccgctcgcgcagggtcaggttctcctcctccagccgcgcggtgcgggcctcgtcgccgtcgtcgtcgtcttcgtcgtcctcgcagtcgccggccgcgacggggagctgcaccatctcgaagcggctgaggtcgtggtcgaggcggcgctccacctcgacgtgctcctccacgtcgctctcgccggatccggagtcctcgccggggaggccaccggcgtcggcggcctgggagcggaggcggatgaggcccttcatggagccgtacccgtcgacgccccacttctccttggccatctccaccaccacctcgcgcgccggcgacagctgcggcgtcggcagcacggccggcgtgacggggcacggcgacaccagcgacgccacgccccccgcccgcttggcccggat

SEQ ID NO: 22658 - DNA, 45140 bp, Oryza sativa
  unsure (1)..(45140): unsure at all n locations
gccgccttccgctgcttccaccccggctgcctcgccacccgcttccacgccggcctcaccggcttcaccccgacgaacaccaccggcaactccatcaccggcggcggcggcggcggccacatctggtactgcagcggcggctgctgcgccggtggccgcatcatggggtcattcatggatggatttggggactaatcgtccagatccgaaaccctaaccctagattaacacccaaaaaaaacaatccaacaaaaaccacacgattagctccccaaaacgggatcgatcgaagccgtctcgtgttaagctctcttcgaatccgttcgcttcgtgtgtgtttttatgagattaatttacgaattttgttcgatccgatttgggggagaaaagcgaagcgagagaggaagagagagagagagcgaggagagaaggtgtggggtgggaaggggtacgagggtatttattggggaggtgggtaagggatggacggctggattggcggtttcggatacggacggtggagatctcctggcgccggttgcgtgtctcggatggacagcacggattgtaccgccattggacgcctctggttgtgatctggatgcgaactggcggttttctgttttttcttactttcttctcgtccataaaaaaatgtctactgtgagatgaattgcaatgctcatttgttagtaacatagtaggagtatgtgttactacgaaactaatgatattagaactaataatagggtttatcttggataaatcccaccagaaattaatttcgctagcatgactcaatcgggatgtttattaatattaatgttaacataaaaggtttactgatttttgcaggtgctagatttatgtagaaatgtcggtcatatcctactaaaaacttgcataaattttgcttcatatagggagtaagtgcctccaactacaataattgttttctttcagagttataccaataacgaataaaagaagaatgttttccgaagatatgtaaagttatattcggatgtatcaattcttaacttacttcctcgtttttcacatgcgcatttcccaaactgcttacatggcgcttttttatgaaaaaaagttctatagggaagttattttttttaaaaatgatactaatcagttttcaagtttattttagctaattattaattgatcatgtgctaatggattgctctattttacgctgaggaggttgagttcccaacctcaacctcctaacacagcctattatcaattaatactacacgtgtggttgcgctttagtaagaattcaacaagggcatggatttttaccattgagcgtatattaatagatacacactcacaaacgtgtgatttacgtgcatggcatgtatttttcacacaatctaaaaaaacatcacatatgcgtgtacacaccacctatggctatagcttagattacgagacgcatgtaaaacaaagcttcttaaacaagctaatagtttatacagggtgtcatttgacatactttaacaaagaaaaaggaacttaaaatcaatgtccatagccctttaaaaaaacctacggcgtttctacaaatatcttttgaaaagcttcatgtcctctccttttatttctgctactatcagctctgttttgtccgtaagatgttacctttgctcttaccgacaacaaggaggaaaagaaaagaacatctaggtgtgtttagaaacttgcgatacaattaatataccaaattccatcatatctcaccgaaatagaaacacgaaaataagaggaagcataacacgtaggtgcacatgacttggctctctttttgacccaaaaccaacaaaaataaaagcacaacatattaacgattcaagcacacgcgtttgtcaccggtcaaagcaacgaatccttggacgcccccctcccaccgatgagccacgccacggtagcttccgctcgtcgtcccggtctctcaccccgcgcaggccgccgccaccaccaccgactcgctcggtgcacgcgccccacgtccaccggtgctcgcggatgcagtaccctgtctctgtgtgtgtacgtaattttttttattttatctattcaaatattttaaaaaacaatattttcaaagtattacatgtatatatatacactcctcttaaagaatgtcatcttagagaatattttacttatgacatggcacgtaaccattgcacgtatgctaacggctacgtgaaggagaactgactattttgtagacaacctccttaccattctactagagttaggctgcacgactgttataacgcgtgcaatgtcataaacaaatatacaatcctcccaacaacggccattaggggtagatctgcaatactttttgaaaaacaattactttctaaatattttagtaaataaaaattaaaaaaaatctgtatgtacgccttcacgctgggccgcaagcagcgcggtcacggcccaaagcggaagaaaggcaacaaagctgcgaacagctggcccattagtgaagttgggccttggatccgagcggatgaatttttttcggttttagatttttttaaaaaaatatttacagaaataatctatcgcccaaaaaaattacaaaaatagaccctgccgcccacctctggggcggcaagctgacgtggcaaacgggggaggaacgggcggtgacggagggagggttttttgcaggaaaacccttgccgccctctggtggggcggcaaggggcccgaatgcaaaaaagccagtcggggccggctattttgcaggcggccccttgccgccctctggccgggcggcaggcctcgctgcctataaagggcctgctgcccagcccccagccctcattcttctctcctcaattccagtgaaaaaaaaagaagagaggggaggagaagagaagaaggggcgaagccctgccggattcagacgccaatttcaggtaatattcatagatcctatatgtgactattgagttaaatagtgtgtattctttaaaaatttgtttgaataaatgcattatatttttagggttttagttgtactaatctagaagtgcgtattgtaaatatcggtaactacgtagatctgctagtttggaatcaatacattaccgttgcattggcttacacaataagatattatgttgtagatgtttattgcatgaaagagtaatatgatttgataataagatgcttattttctcacaacatttattaactttgcttgctttacatctattctttcctcccaggaaccaccaaggagatgtcaatacagagaatggatagacaccagaagggttctaactccacctagccgtgttgtgtagcttgaactaccagagcaatacagggttactaaagtgcggtttgagagaggagagggatcctcactgacggagcgtggggctcctcaccgggagaccgcgcaggcccccctttgccggttcggccgggggcgctaagtgaggttcttcgccctcgatctgaggaacgtcagcgagagaggaaatgcacaagacacgggcgacgtagacaggttcgggccactgagaagcgtaacaccctactcctgtgttctggtggatctgtgcgtgaaggaatacagagaggcggagagcgagagagagttcaggctctagaaaccattcgccagagtcccaatccccctctcccctaggcctgggcctcctttttatctggttaggggtcaccacatgggcctctcgctgcctaagaagggaaacatgctttttacaatgagggctagtctatagccggaagtgacctctgacaagcagagcacacgcctcctgccccactcgcccgcttttccggtggacgcccatttcaaccttcatttaatggccagcgacttccttgccatacttgcgttgaagcctggaatggatctgaccgggactgacataccaactccaggagttagcacgccggctccggctagggacgagagccaggaagctctcatcattccgacgggacggggcgaggcgtgtgacaggccgcctattgccacctaacccgcgatctgaccggtctgtgaccggtcacacaccgcgaccggtcacggatcggataagcatgcgctgcgccgcattaaatgcggcgtggtgcacttcgtccaacctgctataaatgcggttaggtgagccccgctgtgctcacctaacccacacacgtggcgccaaaaccacagggggtcggggcaccccagccctcggggccgaaacgggagcggcccgacccctcggggagacagagggaggggtggccacgtcaccttcgggcccgacccccccgaggaggtcaggccacgtgggtgaccgcggctacccaagcctctagtcacgatacccccggccccatgtcaccgacactcacgtaggggttagctattattggacaacttggcatattgaaatttctactgtcatgcttccttgtcccattactacatcgtcgttgtgttcaactattgcactacctccctcctagttcgaatctaatatcatctatgtaaccgcaatgcaaatagtcatatcatgttcaaattgtactactatttcttcatgttacataattctccttgtttaagtccatataatgtttctacgacccagactgcgataggcctatataaattatccgagtactaatacgtcgaataaggtacaaaaataatacctcacttaacatatgaaattgcacaacaaccaacttcaatacatttttataacaatattaacaagttttaccaataaatacttctttatttattattaacataacatagaaaaatcttttggccgtactttttttatctgggtgaaggcggcaagggatccagatgaaaaagtacggccgcaagctctttatgggcggccaaaattgcaattagccccttgccgccctctgtatgggcggcaagtgcctaatcgcaattttggccgacggcggcagacggcgcggtcgacccaccgtctgccacgtcagcttgccgcccaccattagggcggcaggggctatttctgcaattttttttggtcgatagattatttctgtaaatattaaaaaaaaatctaaaaactaaaaaaattcccaagcggatcaccccaaaacgggtcctgatcggtgacacctcacgccctttttttatgtttttttttctctctctcgtgtaggctaatcaggggaagccaagagccaggcaaatctcgagcccaacctgctgcacgcaagaacagagaacgagcagcttcggcggggaagaggaatcgaaagagaaggaaattttgatggcggaggaggcgaagccggacacgcagctgttccagctcctctccgacctgctccagcaggtacaagcgccgccgccctctcgatctgttgtcgatttcttgtttttggattaggggtggttcatgatttcgccgacatggatcttcgcttcgtgcggatgttgttacttttgcggatctagtatcacatatcaatctcggttgataccattatttatgtaaacctagttaatttgttttggggatagatgcaacatggcctatggcctgggattcgacctcaacgacatggctgggagagaagcaaaatagcagcatagtgcataggctcagagttgatgtagttaatctctttctggtggattccttgctttatgttactatgcactgcgcgccctgctgtgtaatgtttacgaatctgaaagagtgaaacatgggctattgatttgggtcattgggtgattgaaggtcaatgccaactatcaatctactggtgattggctgggattgattccttctcgttctagcaatcaaacaaaatttcctatctaaatcaagctgatctatatcagcccctgtttcaaaactctgaactctatcaactacacccattgcaacctggaggtgtgaaactctttttcttttattttcatatattcatatttttcaagctatgacaagacaaaacaacaacaatagaatcccttttctttttgctgtatttcccatagaaccacagaatcagcggcatgatcatgtatattagggccaataacctcacttgaaacaactagtgaccattcaccggtatctgaaactcaacagtttaccctatgagtgataggaacaatatacaaaatgctgaatcagtactacaaacttttttttttcatgagtgtagtcttattcttataaactgcatggtaatctgagtgtggaaccatgaaaacattcatagacatgatcacttaactgaacacttacttctcggtgacaagtgaaatgccatacaggattagttcattttagccctctccatgagggttctacttaacattgtatctgcaaggtattgtagtctattggaccttggtacccccatcactgactgtcctgtttgtaggcgtgtctacatttttgcatagcatgtaatgttttgtcattattggggcatctgaatctgtatagttcattgattatagcattggaagtttggatcctcattatatgcaggattgcatgtggttgttactttacattcatttctcgcagttcctcaggatatttctgatttcttactattcaacatcatatctttttgtgatttggataagacgacaattgtcttttgatgcttgactatgatcattgagaaagtaactagtatttgattattcaaatgcaggtggagtcaatgagcaaccaggaagaagtagaattgcgtgctaagatcgaagcactaggactagaagttaccaaggtaccagagcagacacctaagcagcttgatgaggtaactgcaacaacctctgtttaatcccctttccgcgaatttatttacattttctcatctcatttgttttcgttcaacgctatctttagttagagatcgcagcagagctggacaaactatcagcgaggcttgataatgttgacaagatgatatcttctgccatggcctcggatccagaggtgaaatcccttttgagtaccactgctgatatctggatgcccgtcatcaccgcctctgccgatgaaaggcggggatttgcaggaacaagtggtgaaagcaaccaagaagagcaggagagttccaaacaatagcctcctacatgtaccttcacatgagtatttcttgaccatgtatcaacatttgtagacaaaacaagcaataagcacacattcatgagatggtaaataaatctgataacttgtggtggccattttgtacatcaattcttgagtcttcagtttgttatttttcagtttcgattctcaaagttgcgcctgcagagtgcagctgtttgtagctagcaaccacaacatttttatctggaaatgcatcaattttgtgtatgatgttgattggagtctgataacttgtcactggatgacatgattattttgtcttgctcctgctgcatattgttcatctggcgagccacgtcgattgttacataacagccactaattatttctgaaatatttgctcgctgtaatgcaacatagaaaatccaactatccgtttggattaatccataccaagagttcaagagagcagctggagaagaccttcttggcgccaaaccaacggccgcaagaacaccacagaattcaagaagagagaaacctcacaaatcgttcgtctcctcccctcctcaatcccaatcccgccaaaactgtcgccattcatggcgacatggcgccatcagcggcctcccttccctcgccatacacttcgccctcgccacctcctcctcttatctgcttctttctttagcttgctagctactagtactagtaattgtagtggtgagtcgttgccggcgaggtcggagcagcagcagaagcagccatggcggacgacggcaagagcagtaaccagatcctccaggagctcgacgcgctcagccacacgctgtaccaggcgcacaccaaccgccggaccgcgtcgctcgcgctgcctcgctcggcctccgaggtcaatggcggcggcgccgatgtcgtccgggccgagtcgcgcccgcggtcgcggcggctgtccctgtcgccgttccgctcgaggcctaagcaggacaagaacgcgatcgtcgacgacgacgacgacgacgacggcgacgacgatggcgacaagggggcacgccgcgcgccgtccaagagccagagcttcgcggcggtgacgaccccgggcggcgaggcggcggcggtggcgggagagaagaaggggatatggggctggaagccgatccgcgcgctgtcgcacatcggcatgaaccggctcggctgcctcttctccgtcgaggtggtggcggcgcagggcctgccgccgtccatgaacgggctgcgcctcgccgtcgccgtgcgcaagaaggagacgcgcgacggcgccatgcagaccatgccgtcgcgcgtgcagcagggcgccgccgacttcgaggagacgctcttcgtgcgctgccacctctactgcagcggcggcgccggcaccggcaagccgctcaggttcgagccccggccgttcctcctgtcggcggtggccgtggaagcccccgagctcgactttggccggagcgccgtcgacctgagcctcctcgtgaaggagtccacggacaagagccagcaaggggagcgtgtccggcaatgggacatggcgttgccgctcgccgggaaggcgaagggcggcgagctcgtcgtcaaactgtcgttccagatcatggacgacggcggcgtcgggctgttcaaccagaccggagcagcaaccaagattaactcgtcgtcgtcgtcttcttccttgtttgcacggaagcagagcaagctatccttcagcatcacgagcccgaaggtgtcgcggtcggagccgaagctgacgccgacaaagggctcgccgtcgccggacttgcgaggcattgacgacttcaagctcgacgagcccagtttgccatcgctggcagaggccaagcaagagcagaaggagccagagccgccggagccggaggagaaggtcgatgactcggagttcccggagttcgacgtagtggacaaaggagtggaagggcaagaagagaacgtcgttgaagcgaaaggcgcggcggaagaagaagccaaggaggagaaggcggcggcggaggaggcgcccacgtcggccgccggcgacgaggtcgtgaaggaggtggtgcacgacagcgcgcacgcgtggcgcatcaacgagctggaggcgatcaccaaccagatcaaggctctcgagtcaatgatgctcggcgacgcgccggccgccggcaagacggaggatacgcgggacggcgacgcggcggcgctggacaccgacgaggaggaggtgaccagggagttcttgcagctgctggagcaaggagacggcaaggccaccctcgccaagtcggtgtcatcgctcaagtccggcgcgaagcgggacaccggcggcgccgccgacgcgtcggcggcgtgctacatctccgacctcggcaaggggctcggccccatcgtgcagaccagggacggcggctacctggcggcgaccaacccgttcgacatccccgtggagaggaaggagctccccaagctcgccatgcagctgtccaagccggtcatcctccgcgaccagaggctccccggcggcggcgccgagctgttccagcagctgtgcgccggcggctgcgaggccctgttcgagaagctggcggcgctcgtcgggacggacgaggtggtcggcaagacggcggagcagatcgccttcgagggcatggcgacggcgatcatcagcgcgcggagcgcggcgctcggcgcgagctccagcgcggcgcagaccgtgtcgctgcttcggacgatgtcgtcggcgatgagcgacgggcggcaggagaggatcgacaccggcatctggaacgcccacgagacgccggtgaccgtcgacgagatcctggcgttctcgctgcagaagatcgaggccatggccatcaaggcgctcaaggtgcaggccgacatggccgacgagcagtcgccgttcgacgtgtcaccggccagcgacaagcggggcggcggccacctcctcgacgccgccgtgccaccggaggattgggcgctcgcctgcgtcggcgccgacacggtgaccatgctgctcgtcgcccagctaagggatcccctgcgccggtacgaggcggtcggcgcgccgtcgatcgtgatcatccaggccgtcagaatcgccggcaacgacgacgacgacgagccgaagttcaaggtggcgaacatgcacgtcggcggcctccggctgaagtcggccgaccggcgtaacgtctgggacggcgagaagcagcggctgacggcgatgcactggctcgtcgcctacgggctcggcaaggccggcaggaaggggaggacggcggcggcggcggggaaatccggccatgacgtgctctggagcatgtcgtcgagggtgatggccgacatgtggctcaagccgttgcgcaaccctgacgtgaagatccctctcaagtagatgctgcattgctgcctctgtgcttctctgatgctgaaaaaaaaagaacatattcaagcccggttctctttatattcttctgaattttgaaagctcaagattgtaatttatacttggttcctgcattgtgattgtattgtaatgaggaaatgtgagtgtctaagaattagattccaacactgtttattgtgttgtaagtattcatgtcatgtactgaaagaggcataatactgtttctgtaagttcacaaagcttagttcaaaatgtacaaaaattttgaacaaggttacttatgacttatgagtcatacgagtaaggattatggaagctattgttgccactgcagctgaacacaactactgtgcaaggccatttcataagttagctacaataacaacacagataaaataagatcttagctttcatccttgccaataatatgcacagtggaggatcatgtgtgtacatgagcacattttgtcatacaacaatcttcaaaatagagctactacagaacatccgcaaacactagtgttccttgagaagtgctgatctactggagcttatgttgattgctttaaggtgtagggcatacagttataatgccagatttgccgtacatatagtatgcagtgtatttggctcagttggttgcttcctgaaactatcaattgtagtctttccaatagtcggtcagaatcatgcgccgatacttctctgtgattaaacgaaaatgtactaacaaaaaacgcttgtaaaactggtcaggtcatatgttaaacttcttccagttcacgaggaagccctccactcgttggcctgaaataaacagattgggactcatcagaagaaacctatcaggattctacaccgatacaagatgccagggcgccatgtcaaatttttaatggacattagctaaaacactaccatagaatcagaacaccaccctaaagggcaggagagtaccacacaagtatcagttgtacaaacgacaaatttaaggagtgaatttgtgtgattgtcaacaggaaaaggacatcacatataacaccttcagaacaattttagcatcagtgtatatttgaaacaccattgaagacattagcattgaaatgccacttgcagaaagagaacatggctttctttgtcaccataaatccactacaaatgcataactaaacacaatggggagacacgttcatatgtcgtgaaaaaaaaaacatttgcctatgatcttattgcattacaatcacttctgcatacaaacacactttgtattggttatacatagccaatccatgattttattttacctatgcatgttctcctctctactagatgattaagaaatatactacagtcacatattatgcaataaagattgatgtaccctaagaaaaatatcagcataaatgcaatcgaaaacccagcgtggagaaccgcagataagcttggttaagattttaaaccatatttgttaaataaataaacaaaataggatatcattgagaaattacactgcatacttacaatccagtcaatatcttaattgtatcatagaagaaccattgcatggttatgacaggcccaacaagagtgattcgaacaggtaggcttcttgtgaacaaaccacgaaacccaatacttttcacagcctgcaagagtaggatgcaaatattagatcattgggatggtgagagtttgaattattattataagctggagacacaaaatcatatccttacatctatgatatttttagcctttttgttgtatagagatgagacaatgttatctgcaggattggaaacaacagtaccaactgcaccagatatgtagccagccagacaagtagccccaagctgctgcattgttgaacaatcctcctttttcttctgaatgacattccgatataggatgtccacagtatgctcaaatgttgaaaacattagcatagaaactgcacgaatagaacaaatggtgataagatatacctgaacagaaaaaacatttatactttagaaaccaaaagatccactaatgaactgacacacttaaggcgaaattgcgcaaatgtttccaaacatcaaatacaggataaaaggaacttctgaaataggcagatagatgttgcttgttgccatatgtgcagatttaaaagctcagagttgactgagcagaaagaaatatgatccccacaagacaataacaaatcagaattacgcatacagatacagcttagttcttgccccttacaattaagtacttcacacctagagttttgttgtcagcgatgtgacttgtgcagttgtacctatttttgtaccacataagtgaaaacattttcgcaaaagaacacgcttagatcataacttaatcaaaattatttaagagttgcgaaatgagctcatttaactatgtcgcacattactacaaatgatccagaagcatttcaagcatatcatacagacggaggtactacatacatggaagattccgtccccaaagtggtaaaaggcccttgtaaaacctgcaataaacaaataagctagaggtaagaggaattgcagtggtatctcagatatacaatagggcaccaaccaacaagcaaagctaagaatatgtagtatcttacttgaagcttacccggacaagccttcagtggcatacacccttgggaagccatcaatcaagccttttgcaaacataggttgtgtctgcacacggactttcaccgattcaaaggggcagagggcaacatcagctatgatttgagcagaggcactgctaataaagtaaatggtgctcttatttctgtccactagcacatcagagtacttcttcttgaaatactcataaagaccaaacttgcagccaccttggaaaccatagccaaagaatttccctgcccaacccctccaaagagatgaagctccctcttcttttacaagaatgttcagtcccgaaaatatgctattgtacttcatgggattcacctgccaaaacaattaaagggaagtagtaactattataaaaccgaaggtgccctgtggatcatttatgaattagtaatgattatgtattctaaccatatgaaatgaaagattccaaaccttccatttgatatggtatacaactgagcatttgacattgctaatttaatatgaacaatatcagaggcagtttaatccttagactgcaagagtctagtaatgtggtcaaattcgcaactcacaaaaaagaactcgctcttctgcaatggagcaaagcaggcaaccacagccacaccgctctcctgcaataatagcatacctgcatgttgaccgtgaggacgtcgagcggggtgatggcgaggtgggtggcgcccgccgccagcatcccgccgccggtgcacagcgcgtagtactcgggcgagaacagcctcatccctcccgttcctcctcctccaccaccattggccaccctcgccgcccccgcctcgcccccacgcgcgcccatttccggcattccgacggacggatcggccgcccgcgaaggaggggaaggggaagacgacgaagccgaaccgcgccgaggccgaggagagaagaagaagaagaagaggaagaagaaggttcgattccggcgttgtgggagactggaccggaaatggaccacgtagcgaggccccgggccttcccctttccccctctctctcggggccacgttgacttgtcaacgcggcagcgcttgccttaaaccctagtagcgtggtccacctgtcagtgtcgtggtcgtggagaggagattttcttgggccgtcgtttcgtgggctctagttgggccatgaacagcagatggcccaggccggccgctcgttccatcgtgagctatgctgggccaggccgtagtgatgggccataagcccataaagatgttgctgtctttttcgctgcttttttgggatgaccaaagaaaatgtcgtccaaaacattgttaagagtgggagaaaaaaagttactgtacaagaaatactatcatcatctaaagaagactgtggatgttggcttgtataccgcagtgcacatctagaaatcacgtaccaatcacataaaacatgtcattaagaacggggcctaacaccaaagctaaggcccgactaccatgagctagcaatgagctgggctccaccaagcgcatgcaacgattcaccaataaattaatgcctaattaccttactaattactccctactttctaaattgatcttcacataatagaatacaaagggcctgttcggctatattgtacagcgctgtttcacagccacgttatagcttgttgctgcagcaagaggactgggtgcaggctgcagggcaacgctgtacacgacagccaaacacgcccaaaatttctcaaattgatcatgatatgaccgcatggacactgatttcattagaatataattaatgcagcatgtgagaatgtgtgcatgctaaggtgtaattggcatggtgttttaatcgatgtatccattgtggtagaatgtgtgcatggtgttttgattgacgtggtttaaattattcttgattttggtgtataaatttatatgatgatcaatttgggaacaagggagtacttttcttagccaccaatagtgcgtatgaaacaacaacacagcagcaaacgtacttacataaatttttaaagcaaatactcacacaaatgataattgaattatatagatttgcccaaactatcaaaattttaataatctgccactaaaacagaccaccgctatgtgtgatcgtcgccggacctagaacatcaccccaaagcagagtcataaaaaacgacgtcttcacggaggtgttgctacgtcaaggacgtgtcagtcactcgttcaagaaaacgggacgtggtttttaacttaagagattcgatctcgccaagacgtacaaaatctggagttcctgctactttttcgctgctcggccgacactattgacaaaggcaaagtttattctgagagtttttttaccgtacagcagaccaaagcggtaccaaatcgtcaccgttgagtagataggatccaacggctgtcatcgctgggtaccgcgaggtaccaactcgtccttgtggtggcactgtattaggatgtggaggtggaagggtatttctgtattttcgcatggctgattcggtcttatccacttcgatcgtttcgtccgacgccgcctctctctccatctccatctccgcaccggtgaatttttccccacggcgaccgccagcgtggagaagagaagtgtgcagctgacggccccggatgaccgcgtcgagaacgacaagctcggcgccgccgaggaggagctcgtctccaaggcggaagcggcagcgactgatgtcggagcgtccattgaaaaagtcggcgccgcgtccgccgttgagaacacctctggcgtcaagggtgctgacggcaaggccgtcaaggcgaagggctcacggtgaacacacacacaaaactcacgtcgccggcaagaacacacacacaaaactcccgtgaacataggaatgaacaccatcttgtttggtgctgctaactaggcagctttttcccaattcttgtattgcttaaatatgcgattacaaggaaaggaaattatagcctccaatcagaccgaaacatgcatgatcacacgatggatgtgtaactaaccaaataaaacaaacactaatctagcacacaaggattaatctcaacagtcgatgacgagaagcgcggcggcaccgaggaccagatggcttgagagcgtcgaggaaagccggaccccttcgcgtacaggttgacggggcctcctcttctccccgtcccccggctgctgcgccgtcgacgagcagggcaacaacgatggcgacggtgcatctccacgggatgaatcagcggagtcacaccgcacgatgctgcgcttcggggaagagagaaaggaaaacgctcgagaggattggttgtacacgcggtgcaggagcggtgtgtttccacatgttcccatcatgccccttgcgagcgaacgacagggatgatttcggtaccgtgcggtaccagtaccgcaaggtactatctgatggaccagagcaaacctcttattctgaaagatgatcaaagtcgctctagaacttctgttccggattcagccaaacttgaaagtaacttgagatcgtatatacgaattacagcgagaaatctacaatggtagccaacttttacagataactgtgagtctgtgatctcgaatgaagacgatcaccgggcaaaaaatatctgcattttgtcgcatatatgtgtgtaaacaaggcagttttttggaagttctatgtctgtgcattggcacttactattatctaactgaagatagatggagttgagtgtacgtttcaagcaacacggccgtcgattcacacgcatttgttggtttttggccgcgtttggcgaagaaagaggaaagagtagaattgccggccggccgccagaagcagctaaaccccaaacacagctgaacggctaaagcatctctctgcaaacatcaaaaaaagggcatcaaacctctcacatcaaactctaatcactcctgcttaaatcatgagcctgatcgtggccgtctattcagagattagagtgaagcccgaatttctcttccgcgtggattgataagcttgaaagaactgcaatcgaagtgaaagatgaaaagaaaggtggcaatcaaagtgaagatgaaaaaaaggtggccacgcctgccggcacctcctgatttcagtagcaacatgtcactgtgccatcataatgacaaaccaacgaaccaggacatgtttagtactcgtttattcgtgcttcggttctgttcgagagatctcaagacgttaagaaacagtcaagcatctgttgagaatctgaaaattctgaatttttcagcttctagcttctgaattatatctgttgagatataatcagcatataaatgacacggtttctatcccgaatgcataaaaaaattaacatataaatgacacggtttctatcccgaatgcataaaaaaattaacatataaatgacacggtttctatccgaaatacgtaaaaaaagacataaatattagagaataatataatatcaaataattagaactttagaaaaggtaaggcttctaacccagatcatctaacccactactttgtagaactttagaagaggtaaggctttcaatccagatcatctaacccaccaccttgtagagatagctggaagaaccatatgcgtatagaggagaggagagacgatgagtttgtttggcaatggtgcaatcaaactgtacggcaaagtacgtgagctgtacgcagtcggcatattctttccccagatggggcagatcaattttttaccaggtcacgacgacgtccgtactatcagggcgaacgaacaaacagttacgcgtgcgaaaatatcccaacccaacccgcgcggcgggcagcaggcagtgcccccatgccggccacgatgtgaccggcggcctccccccgccgccatgaatgatcgctccactcgtccacttgaccaccaaaagcgacacaaatctgatgcctttttctccttttttccatcccaacctcagcttactggtcacatatctctttactattgctactctagctgtgtactatagcatcagtactaaggaagaagaaaatgacggttaattatcgttcgaaaaagaagggaaaatgatggttaattaacagagatgtgtacatgcatgtatttacagaacacatgtatctactacagttgcattgctgcgtagtacaagaaaaaatctctcggaacacgtatctactattcacgtttttgctaggtgtgtgtgtatgtacaatcgaatgatgcacgtacgcgagcgagagagagctggagctctacggcaccgatgtccggcagccgccgcggtcgctggcgccggtgggttgcggtggctgtgacgacgcctgtgccgcgtcggcggcgcagcacggcggcggggggtcggtggcggcggcggtgactgcaggcgacggcgccgcgaggacgacgatggcgcggcggcaggaggggcaggtggaggtggacacgagccagacgtcgacgcaggcggcgtggaagccgtggccgcacggcgggagcacgcggacctcgtcgccgcgcgcgaactcggcgaggcagatggcgcactccggccgctcctcctcctcctccgccgccgccgcctcggcgaacgacacggtcggcagcgacagcagcgccttcctcttgagccccttgcatggcgccgggggcattgcctcctccgcctcgacggcgaacgacgacgggttgcacagccgcgagcaccgcgccaccagcgccagcccgacgacgcagagcaggaagcagagcacggcggcgaggatgaggaacgtgtccgtgtggacgccccggccgcccgacgccgccgccgtcgccgtcgcggcggtcaggtgctccgacgactgcagcaagtgacgcatggtaggtgaaggtgagactgagagcactgccaaccactgtgccgacgaggggccagttaagcaatacactgacctaaaaatggtgaaaaatggagaaggcaatgcaagagttaggcgctgggagggtgcatttttatagtgtgaagtgaaggtgatttgtgctggtttaagtgattaattaaattcatgagctcttaagtgaagtgtcactgtcctgtccaccaattcttctaggaattattatttttttggttttttgtcacagacgtgtgctgctgccttggagctgaattctcctgtgctgatacagcagctttggtgcgtttgtccctttttatcctaaatctgtggcgtttgatgacttgatcgatccagatttatgcaggcacgaggtcctaaattatgttgccttttacttaatttattattactactggcagaattaaagcaaagcacattgcgacggtggtagtagctagctttgtccaatctgcacgttgtagcggagaaagtcgacgtggcgatgagcgtgaaagtgcatgcaatgcagtttacggaaaaaagtgtgattattccatgatcaagcgctaaaaaacaaagcagtattcgcggacgtagcatagcaggagagaggagaccgaccagggccatgcgtagggttcatgagccacgtcggatacatgtcaaagcacaagtactcgtacgtactccctccgtccaaaaaaacaaactctaattttcgtgtcaaatgtttaactgtccgttttatttaaaaaaattatgaaaaaaattaaaaagataagtcacgcataaaatattcatcatgttttattatctaacaacaataaaaatactaattataaaaaaatttcatataagacgaacagtcaaacgttggcacgtaaattcgcggtttgtctttttttttttaaggagggagggagtactactgcaagatctggataacataggctattaattagttagtcgtcgccaccgtaccaacctttgaggaaaaagaaaataaatggtgtaccctgactccgatccatcctgatcttctgtgattaactccatccatcagtaaccagtgtcgttttctgcatcaaactaatctggtgtttaaatcttctgaaaataaagatgaaaattaagtgttttacgtaaaacgaggtggtaatatcgtgtgattaattgagttttaattgttacaaacttgaaaaatggattaatctggaattttagagcaactttcatatagaaaattttcgcacgaaacacactgtttagcagtttgaaaagcgtgctatgagcatctaaaatttaatccaagtcttgttggagaagcgaacgcagcctaattcataatcacatagtattcaccttgtgcagttttgcctgtaaacttgtctaagttcagttctcaaaacaacttgtctaggttcaatgcacgatctcgatgtaatctatcgttaattctatgatttaatttctatcccggccaaacacaggcgaggttaccggtcgcattattttagctgatccaggacaggatagacggcacaattgtggaggtccattggaacacctcccatatacatttccctgtgccgtaaaggttggcgcacgccacgccacgccacggcgcgtaccgggcgccaacacgtgctcgccgcggcctaaaaccctcactacctcgtggccccagcgcgcgcgcccgcgcactcgccgagccatcgcgccgcgcgacgtgcgtgcgaaacgccgagaattttcggggtttttctcttctcgtaattggacgcgacgcgacgcgacgagaggccgggggggcgacgagtgcgcggccgtccccagcagcagcaacagcaaagcaagggctcacatcaagaacgggccgctctctctctacccaagttgcgacaatatgcgttctatctcgcacgtttctttctatcttcagggcactctgctatgtaatctagattcgcgatctttgatagaggcaaatcatttcacgttgatttacaagcccaaagtgcatctaaagacgggataaagtgcaagaggagtgaagtactgatcacctaaaccaaaccgatggacggatggataagtttcatcagaacggtggtataggcttttcgatgggccaaagtgctcaggtacaggtacggatcgagcaggagaggtcaagccaacactcgagggagagtgagcgagtttggtggcacgtcatgcgatcgcacgttgcctccatcggtcaaaacggcacatcattcgggtagacgccaggtggggatggggacgggtgcgtgcgagcttttctgctgtcctgccggcgtcgggagctagtagtggcggccgccgtgctccgatggggatgcctcggtctccggccaacgacgtacggctgcctgcgcaatgctacaatgctagtacatgcccatgcggttttgaaaggtcagtgttatgtttgtgtcgtctggtacgaagagagttggggacctggggtttgtttggttcggtttattgtcatcatttattaataaaagtcgttacccttgcctaaattcgtgtgctctaaaattttatcgcactttgcacaagtctaaataagaaatattgtcacattttcttcaagttattgatgcttgggacctatttgatacactacaagaaaacagctatacctaatttgaacaaacttgaaaaaccttagacgtgttaaactttgcaaggtgtggctgcaaatcaaaatcaaacatttgtgctgttgaagatgaaagggaacttggatctagcagccaagtaatggtatgactcggctgggcatactggtaacgagaggattcagagatcacgagtcatggtgtcactagtagacacaatactactgaatattcaggtacaaatgagataagtgacagtgtggttgaacggggggaatgggggcaaaggatgagaggagaggagacagggacaagtggcagcagaaccataggaacagtagagctgcgcagttggtgttcttatcttgttcctttgttccagctgagctgagtgtctatgttcttatctggtttgctgttctgtctcctcttgtacgagtagtagggtgtaaattgtttccagttgccaccttgggctaagttgggccgtgactcggtcggtgactctagtggcccatagtgcgaacgagacacagaatcggcaaccacagcccacgtagacttgcaaattgcaacgcgagtgaaaccacgtgctgtcacccctaattatgtgggcctaactgggctacagaagatttaggtgctatcgtcggacctcgaattggaaacaagttcactttacatcccttatcgaaggatggagttccaaccgcgaatgtcaaccacaaaaccaagtataacgtatctctcatgttgcaaaactaacgtaaacgagatcacaaggtagtattgacccgggtttcggccactgagagacaaatgtatacatttgcttccttcgagtgcacacgaccagtcccacttcgtgattggaggcgaccttcgtgacctcacgttcaccggtgtcgctcgacgagctatcctaaatcgatgagctaggtgccatccaccgtgagctatccccaagccgtgttccggcgaggaggctcctacttgtgatcaacgatggggcggtagcaggcaaatgccgcggcgatgtcgatgtcgatgttggtgaagagggaacggacggggacatgtgacgaggaggaggagagtgtcttggggatgggagagagggaggggggtgtgggcgtgtggcagaggagaaaacgtgacacgaatgggagtgggaaggacaacgaggggaagggtggacagcatggacgacgcgaaggtggcacattggagttgtgtttagcagtcgttctcttttcctttttctttagttttttttctctatggtataagccaatctggctgattgcggtgtgtaatcattttttttaatatattgacgtataattcttttgcgtgttcgtgaaaaatgcgaaggtggcgttgatgtcggcaccggctggcatgttgcaagcctgcttgacagtcgacgctgccctgccgggcttgatcaactagaaatttgctagggtccggaactcggatcagtcttggaggtaggggtgggtagaaaaggaccgaaccgaaaaaaccgaaatcgagaaattcggtcctagatagtgaaataccgaatttcgttcggtcaattcggttagtcaccttggttaaccgaatagactaaaaagaccgaattaataaaaaaatatctaaatgaaacctacaatctactaagttcaataggattaaactctaattttcacatccctgcttcttctaggcatgtaatctaataagagtctttactcatatgcgcttacgatttttttgttgaaaatttccattatttctttgcatatatgaaaatgttgctgaatttcggtcaggaccgagactgagacggaaaagatcaagaccgaatttatcggtcctgatattttttgtgttgaaattcggtcttcactttttaaagacagaaatgaccgaaagaccgaagaccgagaccgaaattttcggttagaccgaatgcccacccttacttggaggcccatggaccaataacgaatccaattgggggaacacagttacacaggtgctgaaacacattgcggcgtacgtcatggctgactcaaactaggcagagcatgcagcaaatgattggattttgggggcagtgtcattgctgactgcgattcgcatgttgttcatctccccgtagcttctctccggtccatccaaccgtgtcaacatcgtttaggcatacatgatacagcattacacaacgatcgctcgccggagtccggcagtcacatgctgctaatgctgttggtcccccctacttgaccgcgatcggccggttcttcctctgcctaaatggctaattttaaacgcctacatatatatatactcctactatacacatgtggttgatgattccgtcctgttgaaccaacccctgatctatcacgcattattggatcttgttggtgcattattgcagctgcgatatatcaatgtgtggtctcgtgcgttccctccagaaatgtagcgatctgagagacaggttcggatggccacaggctgctgcagctgtctgcacagctgcacagttttgaaattgaagggattattgcagtgtaaatacatgtattagggaatgacctaatatcaaataattaggagtgagacttgaatccggatcgactacccatcaccttgtgaagctagccggaagatctctttacgtttctcggattattgcagtgtactggcgtacattggcattgtcgatcgatgaccatctgccaggtgaaaacgtgcgtgaatcttgagtgtaaattcgaaggagtcttcctagcagcgcatagaaatggagagtgaatactctttgctgctgatggatgatcgatcgatcaacgctgcatttgatcatccgccaggtgcgtgcgtgtgaaaaatagagattaattatagtagattttgttaacctagctagaaactatcaacatcgcaattagcgtgcatacatgcacatggctgacaagtagtagttatacaagtggtttgcaagagcagtctgagttgatctctttcttctcgatcgaaggcgagctttgagtcaaaagtccaatttgtctacgttgaacgcccaggattatcatcaggtcctgacttaaactcgtcgccgcatagacctacgtatcagatgaatctgtcgacaaatgtacccccttgatgagatgaaacagtaaaaggataatcagagcagcagtgccagtagagtatcccattcagagacctccacgtcaccacggtgccaaaaggaaggaaaaggtagaaaaagggatataccgataggaacatgcgtggtcaatagagttatagagagataagagaagaggtaataataaaacttaaggatggctgcttgcatggagtagaaaattacaagggccaatcaatcaatcaatgatggctcgtgcaaattgtacagggtagcgacagggcgcgcggaattaggaaggaaacagcagcatttgcatttgcaattgcaacatgcagcggcgaagacgatcgatcactgatgacgactgggacagagagatgacaaggacggatgctggctgagttggctggctccccgggggtggatgcggtgtaggcctcatcttctcccttctctcgcagcagccgcagcggctgcgtgtttgaacacgctctctctcctagctagctctcctcttctctcctacgtatataagcggcttccttcccaactaattataatgcatttcaggtggatcgattgattccattacccaacctcaagctagctagctctccaccgtctgcgcccattcaggtcagcttctgctttctgactgactttgagttcttcccatgttttgtcctctgtctcgcgttctccttgattttgggagctggtagaaagctaagctagattttagcttagctccgattgccatggagatcgtctggagcatgattcgtctgccctcctgcttctttggaggaagctagctagttatgttttcttgtgcatttttttctcttcttctttcttcttcctcgctttgcctcgttgatttggtgttgcctagtcttgcaattagttctcaaactttgcttcctgtcgagcaacttgaggcaatgagctggctgttttgagctgcatgatgtttccagctacgagtactgaagatgcagtttctggtaactgctgtcagattaggactgcaattaacggctggctttgcattagcattctttcctttttcttttttttttctttttgaaaccaagccattctttcctttttcttgtttacatgaatgcgtgcgttcttttttcttttttgaacttgtcattgttcttgtaaatctgctaaagtgctaatttgacagctaggttcctgctaaaatggtttctatatacatgaacgaagtataaagaaacttccagctctatacggttctatcgctggcctgagaataaaaaattgtagttcaatgcctcatcagtggacaacaatattctctgatatttaagtttccattttctttcttttttgggaccttgcaatcattccgtaaaaggaggtgttgtgcccagcaacattgacttgttcagtgtgctcgagcttcacgtctttcaccctcttgtaggagacgatgaccaagaacagtgcaagcaatgtggatatgtcattttcaaattaactaacacatgctagaagatggaagaaaaaaatataaataaaaatggaatattaataactgtattagtagtactcaattgcgttcctgaagttctcatacggttcccatactccttttctttttctttttttaaataaaaaaaataactaatgtatgtgactaagaaatctaaacgtttcatttctttattgatcgattatcttagcagggtgtacgagccctgaagaactttgaatcatcttttttttattatttttttagagaagggtattttttacccggcctctatatctaaccggatatatacggccattgaaatagggaatttaaccccgcaaacaacccaatctgaaattcgcaccataagagatttgaattcaggaccttaggatactactcatgtcactgtaacctctaactttgaatcatctcctgaggactaatcacaagacatctgaaacatttccagaaaaggagagtttaatccaacatcagaaaagatgggcttcttgtcattgcttcttgtggcttctatgccaatcgttcaggtcctactcataggtgttattggagcttttctcgcttctggttacagcaaaattctaacctcaagcgctctaagggatatgaacaaggcgagctctcattagcacatcactgttcaatgcaaattaatctggtattgtctctggctaaacctgttgagatttctaacaggttgttttcactgtcttcacaccatccctgatgtttgctagcctggctaagacggtcacactttctgacgtcatttcttggtgagtttatactttatatatatatgcggttactacaaagcagctcagtcagacttttctgaattttttgaagtgtggactcttctgaattttaaaagaattcctgtttgaaatgacatagtactagactactagtacctttagaacactaaacaatgttacacaagtcatcttttcattcagaggcagggcatataagatctagcttcagtttctgtttgcagggtaacccaactggactaacagaagccttttatcatgcaggtggtttatgccagttaatataggaatcacattcattgttggtggcactctaggctggatagcatgtaaaatactgaaaccaccacagcatttccgaggaatgatcattgccttctgttcagcaggttcagtttcctatccggattgcatctttcttttgttcatactccggagatacataatactccctccgtttcgaaatatttgacaccgttgactttttagcacatgtttgaccgttcgtcttatgcaaaaacttttgtgaaatatgtaaaattatatgcctacatgaaaatatatttatcaatgaatcaaatggtagaaaaagaattaataattanttaatttttttaataagangaacggtcaaatatgtgntaaaaagtcaacggcgtcgaatatttcgaaacggagggagtagtatttacagtgcttcaactaacaaaaataaaacgcaggaaatcttggcaacttgctcttgatcattgttccagcagtctgtgacgaagacggcaacccgttcggaaaagaccggagcctttgccgctctcgtgggctctcctactcatcattatccatggctgtaagcaaaattatatttctgcatctcacattcactgaattatcgtgtgcctttttcattcagttgaataacagaattgatcgttcactctgtatctgcagcttggtggcttattcatatggacacatacatacagcctcatgcagaaggcaggcaaaatgtaccacaagatgcagtccaaaagcatccagtgcccggccgacagcgatgaagagcatcatcctgcacaaggtcatgatcaagtaaaattagacggtgaaactgcttacgctgatgaggaggcggctcttctggtgtcagctaaactggctcctgaacacaatgaagagaaccaaatggtaagtcgactaattaatggtcagtccagtgcaccattgtctggttcgttccatgcaaatcttcagagaaaactgatttgtcagaaatgcaggaagctccacttctgacttgcgagagagagattgctaacaaaggaggattctggacaaacctgaaggaaaccgtccaccaggttgtcgaggagctgatggcaccaccaactgtatctgcagtatgttcctgccaaaaccagttacaccattttcatcacatcaagttgatatcaatgctcattgctcatattggcagtgtcaactgattgcactgaagttgtctttgtgttgttgtttcagatacttggatttgttgttggcctagtcccatggttgaaatctcttgtcatcggcaatggcgccccactgagagtcatccaggagtccctccaactaatggggtgagtgagcatttacatgttaggtttctccatttctgtctgccttaaacagcatatttcaagtgtttcctcagcctttactcacggttcgtttgtctttcagcaatggcacgattccttgcatcaccctaatcctaggggggaatctgacacaaggtaggtgttaattactcatgaactaatgatatggaaattaactgcatcatcttgtgagttttctgaacttctctgaatgtatgtgcatgcagggctacggaagtcggtgctgaagcgtacggtgatcatcacgatcgtctgcatacgctacgtgatccaacccttgatcgggatggcggttgtccatgctgcctatggggttggattcttgccacacgatccattgtaccgctacgtgctgatgatgcagttcgcgctgccacctgcaatgaacatcggtagcccctgaatcccatgcagtttcattctgatttctgaagtttcttctgtccatgcttctaggaagatcttgatcacctgatcatgtgtcttgtgtgtgtgtgatctgttcgatccaggaaccatggctcagctgtttgatgttggtcaagaggaatgctcagtgatcttcttgtggacttacctgattgctgccattgcactcacgacgtggtcgacgatattcatgtccatcctgtcttgaggttgagggtgacaagaagaaccaactttgtggcaatattggtttagctggaatgattcagctcacggataaaatgtaaagaagccggagacaatgagcctctccgaaagagccgaaactgaggcttgcccatgagcaccacacgtccacacgtgtatagaaattgaagcagtatttttttagataatgaaaaatagcatggtggcccgcgtagataactataatttttttaacatattaaaaaatatttttatttttttcagttatttcaaaattgtattttttatatggactctatactctactcccaatcatcctcactttattaaatttctaattttgtagttcgaaattttgttatttctaaattatactcttcttatatggacttaatagtctatcgtcttctctaaatattctttttttatttgaaattttacttatttctaaactgtactcctatatggacttagactggtgtaacgcacatcagtcgtggcgttggtaggaaatacttaacaattcaataaaaaccctaattttcgaaactcgttctttggttgtggtcctgttgtgtctgtgtgcgccaagatctcactctctatctctctatcccaattccgaatccgaaatcaaatcctactctataaaccctccaaatcaaattttccttgtaaaagtctattacaccccttcttggtcattgggccgaatctcccttgctcggcccatttttccctttcggcctattcccctcacgttcccgctcgaagggagagctctctctctctctctctctctcgccgcgcgttgccgccggtgccttttttatttttcgccgtcgccgctgactcccgcgcgtgagcgtcgtggccgaccgcccggtcgccgccgccgccgtatgtctccgctcggcaccgagccagccaccctcccttttgccatcatcacttgcatcatctacccggccccgcactctgccgcatccatccaaaaaaacgggagtagcagccacagctctccacctcctcctcctccctctcccttttccccaatatggcaagggaccaagctgctttccctcggatgcaactagagatcgggcgcccgattttttggcaaaaatcgggcgctgttctaccaagtagatcggaaatatttcactaagtagatcgaagatgtttcaatcttgtaaaaactgaaacacaaccaaatcatctcattaaacattttgctacaacgtatgaaacaacggtttccaaaaaaaatcgggcgttgtttcaccctatataaaaacaatgtttcagcaaataacgaaaggatgtttcaattcactgcaacatttgatccatacatactgaaatatcacaagtacatttattgaaacattgttggtggtacaaaaaataaaacggatttccttaataaagcgcttccgtaatatgcgggtgattcgttgcaacgacacgtgtggtggggcgcgtggtggggatggcgcgggagcgcgcgggcgccagacgcgaagaaatttcgctttccctcaccgtctccttttccttttcctgactactgctcgcgtcacctctatcactcttggctcctagcgccaacgtgccgcgcgcctccaccgcctatctacgaactgtcgtccccgttccaccgtcatacaacgcctataaaacccacgcctctcctctcgttcggccgcttcccttttcgcagccgagctccagcaccaaaatccgccgccgtcactcccacgccgtcgtccgccatcgtcaagtgcgccggaggagccaatgctcttggaggcgcttgacacggacttcggccactcctctccttccccttccctgacccgaggccgaggcgatcacaccccgcgccttcagccctcttcgcagcgccacccctctcggtacccctcgccgctccgactcccttttccctctctcctttaggtgttaattagcccaccgccggccgccgcagctcgccgttgctagcctcccttggcgccacgtctctccccgcgattagccgccctcggtcctcggtcatgggtggatgtgaggtgattccttagcgtagttttgattcgattactgcttgtgaaattgctatggtgtgctggaacacgttgcttttgactgtggctgatgtgatcagctgggccagggaggccatccaaatcgtttggctgggggccaactcttgatctgttaaagattgatacattgtactagtccgaccgggcatggtgcactgtcgtgtccgcgttgttgagaagcactctcttagaaacatttgaaaaagttttaaacaaaatcgtatgcaaaaacaaacaatctttctatgaagcttgcaataaacacttaatttcgatgacttgctgagtataccctgtactcacccttgctctacataaataatccggttcttccaggagcagtctggcttcaagcaattttgacgaggtgttcccaagtcatgcttgtggccgtggggcagtcttcatttccgctttctcttttgtaatacacttgtgagctcgaggtctacccgtagcctcaacatgactgtaaaactactcttaattaagagaccactgatgttgtgatattctatcttcctatgataccagcgtggttttttgggactggtattggcttaccggttaatttggagcttctcacggtagttcccgtctggagctagtttggggcgtgacaattcgacttttagaattttatacctacacagactcttgtctactctttcaattttttatttcttaattctgattttctgttatttcttattgtatttttatatgaactctaaaacttatctttaaatatatattttttaattttaaattttagttatttctaaattgtactcctaatcatatatggactcttaactcttctttgcaatattcatttttctatttcgaattttagttatttctaaattatatttctgtatggactctaacctctagttttttcatgttttttaattccgaatttcacttagttctaaattgtattcagactctatttttctcttccaatattctttttttttaattttgaatttctgttaattctaattggtttttttatatagactctagctcatcttttaatatttctttttaattccgtatttaagttatttatggactctaaactcttcttccaatattttttattttgaattttagttatttcgaaattatatttttatatgaactctaaactctagttttagtttttctttttttaattccgaattttagttagttctaaattatattcttgtatggactctattttcctcttccaataattctttttttatttccggatttcagctattttaaaattatatttgtacatggactcttatttttctttttctccgattaatatgaaaatttctaggtgctgagagcgaacatggaggcttctttttctattgctttaataatataataaatagatagattcaaggattatagactgggcataggtcctcatacacacaaaaagaaaagattgggtacatgattatttatgtatcccaagtttttggtccatttggtttgcaactgaaaatacaagtggcaaaaccataggaacagtaaagcagcaattcgtgtcagtctcccactccagcgtgcgcatgctttcgtcggcggccggccgcgcgcgggtcttgttggcaagcgggaggagcggcgacgccgcggccaggcacccacgcgcgtcgccccgtggtacagcctccggcgactccgacgatgatgccgctcctccccatccgctccggcgccgcctcctatgccgctgctgaacggggtaggttgacacggcggaggtggcgcggcgctggcgttcgtggtggcgagcctcgggaagggcgggtggcggcgctgttccggcgggggttggcggagtggtcgtcgctgcgtcgggtgttcggtgtcgatgccgtcgagagcgacagcttccccttccgcctccgcgacgtctgcgcagccacgtgctcgggcggacggccgcacagccatcaccgcggcttccggcagggtggcggccatgggcaactccaccgatgacccacatgctccacaacaagcaggagttcccccttgccactggcgccgtacgtcgtcgattcggattcggattcggtgagcaccgcgcattcatgattataacaggctcacagcatatagaaatacactcaaaagtctagtaaaattttaagtacaaagactgtaaacagctagacttaaaagcaaagcactagaaggaagatcgaagagcttgtttcggcataacatacacagtatcacagattttaacagcacccaagctactatctcagatgatttcacacataccctttattcaattcctgccatccctttattcacaataaaagcacacaaatagatcacttcttattactaaccgatatgttaaatagcactatttgctactccctccgtttcataatatttgacaccgttgactttttagcacgtgtttaaccgttcgtcttattaaaaaaaattgtgaaatatgtaaaactgtatgtgtacatgaaagcatatttaacaatgaatcaaatgatatgaaaaaaatagataattacttaaattttttgaataagacgaatggtcaaacacgtactaaaaattcaacggtgtcaaatattttaaaatagagggagtacttaacaatcgattacatagggatgtatggaaatgtatgccagataaatggcactgtttagtaattgcttggagggttttctagatcacgcgtttcggttggggcagtgatcagaagcgatcccttcgagcttctggctagcttcacaagttagtgggctagccggtctgaatttgaagcctcactgcttctttttatttgatattagatttttccctaatattcgtgtttttagctgagcacggccgcacaagagatgacaggtgatgagggacttcaacttcttgaaactgtcccaaatgtgaaccttatatccctctttgtcaccaagcatcctgaattcctcctcgatatcatttatgtaacgcagtcggatgtcgtcaggtaccttaaatttctggaagtaggcctgctggaagtactcaggtacatctaatttgtcaactatgttcataaaatcctgaatatatctctcctccatatcttgcagtgcctttgtcttcttcgctgcccgtttatcagccatcatctcaatccgaaactgctgtgttttctcccaagcccggatcttgagttgcatttcgtggttacgcatctcgaatttctcctcgacatcattcctgaacttaagtagggtatcttcatgtaacttacaatccgtgaggtagtactcctggatatgctcaggtatgcctttcctggcataaccaagcttgataaattgttgcttgaacctctcttccatatcttgtagggcttgtgtcttcttctccgttgccgcctcctcaatccaaaacttctctgcttctttccgagcctggaccttaagctcccccttgtgatcaagtatcctggaatttcccttgaaaacggcagttatgaacttgacccggagattgtcaggcaccttgtagtcattgcagtgttgctcctgggagacccagcctgatgtgctcaggtaggtcataacacttgagaatccttgcagtctgttggttgaatttgtactccaaatcttgtaaggcctgcgccttcaacttgttgtaatcctccgaaatgtaacccttaggtggttcctcttcatcatcaggcatcctcctgaatttaatctccacatggtttatgtaacgcagccggagatcatcaggtaccttgtatttctggaagtaggcctgttggacgtagtcaggtatgtctattttgtctaatatgttcatgaaacgctgaatgtgtgccttttccagatcttgcaaggcgtgcagcttcttcgctgcccaataatcggccattgtcttgatccgaaactgctgcgattcctcccaagctcggacccggagtcttgtttcgtgattacatatcccgaatttcttctccacatggttcttgaacatcagctcctcgtcatctagcttgatttccctgatgtaggcctccttgatgcgctcaggtatgccttctatgtcaaaagcatgattaacaagtaattgcatgtaccactctttcatgtcttgcagggcttgcgccttgttcgccgcccccgccgcctccgtccaaaacttgtctgcttctttgcgagcctgggccttgagcttctcttcgtgatcaagcatcctgggattgccctcgaaaacggcattcacgaacttgagcctgagatcgtcaggcaccatgtagtcattgcggtgctgctcatggagatccagcctgaggtgcttaggtagttggtaacaggtgagaatctttgcagtttgttggttgaattcctcctccaaatcttgcagtgcctgagccttctccagcgcccacttgtcggccaccatctccaccgcccgcaactcgatcgctcaagatttttccaagattgcggtgggaagctgtgccaatgtgaagaccgaccagctttaaatcaggggggaaccgtggagagcgcttccgaagcgaaacggagacggaaaccaaccaacctgatgatcctcgctcgctcctcccctcttgcgcgcgcggttgctccccgaatccgaatcaacgatgggatcggtccaaagccaccgccgccgggggaatgtatccgcaactagaatatgcattcttcattttcagctgttaagttggatttttttttcctcgaacgattttcagctgctggattaaacgtggacgaacgggattgatcgctacagtaatcaacagtaaatcaatgccataaaatgtcgcatcgaatgtttgacacacagatgtagtattaaatatagaaaaaaactaattacacagaatgcgtgtaaattgcgagacgaattttttaagcctaattagtacatgatttgacaatgtggtgctataatgaacatgtgcatgcagggctgaagcgtacggtgatcatcacgatcgtctgcatccgctacgtgatccaacccttgatcgggatggcggttgtccatgctgcctatggggttggattattgccacacgatccattgtaccgctacgtgctgatgatgctgttcgcactgccacctgcaatgaacatcggtagtccctgaatcccatgcagtttcactcttgatttctgaagtttctgtccatgcttctaggaagatcttgatcacctgatcatgtgtcttgtgtgtgtgtgatctgttcgatccaggaaccatggctcagtttgtggacttacctgattgctgccattgcgcttacgacgtggtcgacgatattcatgtccatcctgtcttgaggttgagggtgacaatcaagaagaaccgaatttgtggtaatattcagctcacggatagcacgtaaagaggctggagacgacgagcctctcgattctcgaacgagtcgtacttaggcttgtcagcaccacatgtgtgtaggaattgaagcaatattttttagataatgaaaattcaaggagtatagactggacatagctccttacacaaacaaaaagaaaagattgggtatatatgattctttctgtatccaaaattgttgcccaattaaacttgtaactgaaatacaagtggcagaaccataggaacaacaagatgcaattcgtgtccctatattcctctttcttttcttttcttttcttttttccttttttgagctgtgtcattgcctggtttgctgtcccttctccttttttgacgcgttgggaacttggggattcgttgggtcatggctcggtcagtggctgtgacggaagaaaatttggtagaacggcggtccttcccctatccgtagaacggccgtcctacgaaattttctttcggctgtgtcgaaactgaaattcggcaatataaaagaaatagcgcaaaagaaaatagatatatgcggagacaagaatttagacatggttcagaccatctcaataagagataatactcaactccaatttcgggaattttatcctcaagttgtgtattgatctaatgatctggttgtgaatacccaaaggggtgtcctgccctccttatataggcaaatgagtagtattacaagatagaaatttatccccatacgttttaagtttacttaatcaacaactagctgggtggcccgcgcaattgcgcggctagcacccaaacaaaatcatatattttttagtataattttacttaaaatttattaaatagctatcttattgtcttaagactttgaaagaccaaaccttatcatcctcgtgtttctaattatatagtttttaaaagtcacacctgttgctaccccttatatcatttccttctttatttgcttgcttgatctaccactatttctattcattcttcttggaacctttaaaaattggattttatatttttagagtttattgtcacgttgggtttcatttttataatttctaggtgtcccgtcaaacgttgccattatactcctctatggcccatccactgtctcttctctttattgtcattgagattttaaaaatcgaacataattatcgtcttggttcagttttactttctagaagtcccgtcaaaccgtcagcggctttgccattgtactcctctacgtctcacccactgcctcccttctttattgtcattgagattttaaaatcgaacatgattatcattgttttttttttactttttagaagttctgaacctttaaaaattagacttgtagtttcattttttataatttttagaagtcccatcaaacgatgccactatacccctctacagcccgttcgtcgcctactcttattattggaattcatttcttattttctagaagtcccatcaaccgtcggcggctctgaaactatactcttatacaccccgcccgctggttcacctttttattgccgttgagattttaaaaatcgaatatgattatcaacggagatttttttttactttctagatgtcccggcaaccgccttacaagtttgcttcacggcctgcctgacgtccgtccttttaatcgtcattaggattctgtttggtgtattaacggtttttatatatcgtatcaaccgcctccaccctactcctttataggccagtttcttaatttatctcatcatgtgttttagatggtcttttctttcgataatctttatttttatcacaaattttagttatttataaattgtattcctaattgaaatcttatttttctttcttctatttttagaattttttttttaaaaaagtcaataccgtattgtgttcttttaatgtttttattttttattttcaatttaagttgtttcaaaaatgtattcctacttgaactctcttttaatttttctaattttggatattattttaatttttattctaaattttaattaatctcgtattgttttcttttatggattcttattttaatattgcttatttttaattccgaatttcaggtaattttaaattgtattcctacttgaactcttcttttattttcttttgctaattttggatttatttatttttattctgaattttaattaatctcgtattgggttcttatatggactcttcttttaaaattccttatttttaattccgaattttacctatttttaaattgtatttctacttggactctcattttcttttttcaattttggattttattttatttttatttttaattttgattaatctcgtattgggtttttatatagaaacttctttcaatattgctttttttaattccgaatttcagctatttttaaattgtatttctacttggactctcctttccttttctaattttagattttattttatttttatttcgaattttgattcatctcgtattgggttcttatgtggaaacttctttcaatgttgcctatttttaattccgaatttctgctattcttaaattgtgcttctacttggactctccttttgttttttttctttttctccgattaatgtgggaatttctagctcccacagcgaacatggtgcctcttttcaaagctgttttaataatataatagatagatagatagataatagatagatcttaatagacaaggactataggccgttccttgatacacaagtcataatcttatacatattctatatacataatctatcccctataactagtcggatagcccagccatatggcacctgatacccataatctccacaagagattgttgggcgtcatcgtcatcaccgactggccgcctcgtccgccgctaactagtgtcttcgcctttacggttggcctattacgctgtcattgttgggtgtcctcgtcatcacccaccggcttgccttcgtcgccgccaactaatgtctccgtcttcacggttggcctattatgccaccgctcatggacgtcctcgttttcaccatcattccatttcttcacaaaacatcgttaataaaaagtgacccaaagtaaaatttactctatcaatgatttttataggtaaattaaaatgtaacatttgtcatgaatctaatggtcataatgcactttaaataacttcactatcttcaaatgcatattttttttgttagataattaaaattaaagatacatttataactagttagttttaaaacatttaaaatgtaacatttgtcacgaatctagtggtcataatgcactttaaataacttcactatcttcaaatgcatatatatttttgttagataattaaaattaaagatacatttataactagttagttttaatacaaataaataaatgtgatgtaaaatatgaaaatgtcataaatcgttgtataaataatagatttgtaaaaacatatgtaatttttgggttttgttttgttgggtttattggtattgaaattaaactttgttagtgataatatatttttatatatttacaataaaatattttataatgttttaagtactatgaaaaaattataaaggaaacatattatttatcatgggatggatatgacgatttgttttgtttaaaccacatattaaaataagaggaagtgaaacgttgcagagaagaagtagcaataaaccaaaatctactacacgcatctctttctgctttctgctgtgtggttaaatattttctaaaaaaatactacaaagtataaatatagagactttgtcttatttttctcgcactcatactatgcgtaacattctctttgtggttatatttatgttaaaaaaatattgtgagggatggagataaacaaaaaaaatggatagaaggttttgctaactgaatttgtgtattgcaagtatcgtatcgatgatttattggagttagatgttaatcatatatttgaatgggctagtataaccttgcatgtcatatccggtttgttttttacctcacatgtcatgtccggattcgtattcgagggtttgtgtgatactcaaatgagagaggttttgttatttcaacggtattagctaattgtatcgcattgttagtggatatattattgtcttcctgtttcatgtaaaattttaaacaaattgttttttatctaaatttaatatatgtaaattacttttaggctttactaaatttacttttatatgtctaagaagtaacttagtgaaatctaaaagtaatttagatatattataaaagtaatttacaatttttcatcaaaatataatcgtgtgagatcttgcaagaaagatttaattgttacgaacgcaacggtgtaatcggatcgtagatcaaatgagtagtttaagagaaaattttatttgaaatataggtggataggatctctcatagatggagtggtagctggtttagacaaacgagctaccgctagctgtgtagccatgtccaattgatatatataactcatgaagcacagggtcatgtgtatacatgcacatacataaatctgaatctgtagtacatacttcagatatatgtacaattatcgaaatttctattgagtgattgatcgctggcggtgatcttttttttttcttttttttcttttcctctttggtaagtttatacatctaaagtttacatatctaacgtttatccacctaaagtttataaagtaaatgtttataagtcaaaagttgtatatacccaattcaaataattcaaatttaaattcgaattcaaatattttatattttttctcttttagtaagtttatacacttaaagtttacacatctaaaatttatccacctaaaatttgtagagcgaatgtttataagtcaagagtttatatacctgattcaaattcaaattcgaatttaaatattttatatttttcctcttttagtaagtttatacacctaaagtttacacatctaaagtttatccacctaaagtttgtagagcgaatgtttataagtcaatagtttatatacccgattcaaattcaaattcagatttaaatattttatatatataatatttctatacataaagtttatgcatgtaaagtttacggtataaaatctatgtaaatgaatgagagtattataattttttttctttttttaactaaaatttgtgtttttttaaaaaattttatgatggaagaaaagaagagaggggtaagggggagggggaggggcggcgatcaaccgcccgttagcatcacccgtgcaattatacggtagggtgtactgtgggatttcggttggtgccgcggtaagcgaatgaattagtggctggctgggtctacacgtacgaacacgtattctttcccgtgtactacctgttatacgaacacgtacgagtacgtacgccggccatgcttccatggaccgaagtgcgcgacaaaccaaccactcagactctcagagataagcccggccggccggagacgaaggccacgacaccgcattgtccatgacgatctcattctcatctagtactccctacttattttaatgtattttaatgtacgatatcgttgattttttaatcaacgtttgaccatttgttttaagatagcaccatatatcgacaccgtacggcgcagcacagaaaaccatcggcggcgtacgtgacgcacgcaggcggcggccggggcagccagccagccagcccatcggcggcgtgaggcttagctcgagcggcgtcgttcccatcttgctcaatctgctttcaagagctctctacctttccccttctctctctcttctctctcccatatgtagtgtgaacccctttcccaactcacccctctttttctacacgcgtttttaaaactactaaatggtgcttttttataaaaaaaaatttctataagaaagttgcttaaaaatcatattgatccatttttagaaaaaaataaatagttaatacttagttaattatgtgttaatagaccgttccgttttccgtgtggaaaagtttagttccaacctccccaccagcgaacacgggtgcaaaagattccactaatctgacaagaaaaaataaaacaagaagaaatttcattttagaatatatagatgaaaggcaaaacaagagagaggagaaactgagaaaggccttgtctagtttccaaaataaaaacttttcacccatcacatcgaatgtttggacacatgtatggagtattaaatatagaaaaaaaaccaattacatagtttacgtgtaaattgcgaaacgaatcatttaagcctaattacgccatgatttgacagtgtggtgctacaataaatatttgctaatgatggattaattaggcttaataaatttatcgtgcagtttcctggcagaatctctaattgtttttgttattagactacttttaatatttcaaatgtgtgtccgtatatccgatgacaatcaaactaaaaaaaaaattcaactaaacaagtccaaagtatagcacagaacgaagtaattcataccttgaatgaacccggagttgcatgttgagttgttgactgaaatgatccagttgtggctatattttccagctttgaagatcccgtcaacgagaccaaggaggagtggcagggccaactggaagtacccctcgtacaccgaacgatcactctgagccgagcacaccacaggtgacatcactgttaccacgcgaggaagagcaataaaatttatcaaaaatttcgtcattttgtgtcctgctcctcgccgccagcacagtacgtaactagctctgttctgcctcttttccgatctgcttctgcctgattcgatgaatacatatatagtgtcacgttgctagaagcacggcccttttcactattggtcgtcgttgtttgcattattgcattgcaaatgcagctatagctttcgtacgtctcccctgtccagaaatgtggccaaaccggagaggttagctatagtacaaattggaaagttaataatcctacgtgatcatatctccatttaagacctcgctcattaaagcgaaatcacgataaaatcaactgtttataattaattagcgttatactaacgtaaatgtgacgtatgatctcttacgattatacagtgtttaccgtgtgtccttaccgataaaaaaaatgttatcgtaccctaatggtaaagctcggtaaccgtgataaccatgtggttacccgtcaaatgcggaggaaaaaaaatgcaagcctaagattgaatttttcaatttttgttagacttattttttttataaaaaaaatatctacatctctataggattaattacttaaatggagttttggagctaagcataggactcaagctctagttaccataggcctaactgtgcccctgttatcccggtgaacaactataaaaggatagggaccctttgaatcgaaggaataaaaataatgtagaaatagaaaaaaacgtagaattctgacaggaacatacgtgtaaaacaaaagattacaaaacatagaaaaaaaaagaatgattgtttgattgaaccgcagaaattggacgagagagatagattcaaatgaatttttctaagaggttagagcttttcctaatgtttttctaatatatatatatatatatatatatatatatgcaatgagccattgcatagaaatttcatagaatttaaaaagctccaattctttgtaccaaaaaccaaataaaagaattcctgtaggattggaatcatatgaatttcctacttgaatcttttgattgaagggtccctaaaatttatcaacaatctaaatttccgtttaattcttttaaaagaattggtggggttacggatatttaacgttactgtacaaacataattgctacacgtgctaaatttttcttactaacaattatctcaaccgtttgatttaggtaaataaaagttatgtcttttcctaaaatatatagaagcaatatacacaggttatcaattatac

SEQ ID NO: 22659 - DNA, 3592 bp, Oryza sativa
  unsure (1)..(3592): unsure at all n locations
cactacggattagagtgttgacattaatttgtagcgttccagtactatgaacatcacacaattagcgtgcgtagtgtacgtacgcacatggctgtaaaatgataagtactataacacatgttggcaatagcagtctgatcgagagttgaattctttcccgatccaaggcaagtttgagcgtccaaacgccgtttttttttttacggagtatacgtacttgtaaacgattagctacctaggattaaggccgagttagtgcgcgtcacatgaataatgtacgtacctgataattaaaaactagtactaaaaggcaatcatgctatgcatgttgataccggatgcatgcacggaggagaggaaatggaggccaggccaaccagtcagtgcaaggtatagccacaggagcggagaataattaggaaggaattagcagcagcaaattaaaacaagtttaacagtataatcaactgtaactaaaattgattagctaatttaatagcttaatcatacaatgctatagttgagtaattttatagtatatcattattttctgtcttacctcacatacacaatttttgaaagccgcgttatagttgaattataaatctacagttcgttttcttttctctttcctctccgatctcctctatcaaagcacaaatttagtatatcaatttttaagtctgtttgtaacagttattgtgctcattttaaacaagatgacactgacgacgtctaggacagatgatcacaaggatgcacctaagctaggtgttgatgcatgcgttgtactcctttcgtaaaaaaaaaacaatctagaattaggataaaacataatctagtataatgaattgggatgagtctgttcagatttgttgtactagattctatctatactaattttaggttagtttttttttatgaagagagtagtatattgttttcagcaattctatcaccgtgacataaatcaacaaagctttcattattaagaaaaagtggtaggtatagctagcctatataaaccgtgtagtactcctagctagttaggcgtggcatctagctagctttccttcccacgaccagctacagacgcagtagatcgatcgatcaaccactctccaactctccattcgttctgttacatactcatcctacatcgacaacgtctccagtgcctgcgcgacattgatattcaggtcagcttctgcatgcagctagcacacacgcacaattcctgctacttcatgcatcgtttgtatttcgtgtacactaggttgtatcttgaatttgggagagcttaattagctgattaattgatgccatgatggagagatcatatatataatctggtgtatgattcgtcggaacagtacgtctcgaatggattaaagaaacagatgaacgactagcttcagcgctggctaattctgtgatcttgcttcctctgcctgcttgaatttgtctggaactgaatattgcatggcgtcacgatcgattttgtcatttcgtttcatgttttccttagaggaagccgcgtgcatttcgtgtgtttgtcttcttcttccttgcttgcttcgctccgttggttcttggttgtagtactccactgtgtatagatctacaggaatttaacctttgctctctcgatcgagtagcttgatgcaaatgtgttttggtttgatgtttacctgccacactacggatgcagttaggtttctgctaactgctcttacagatttcggtgttatatataattagtactacattaaaaggagaatcattaattctcctcctttcatcaaacccccctcccttgaaatttttaaaaaaaaacannatattcggaaaggnnataattggatccatgctactataaaaatatgtttgtttttttttttgcgggggaagggagatctattactcagataaagcatccacatcaacaagatgtgtaattaaattacagctctcatccggccaaaacttggacaaagtttcagcacgggccttattagctagaaaataactaatggaattctgagaacgctgaattttcttgaggacaatctcccggtctccagacatcagaatcccgatgtctttaacaacgtgagcaagcgctgacatttccttccgcgcatcttgaatcatattaacagccgtcaggcaatcagtctctacaattatcgacagtaaggtccattgaagcgccatattgagcccctctttgcaggccagaagttcagactccagggggctagtacaacgctcaataaaaccacaggcagagaaaataacctggccgctggtattcctgagcaccacacccacacttcctgtgcttgttacagagtcaaaggaaccatcaacatttagcttcatccatcgctcctgcggtttctcccacctgggtagagcctctgaacaatcctgatgaattttcaggccctgtcttggtctgcattgaaccacatgtttccctgtaacgacgtttgcttgcggatattgtttgatctctaagagcgaggtgatatagctctgtagaaacctttgcgatacatccactggaggcggcactttgtcgtgaacaatctcattatgcacaaaccaaatgtgccataacaacataaacagcataggtctttcctcttttggtgttagctcaacttgttcaaacagccaggaggatcctgtagaatttccgacaatgccgactgacaagttgcctgaatacagcaaggcagaccatagtcgctttgcatgtgggcaccttcccagtgcatggccaacatcttctcttacagtaccacaaatgcaacatatttctgactgttctagtttccttctctttttattctccatagtggctaggctgtttgtagcagctttccacatgaagattttaaccttttgtggcacttcacacttccagattaaatcccacatcttcctggacttgtcatctgacgagctggagctttcatccatattggccagagacattgccagtttataagcactcctgacatagaaacgtcccatcttgtccagatgccaagccaaaaaatcctcatcctgcctcattgaagtccgaatcctcagtatttcttcagcatcacagggaaggaaaacccgattaactttctgaacgtcccacacaccgtcaggtcccaatagctcggacacccatttcatcctgcaattacctttccttgctattggccgtcgagaatggtcccttggaatccagggatcacgccatatgcgaactgactgaccatttccaactctccatatacaacctgtagcgcccgttccgtcgtggcgcctagcgggaaaattatctcttaaaaaccctatttgcgaaatttgtttccttgcttgttgtctagtgtccgtgctatctcaagatctcaatccccgatctatcgtcgagatcaattctgaatccaaacccttccaaaatcattttcctccgcaaaagtctattttgcctcccccgaggtcgatgggccaaatctcgctcggcccatctccccctctcccccggccctctcctctctctcccgggcgatctctctctctctct

SEQ ID NO: 22660 - DNA, 16654 bp, Oryza sativa
agttttagggtttcggcctagttcccaagtcgcgcctgtgatgtttggtccaagtcctggcttccgtttcccttttgtaatgcagttgtgagctcgggatctgtccgtagcccaacatgactgtacttctactctataataaagagacctctgttgctatgatattctgtctccctgtgataccagcactgtttcctgggactggtatcgattaacaggctaaattggagcgtcacgggccagttccggtcgggactagttcggggcgtgacaagagatggtatcagagcacaggcttggccctagggcgaaacccgacgcttaggacaaccctaaggatactaagttcaaaactacttgcgaaaagctaaggtttcttttattttctttattttctacagtttgtttccaaaatggttactgatcttttcttcctctttcaaaattgtagatggcagtgaatgccagcttcagttcccacggttttggtgagggtcaccacgtcgctcagcttcgtgacctcgcccatttccttggcttctcgtgtcccgagtacacggggtactccgtggaccgtgttccccctcactgtgagctctctgtgtacctttacccccgtggaggtatacacggagctggccttcgcccacaccacttcaccgtggccaggcccactctccagatcgcgtaccaggatctctcctggactgcgcttcgtcgcctggcccatgactacagccaccgtctcggaggctccgccttccggcagcttccacgccttccttctggccactcagacgctaggtacccttgtccgtacagcgagcctcagccagtgctgactcgcatggttgagctttcggaggctcaggccactcagcacgacctactccttgaggcttaccgctcccttgcccgccgctacgccgccttggaggcccgtctggccgaggagggtgtcacctcagttgacactatctcctgggactcaggccgcctctgccacgccagccacctgtcctcccacagctcccgcggctctacccgcactcccagtggcccgcgctcccccagctcgcgtgcgccgtactcaccagtgtactcgccctacccacacccagttagcccttcctacaccccaggacacaccccagttgcttcctcccgccgtggcccacgctttatccgcactgcgcggaagcgtgttgttggttctgccaccgtgttccgtttccactacccagctcccctaccgccagcggcccgtgctgctgccggccctcgacaggttccgccggtcccttcgcgccagccgatcgacgtttcttcgactcaggagccgactacaagaggcagccaggccgacgaggagtagaggaggcagtcttcagcagccgtccgtgtgataggcccttttgttccgccgccaactcttttggagtcatggcgaggtagtgcgtgcatgtgttagttgtgggtgttgtttggtagtctggttctcctaggtggtgtgcgcacagtcaagctcggcgtagctctgtgacttgtccacacccattgtatcaggtgtttttatgatttgaaaaatccagtttatgcctagtgtgtgctatctgagttgctatttgctttgctccttgccctcctaagtgcttatctgactcttaccccgcccttttctgggagtttagatggctagccgcccccgccgtgcagctcgtgcaccagcccactttggttttgaagatggtagagttgagccagaagaaaatcatgagtcggctaatgagcagtctcaccgcagcaaccgttcgcatcgtacagcttcccgtaatgcagaaatggaacagtcccaccgctctcaccacactgtcagtcacaattctggagaagaacgcctcccttccccacctcatgtggaaaacaacatgcaacacttaatggcagttcagacacaaatcttgcaaggtttagccgcagccgtagccggttttcagcataatgcgcatggaaatggccaccctcacatgagcaacaatagatccaagctgacaaactttctgaggtctcgtccgccagagttctctcagaccgtcgagcccgtcgaggctgacgattggctgaaagatgtggatagaaaactcaacttagtgcagtgtactccggttgagaagacgctctacgcctctcaccagctaagaggacctgccgcagattggtgggagaattactgcaatgcacaccctgaacccactaacattgcttgggatgagtttgctacggccttccgtgcagctcatgtgccggaaagcactattgacatgaagaaagaagaattcaacagacttaagcaaggcaacagcagtgtcaatgagtacctaagtatgttcaacaagttggctcggtacgcccctgaggaagtggacacagacaagaagaagatcaggaagttcttgaagggaatcgcagttggaatgagactccagttgcttgctcatgacttccccacttttcaacatatgatcaacaaagcacttctacttgaggatgccagaaaagaggctaccgaagaatacaagaaacgcaagtctaaccatcagggaaattctttccgaggcgcacctcgccctcgctacggtcaacccatgcaatatcaccagtcggtaactcaggctaaccgccagccaggctacgcccctcgtcctcagatgaaccatccggcacctcagccacagcagcgtgcccctagtggcaatactgcgccaaacagtgttacctctttcaagtcaccacagggaccgtcagcagttcagtgtttccggtgcaaccagatgggacactatgccagacagtgtcctcagaatcctaccaacaacaactcagggcatgctaatggcagcactgccagaactcctactccagcggcagctcagtctcgtcctagctctcaggcaagtggacaaggttctcgtgcgtccaacaactttggtcgaggacgtgtgaatcacattcaagctgaaaccgctcaggatgctctagacgttgtaatgggtatgttctctgtcaactccgtacccgcaatagttctatttgattcaggagcttcccattctttcatatcacaagcttttgtgaaaagaaatggttggaaaacccaaaatttgcgtgtaccaatgatagtacattcccctggaaggaatataagggcaactcaaatatgtccggaagttaaccttagaattgaggaagttgacttcctagccaaacagatagtcctagactcgcaaaacttggacatcattctagggatggattggttggctaagcacaaaggatagatagattgtgccgaaaagtccatcaccttgcaaggacctggaggaaagcaagtccgctttacccctaacacccctaccgcaagtcggtctatcctaacctgtttacaagtcacctccttggagtcggtgcccatagtctgtgaatatcccgacgtatttccggaagaattaacgagaatgccaccagaccgagagatcgagttcgccatagaactggcaccaggcacagctccaattgcaaaaagaccctaccgaatggcagctaatgagttagcagaagttaaaagcaaattgaagaactggaaagtaaaggttatgtgcgacctagctcatccccttggggagccccagtgcttctggttaagaaaaaggatggctctgagagaatggtaatcgactatagagccctgaatgaagtaactataaagaacaagtacccgttgccacggattgacgacttattcgatcaacttaaaggagcaagagttttctcaaaaattgacttgaggtcaggttaccaccaactgaaaatcagatctgaagatatcccgaagaccgctttctcaacgcgttatggtctatatgagttcacagttatgtccttcggactcaccaatgctccagcattcttcatgaacttaatgaacaaaatcttcatggaatacctggaccagtttgtcgtggtgttcatcgatgacatcctgatatactccaagaacaaggaagaacatgctgaacacctgaggctgataatggaaaagctcagagatcatcaactattcgctaaattctcgaaatgcgaattctggttggaccgagtagcatttcttggacacgtgatttcctccaacggtgtcgaagtagatcccagcaaggttgaagctgtacttgcttggaacccgcccaagaacgtgtcagagatccgcagtttccttggcttagcgggatattatcgaagattcattgaaggattctctaagctagccagacctatgaccgagctgttaaagaaggagaagaaatttcaatggtctgcagcctgtgaagacagctttcaagaaatgaagaaaaggttgaccactgcaccagttctcaccttgccagatatccgaaaagatttcgagatcttctgtaacgcatcaagacaaggcttaggatgtgtcctaatgcaagaacgaaaggttgtggcctatgcatccaggcagctcaggcctcatgaagtcaattatcccacccatgatctcgagttggcagccgtggttcatgcacttaagatctggaggcactatttaatcgggaacagatgtgaagtatacaccgatcacaaaagtcttaaatatatcttcacacagaccgagttaaatatgaggcagagaagatggttggaactaatcaaggattacgatcttggaatccactatcatcctggtaaagccaacgtggtcgctgatgcgctaagtcgcaaggcctattgcaatgtagctcaaatacggcctgaccaagatcatctgtacagagaattggataagttaaggctgaccgtggtacagtcaggagtccctgccagcttgacagtacagcctaccctagaatcgcaaatccgggaggctcagaaagatgacgaagggataaaagagttaataaaaagaatacaggagaagaaagacgctaatttctccatagacgatcaaggcacagtttggtgcggtccacgcatctgtgtaccggccaagaaggagttaagagatctcatcctaaaagaagctcatgagtccgcctactccattcatccaggaagtacgaagatgtaccaagatatcaaggcatacttctggtgggctggaatgaagcgagatgtcgcagaatacatagccttgtgtgacatttgccaaagagtcaaggcagagcatcagaggccagctggtctgctgcaacccctaccgatccccgggtggaaatgggaagagatcggaatggatttcatcaccggtttgccaagaacccctagcgggtacgactccatctgggtaatcgtggatcgactcacgaaatcagctcatttcgtgccagtgaaaaccacctatgatggaaggaaactagcagagctctacataacccatgtcgtatgtaggtttggttgtcccaagaaaatagtgtcggatcgaggcactcagttcacctcaaggttctggaagcagttgcatgaagctctcggaactgatctaaattttagtacagcctaccatccgcagaccgatggtcagacagaaagggtaaaccaaatcctagaagacatgctgcgagcgtgtgccttggatttcgaaggcacttgggatcgttgtttgccgtatgctgagttctcatacaacaacagttatcaggccagcattcagatgtcgccgaatgaggcaatgtttggaagaaagtgccgcactcccttgtgctggaatgaggtgggcgaagcgctggtattcggtcctgacatactcaagtcagcagaagaacaagttaagctaatccgagaacgattaaagacagcgcagaaccgttagaagaattacgctgacaatcggaggcgtgaccttgagttcgaaaaaggagatcatgtatacctgcgggtatcacccctccgtggtatgaagaggtttgggatgtccggcaagttagcaccccgctacatcggcccctacctcataaccgccagacgtggcgaagtggcatatcagcttgagctacctgaaggtctcgcagacgtgcataacgtgtttcacgtatcccagttaaagaaatgtcttcgagttccagaagagcaagtccccctgggtaatatcgaactggaaaagaatctgacctacaaggaaagaccgatcaaggttctggaagaggcagaacgtcagactcgaaggaagaccatcaagttctacaaagtccagtggagcaatcattctgaagatgaggcaacctgggagcgagaagatcttctccgcgccgagttcccggagctgctcccttaggtgctgaatctcggggtcgagattcttgttaggggggttggtctgtagcgcccgttccgtcgtggcgcctagcgggaaaattatctcttaaaaaccctatttgcgaaatttgtttccttgcttgttgtctagtgtccgtgccatctcaagatctcaatccccgatctatcgtcgagttcaattctgaatccaaacccttccaaaatcattttcctccgcaaaagtctattttgcctcccccgaggtcgatgggccgaatctcgctcggcccatctccccctctcccccggccctctcctctctctcccgggcgctctctctctctctctctctctctctctctcgctccctcccctctccggcgcgctctcccccccccgctcagccccgctcagcctcgcccgcacgctgctcgcgcgtacgagagccgccccgagcgcctctctccccgctcccccctccgccccgcccgcgcgccgcgcgcgcgtgcgcgggagtcgcccgcgccgagcgcccctcccctcgcgcgagctcccctctcgcaaagacgcttcccgcgcgccgtgtttgcgtgcgcgcgcccgcgcggacgccgcccgttgtttcccgcgcgcgcgcgccgagtggccgaccgcccggtcgccgccgtcgtcagcgtctgccgcgcctgtcgccagtgtcgccgctccgctccaaaccgcccgccgtcatcgccgtcatcaccgcccggcccccgccactccgcgcgcaagccgccaagggaaggaggccgcgcccctcttctctctgccgcgtcgcccccgctccccttcccctttttcccgaatcggcaaaggggcaagccccctttctctccctccttttcccctttttcctcctcgccggcgtcatcctccctgtcgccgctttggccgcgaccgccgagcgccagctcgcgcccttgaccgccctaagtcggttcccaaaccgacattgccatcctataaacccaagcctccccctttcccttcctctcccattcgcctcctcaccgttgccgccgcccccgtgctctgtctcgcctccgccgtccttcgccaagcgccgggagagccggtgcgttcgaggacgcggaaggggacttcggccgcgccctctccttcctcttccccggcccgaggccggagagattactcccgcgccgccggcctcttgtcacagcgcccctcctcttctcggtgatgtctctctccgttcttcctcctcgctccatctcctccccctagctttcggtagtagctagagtagcctccccgtagttagccggcgccgccccgaccattgccgtcgctcgccgtgtgttcgccgccgtcgccgctcgagctccgtagcacccgctcgttgctggcctcgctcggcgtagttccgcccaatccgacgctagcgtcgagttcccgaagccgcatagatgctctcaccgccgggaatcgacctctcgtgacctcgtcgccgtttccctcttctcccgccgccggttgccgccgccgcaatccgccgccatcgagcaacctccggcgaatccgagccgttggctcgtctccccttgtcacgtgcaaccgcccggtgtgcacgcttttgcccgtatcgccgtggttcgctccgccgctcgccgccgccgcccgccgtccattcgcggccggatcgtcgtctacctcccgccagcccacgtggccgccacgtaggcgccacgtcggcgccagctcagcctagaccggatcgagccgaccccggtcagtccctccccgtgcgcgcgttccaccgcgagccgtgaggctgcgcgtgggcccgccgcacctgcgtccaccacggaccgcgcgcgtgcaccgcgtcctttccccgcccgcgcgcatgagccacgtactccctccgcacggtgagccgagccgctgacaagcgggtcccacccgggaccgcgcgtggtgagcccggtccaccggactctctctcctccctcccccgcgcgcgcgcttgggccgtcttgggccggccggcccgttaagctcggccgagctgctccatttaccttgggccgcgccctagccgcccgaggaaaagtctgatttccatccctcttttcttttcttttcttttccaaaaaggatttaattaaatccttttcctttagaccaaaaatccaataatcttagaaattcaatatcttcccaaccgtaaatccgtttgactccgttcaacttccaaaattcctcaaatctcgagatctatctaatggcacgcttagaggtcattaatagggctttattttcgccgtttgttgagttgttccgtttcgcgtgtagttccggagcccgaagacccgcagtgcgaggatttcgaggatcaagctccagatctcgagcaaggcaagccacctttgaacatcttgagcctatatttgaaatttaattatgttgcttgcaaaatattatgcattgataggatcgcacttaatctgtttgtcccgtctgcaaggcagattggcggacctacctaatttgtcgcatttgatccttcctttgttaattgctataccatgtccccttataaccacccagttgcgcctcgatacttgtgcactctgtgcaagtatcgacggtcgccttcaaacttaaaatctgagtaacaacttgggtaaaactggagttttacaaaagacttggaaaacccgacacctgggtcggtgcttgcgaactaaatgaatttccaaaaccgcggaccggggaacgtaccgggtgtacggtttcccgctcttgcacataaggaccgtttccttggaatttcatccgaacataagacaagtacgaccacatgggtggaatgggacgcccttggctgagtaaattgctaatcgggggagccttgatgccgagagacatgtggattcgccggggtggtgtcggggaggacccctgggcttcctggcacagtatggtctgggacctaacctgttgttggtctgggacccctctcgtcggcatatggtaaacctgtgtcggctttcgaaatgccttgtcatgaaagcttggaggtctcccgacgtggctgatccccacgggctgggtgacccgggttagtaatgtcgtgtgggtaaagtgtaccccctctgcagaggttaacaaactgttcgaacagccgtgcccatggacatgggcggatgtgaggtgattcctagcgtagttttgtctgtctactgcttgtgaaattgctgttttgaaaaggggttcgatgtttgaaaaatctgcagctgatgggatcagctaggcccgggtggccgtttgaaaagttgttggcccgggtggccgtttaaaaagctgttggccgggtgccaaccgtgttgcaatcctaaagattgatacattgcacatactccgaccggacgagacgcactgtctcatccgtgtcgtttgagaagcacttagttgttttcagaaaagagttcaaataaaatcaattgcaaaaacaacagcctttccttgaagcctgcattaaacccttatttcccctggcttgctgagtactcccgtactcacccttgctctatataaatatcccccccagttgctgaagaagatgaagcggatcctgctgatgaggagttcttctaggagcaagccggctacgatgagttttagggtttcggcctagttcccaagtcgcgcctgtgatgtttggtccaagtcctggcttccgtttcccttttgtaatgcagttgtgagctcgggatctgtccgcagcccaacatgactgtacttctactctataataaagagacctctgttgctgtgatattctgtctccctgtgataccagcactgtttcctgggactggtatcgattaacaggctaaattggagcgtcacgggccagttccggtcgggactagttcggggcgtgacacaacccttcttaatcaattccaaaccgaattagattgctctccagccaggtgaagcattcccactaaagcaagtatcaacaagagttccatttggaaagtactttgctttcagcactctcgcacacaaactatccgggttcacaataaggcgccaggcttgtctagctagcagtgcttgattgaacaatttaaaatccttgaatcccaagcctccatactgtttggccttcgtcaaatacttccatgccctccaatgtgttttcctttttccctgttccgcaccccaccagaaattccgagccaacttgtttaaatcttcacaagtcgagtccggtaacttgaagatactcataacatacaccgggatagcttgtatgactgcttttagcatgatttctttgcctccactagagagatagttttctccccacataattattctcttccaaatcttctcctgaagactttggaacttgcctttgttcattctcccctccggggttggaaaacccaaatatttatcttcaaaaccattgccgacgatttggagtgtacttctgatttcagcatggacactagcgggagtaatatcatcaatcagcatggagcactttgctagattaataaactggccagttcctacagcatagtcgtcaaggacttctcggatcacatttgcctggccattatcagccttgaaaaagagtagagtatcatccgcaaacagaaggtgggagattccaggcgcccgccgacaaacttgcactggggtgattgccccttgaagtaccttttcatccagcaggagtgatagcccatcagcaacaaaaagaaacaagaacggagaaagcggatcaccctggcgaaggccgcgagaaggagcaaatgtactcagtaaggttccattgagtttgactgaatatctcaccgaggtcaagcacgtcattatccaactgacccaccgatgagcgaaacctaacttatacattgattgctccaaaaacgactagtcaacccgatcatacgctttagagagatcaagcttgtaggcacaagcagcttttccagggctcttgttcctttggatggaatgaaagcattcaaaagctaacagggcattgtctgtaatcatccttcctggcacgaaagcactttgattctgagaaatcaaatcatccaggataggcctcagcctatttactaagcatttggagacaatcttgtaaatcacgttacataggtttataggcctgaactctttcaactccattggttgattaaccttcggaataagcacaattgcagtctcattgataccatctggcatgatcccagtgtggaagaattccttgacaaccctaaccacatcactcttgatcaggccccaatttcgttggtagaagcgagccggaaaaccatctggcccatgcgccttaagtggaccaatctgaaacaaagcatctgcgatttcttcatcagagaaattcctgcatagggaatcattcatttcggcagttactttctgctggaacagccttgtgactctagaatgatcaacagtagggtctgctgtgaacatatcattgaaataatccgtggcaagattctcaaggtcttttgtcgcactgtaaacagtgccatccgggcctcttaacttggagattttatttttcttcgctctccatcttgctctgttatgaaaaaagcgagtattccgatcaccctctttcagccagctaattcgcgagcgttgtaaccaaagcatctcctctctatacagcaattcattcatatggtctgacgcaatgcgaatttctctgcggtctgcatccctttctactaattcagcaagcttctttctggccttctctagacatctaccaacatttatgaattttgttctactccaagtttgcaaggccgacattaccttcctcaaagcacaattgatatcacccaaatgttgtttctccccaacttctagccatgaatcaccaatcacttctgttgatgcaggttcacgttcccaacatatttcataatgcagacacttcttgcgattcgcatgagaagtatccctggtaaacctgacaagaatgggacaatgatccgagcatggagaggtcatatggacaacctgtgaattgctaaaaatatctcgccaactgttatctgctagtacccgatccaaacgcactttcacattgtttctaccctcccttctgttgtcataggtataaggaacccctgaaaagcctagatcgaataattcacaagtgcttaggatatccctaaaagcgtgcatttgggattcacttctgcgtttctcagaaaagtgctcaaactgccataatgtttcattgaagtcacctataaccaaccagggaagagaggaagtttgctttaaatctttgatcgcagaccacatatactgcctattttcaactctcggttcaccataaacaaaggtagcatgccacaaaggatcatccggagacaaacgcacgtatgcatcaatatatctgtcatttagagatttaatatccatataaacagactcgtgccaaaacaaagcaagaccaccactcatacccacactattaacccccacaaaaccttttaggcctagtctatttcggagccaacttaatctttccactttctgtctagtctcactaaggaaaacgatatgggaacctgcctccttcaccaaggcacagagatcacgaactgtcgtagcgttcccgataccacgacagttccaagctagacaactcattgctcctgacgggatcctaaagcagatcccgtcagtttaccagcggctccctggctggttgcctccaaattgtccacctcctgctctccatccgccctcctagacctctttagtgccctggttagcttccttgagtccatctgccctgtagtatcatcagccactgcttgttggtactctaacaaagcttgcttgactattcccggcttcacgccaccagtttgttcctgtactcttttccgattcccagcactaaactcatccgatgagacttccccaaaagaagcttgctggtgcagattagcaatagccaggatcatctcagagtttggagttgcttcctttgccgacccctgcacaatacggttttcttctccttccatttgcatgtgttgtgcctgctgagctaattgttcatctatcttgccgtctccctccatctcctcagcctcaaagttgtcacgagcatccaccctaggcggaactgcttcattccactgctcaccttgtttctgccgagaagttgatgaacttgcactgccagcacctctgaagacaaggttccgagcaacacctgaggaggagaacgctttcactttgctaactttccgctcgaaaggtttcatcggagagcaacgcaattctgctgaaaacctgaaaggctggtcttcattagcaactcttctcccatagtccttatcagaatgccccaaataaccacatatgaaacagaagtgtgggactagttcataacggagatcaaacttcctaatctcctctttgccttgcaccaggatcatgattgcaatcttctcttttagcggacgtttaacagggagatccacccggatatgaaagaaatcgtgcatgtttctgccatcatcaccaacatccacttcacaaactttacctagtctactaccatacaattctcctctctgtttcgtcattagagccaatggaaggtcataaatcctgacccagataggaactgattctaggggcactttcgatgggcaagtaataccatcaaattcagccataggagagcatcaccatgatggatccatggtcctccctgaagaacaaacttataatcaccctcagagctgaaagttatgatgaacatattctctcgcagggatttgtagctcatatctgcacgcagctgccaagcacgacacatatcatcgaagaggctgatgggtgggcaatcttatcgaataaaatcttgcttggatagtccattggcctggaatttgcaccttcttcttcttaagggttacttcaataattttcttttttttcttaataattttccctttttgaaaggccgcagggccttgggaagagctagtgcccatatcctcagtcatcaccactttatcatccttcttctggctcccggacatcgccttcagattggcatccggcactgtgtccatcacccccttctcctgaatcgctagcttgatcatcccgccatccgtcagcttcgggtgggcaatcatctcaccgatgatccctttatcacccccactggcgttggcagccatgaaacaccttgcgatcaagtgtcgacggaactctagattggaacctgaggaatatgaggaccaaggaacggaactatgttggataatcctccagagaccccccccccctcctctttatagtagatatcgaccaagatcggatctgacttcatctttgttctcatagtctggataggattatacttcgtccccaatccatccgaatacggattgcatccagattatctcgtatacctaaagcagacatctcctttaccaattgtgtgttaccttgactccaccaggaaaccttcatctgccgatggtaatctaccatcattgcctgaacgatatcgatccttccaagaccaacacagaacgcaggaggaaatcctgccctcagcaacaacagatcggagacgaactccatccagacccatctcactagatgggagacagccgccgccccccagttgcccgggagtcacccctgcccaaaccctaaaaacatcttactgttgatagtaagcctaaacttaacactataaaaatatgttgattcagataaataccactacaactcatttattcgtagtcatgccataaaaaatttatggaactaaaattatgccaccgccgtcacgtttttcatcaacctccttcctttttccatcttttttcttatctgcacgtgatgcccacccgtcagattcatcttctttcttcatttcccacctgatcttagatcctgacactgctacagcagcaggcaaaaacaaaaggaaggaaaaaaacgaaactcttgctaccaataatatacggcaaaacggtttcgtttttttatcccatggaatggaatggcatgggtaatttgctcgtataattaattcaaagttgtcttgcgacagtaaccttctttcccatgctttgtttccttccattttgttaaaaaaaacaatttttgaaatttttttttgcctggccggttgaaggaattagccggtcaaagcttacggttacaacaacgctgcctattaacattaattgttcttataaatctgcaaatttgacaaatgctgtgtttagttcccttcaaacttacgaaaattccgtcacatcaaatgtttggacacatgcatggagcattaaatatggacgaaaaaaaccaattacatagtttgcatgtaaattgcgagacgaatcttttgagcctaattacgctatgatttgacaatgtgatgctaccagaaacatttgctaatgacagattaattaggcttaataaattcgtctcacagtttacaggcaaaatctgtaatttgttttgttattagtctacgtttaatattttaaatgtgcgtccgtatacgtaaaaaaaaatttggagtaacaacactgccaaagtactcttaagaaagttcctgttaaacatttttttgctgtatacatattgaattcttcggcagcctttattagaggctacgcacgtactcatgaaagaagtacaaattaaagaaactactactacagtttagtttttagttcgatatatgcgccatcagtgggcaaaagttaaggattgtctttgttattcaagcagtcaagctccatcttctagttttgcttaaggagatcttgtgcccggcagcattgacttgctcattactactgaactagctatgctcgtgcttcacaactggtgttgacgaaaaacagttgaaacaataatgtgtagttgccatggtcacatgccaaaaagtagtaggattttttttccatgaataaaagtatccaactgcatgcattcctcaagtacagtttactgttagctaatgcgtgtgtgactctgtcatctaaacgcttgaattcgttggtcgattattatcttagcagggggccgggcccgagcctgtaagaactcgatcaatcgaatcatatcctcacagataatctgaaggcatcagaaagcaaatcaagggattatcaagtagggctccagaagaaattgagtttaatccagcattaaaaaagagatgggtttcttggcattgctt

SEQ ID NO: 22661 - DNA, 15086 bp, Oryza sativa
ggttacagcaacattctaacttcaagtgctctaagcgatatgaacaaggtgagcacatagccattcactgcgaaaaaattgtattaattgtctctggctgatcttgttgagatttctgacaggttgttttcaccgtcttcacaccatctctcatgtttgctagcctggcgaggacggtcacgttttctgacgtcatttcttggtgagtttcagtttatagatatgcaacaatgcaagtgcagttactacaaaatctgcccaaattccatctccacattctaataactgccaaaatcaacacaatatgtatagctcagccagactttctgaattttttgaaccgtaagctctttctgaaatttataaggattcttgcagaagtgagaaactctctttctgaaatagaaaacaagctttacatatatagttttctcattcagagcactgtttaaatatctgggcagagcatatatacaatatccaaattttgtttgctgggtaactccacagcactaacaaaagaattctatcatgtaggtggtttatgccaattaacatagggatcacattcatggctggtggcactctaggctggatagcatgtagaatcttgaaaccaccacaacatttcagaggaatgatcattgccttctgctcagcaggttagtttcctaggtggattgcatgtttttaccctcatatttttgctgaataatcctaatgttagcagtgtcatcaactgacaaaaaatgcaggaaatcttggcaacttgctcctgattgttgtcccagcagtctgtgacgaagatggcaacccgttcggaaaagacagcagccgctgccgatctcttgggctctcctattcatcattgtccatggctgtaaggaacaaaaatatatcattcactgaatgatcagctgaacaaaagaactgacacacactgtatctgcactgcagcttggtggcttgtacatatggacgcatacgtacagtcttatgaagaagaagagagatcaaatgtatcaccagcctaacagcactcagtgccttgacgacagcgatgaagaacatcattctaagaaattcaaagcaaatggtgaagctgcttacgccgatgaggaggcaactcttccggtgtcagctaaactggctcaacacaacgaagagaaccaaatggtaagttgagtggtttgttcctcggaaaaattaatcttcagagaaaacttagtactattaacttgtctgaaattcaggaagctccattgctgtcttgcgagagcaaggttgctaagaaatgctcgtggacaacaacaaacctgaaggacaccatccaccacgttgtcgaggagctgatggcaccaccaactctatctgctgtgtgttcctgacaaaaccagccacaatatttcatctcatcaacccagtcttggactaaatttggttattcttgcttcagatacttggatttgtttttgggctagttccatggttgaaatctcttgtcatcggtgatggcgcccctctcagagtcatccaggactccatccaactgatggggtaagttagtatttacagtgttcttcttcatagagtatatttctgtctatttttcagtgttgcccttcttttgcttgtcttgcagaaatggcacgattccttgcgtcaccctcatccttggtggaaatctgataaaaggtaggatgtcaattactcatgattcatgaagctgtgtgttttctgaacctttatctgaatgtgtttatgcagggctaaggaagtcggagctcaagcgtacggtgatcatcgcgatcgtctgcatccgctacgtgatccttcctctagtggggattgcagtagttcatggtgcatactgggtcggattcttgccacacgacccgctgtaccgctacgtgctgatgatgcagttcgcgctgccacctgcaatgactattggtaatctttccctataacagatgtcattttcttcgtactctctgtatttaaatatatggtactgatgattttatttcgtcgatgcttatgattttatttggtctttaatgtacaatgttgacctctattttctattttctgttacaatataacattttttatagctaacaaaattataatattgtaaaagtacttagcatgaagaaaaaaacatacatatatgattttttatgtcttacactaaatattttgagagctattgttatcaaagttttaaaagtgtaataaccaaataaaatcaacagtatcatatatttaaatacaacgagcgtacttattttgcaaggcaataccatttcgttctaaagcattagtctctgcttccaatgagatctcctctgatcatgcctcttgcatgtgtgtgatctaatacaggaaccatggctcaactgtttgatgttgcccaagaagaatgctcagtgttatttctgtggacttaccttgttgcttccatttctctcaccacctggtccacgatattcatgtccatcctgtcttgaggtcaaagtcgacaagaacaaaatgcgtcgtgatcttggttaagtgcaatgatttaagcatttcagctaactcaaagggagtaggttgaagataataatacgcctctggaaaagagtcgatccaactgaggcttgttcgtgtcaccgtttgcaccacctgtataaaaggagttgagcagtataggcacaacggtttttttctatcccaatctattggttcatttaattggaatggtttttcatctcttaagggatattcataattcactgttttcacatgtcatctaatagtcatgaaaatattttaaatttttttaagtaagatcaatatatacatgtatatcagtttatatacatataagtttattaaaaagttgacctatacagattgaaaaaaaaaaggtgcacagctccagctcctaactctaatttacctggagccggaattgtgccaaacaatccagatcctccatttttggaagcggagttggcagagctgctccacaaaaatatactacgggggtggagctgggtttttttctactccacagctccacttcacctcaaaagacccactaccctttaattttttagtgtatttacgcaaaaatgccactgaattactcctacccacctctcctcccgttctctctcctttgccaaccaatcctctcgagtcacaaccagctgcggcgggaggcggtggcagcgtcggcggtggtaggcacacgacgacatcagggcggcgggcagcgagcgtggcgacgaggcgttggaggcgactagacggcgatgggcggagagccggagacgaggtgcgggaagcggccgacgtgcagcgacggcgagcgggaggtggccagtcggcggtggacggcgcgcgcaacgacgacgcgcaaccgacggcgggcggcgcgcctgggattgggcaggccagcggctagggtttccttttttttcaatttttttttcagacctagagctaaaagctagccaaacacttctcaacgactctccaactctaacaggagctagctcccactggagtaggagtttggagctaggagttggagtttggagccctaccaaatggggctaaagtgtgcatattcacaaacatatttttaatagatcgaatgcaaatctatgtgtttttgaagtgatatatcatgtattaattaatcttgtcgaatttacattgctatctattttttttcataactatgtggatggcttgaaaaaacactctaagggataaaatgaatttttcctatttaattatttcttcatatttgtctgttagtatatgcccgtctattgagaggtaataaaaccaccacatttactttggagttctataattcaccatattaattaaagaaaacaataaataatactattagattatggttggctagattatagctttaatttggagattgatcaacagtgttgtatacaactgtgcattttattgtggaaaacaaaaacaataactgcattaaaaatgtatttacgaaaagagaagcaatggttgtagataaaatacaaatcatattttgaacatacagctcgacacagtattgtaggagaaaatccactagcgtgtacgaaactaggaaatagatgcagtgaccgcaacttctttatggtaaatacacgtatatggtatattggtttcgataaaactaaaatagcatagatattcccgacattttcttttgagtaaattttatttcactttgagccatcttttaactgatctttctcttcagaccatcctttaacggatggttttgctttggactagttaatcttgcttgatactttagaattcggaccaccattaaggctgtgttcggcagcatagtttctcaattctctcccctcttatttttttcacgcgcacacttttcaaactattgaattgcatatttttaaaaaaaatttatatgaaggttactttaaaaaattatattaatctatttttcaaaaaaaaaaagctagaacttaattaattcatgtgctaaatgagttattctattttacgtgtgcggtagatttgttcttaactgtaagtaactaacactaacgtaacctaattattttactcacctacatccaacttacatatgtcaaagaaatgatctatatacaactgtaagagttcattgatgagtaggaaccggtataatcgaaattgttcatacttttcaaaagagagttagagtaatttaaagtgcaacaaaggtaaaggtaagattacccactttggttaaagagtaatacaaaataaaacttcggtaataaaagatagcccaaggtgaaatttacatttttttaagaaaagaacatgtaccctacgaacacatatatatgccctactattaagcacgtacgaaagactgagcctataataatatgcaatctctaaaattattattttaactaagggaccacctatatatttgttgacaaattttctaaatcgtagtgtaattacactataacttgtatgtaattacactgtaacttgcatgtaactacagtgtaacttgtatgtaagtttcacgtaattttgaatcgttagatctattacaagatttgttctggtgaggaagaaaaaaaatcacagcacacagatatgtgaaaggatttgttcccacgacctctattttactgaaataacatgttaccgagagattcttgaaagttacatacaagttacattatagttgcagtgtaattacactacgattgtactgtaattacatttgataaatttttggaggaaaacttgtcgacaaatatatagcaaatttgttaactaatacaggtttgaaccgagaaatatggttggtcataaataaaataatccggacgcagtcaccatacctaggtcgatatttaattatttattccaacgcagagaagaattttagaagaaagttttgtactcaaatgaacatcatgtttcagttcaaaaaaaaaatcatccagttcaaaaaaaaaatgaacatcatgttccagaagctgttgacaccatatgaattattgcagacgatccatgtatcacactccgttcatatattcctgggctgtattatttgcacctgttgaatgggcatgtcttgtgtgtgtttctataagcctctattccaccaaactaaggattacaatcttcttaattatagacattattgagattttgggactaaagtaccaaatcaacacaaatatagaaaaatactcccgtaataaaatgtattgactttggtcaaagtcaaactgttttaaatttcactgagtttatagaaaattagtttatcttgggtaattagttttaaatttcccgtaataaaatgtatttacattatcaaattagttttattaaattaataattaaatatatttttataataaatttatcttgggtctaaaatattactattttttttataaacttatcaaacttaaagctgtttaactttaaccaaagttaaaacatgttacaacatgaaacggagtggagagagtacctaccccaagaccctgataaattggttgctctcgtctcttcttgcttacagaagaatcctcgcttctgtttgttattccacgcttcgtttttttttttttgaattaatattccacgcttcgttgcgcagctctcagtcaaagcacgccaccgtattacgggagatggtcgccgccgccgaggccaaagccgccatcggggtggcaacgccgacgccgacggcggcgccatgcgggtcgacaacaacgccgcgcgatgccgacgtagacgacaagatgaccatcgtcggccacccggcggcgtcgctcccgctggagacgcggtggccgccgttcccgctccgtcggctcggcggcttctggatgcccgagtccctcctgccggccgtcgcggccctccacaccagcttcgcgccggcgccggatggcgtgctcctcgccagcttccccaagtccggcaccagctggctcaaggcgctcgccttcgccgccgcgaaccgcgcggcgcacccgccctccgacgccgaccacccgctccgccgtcgcaacccgcacgactgcgtcgagttcttcgagatgcgccccgacgagcacaccggcgccaccagcgacggcatcgccgtggacgcggcgtcgccacctccgccgccgcgcgtgctcgccacccacctaccctactccctgctgcccaagcgcatcaccgccggcgacggctgccggatcatctacatctgcagggaccccaaggacacgctggtctccttctggcacttctccaagaagatggcggcgaccatggcggtggacgccggcgcgttcacgttcgacgaggcgttcgagctcttctgcgacggcaactgcaccggcggcccgcaatggcgccacgtcctcgagtactgggaggcgagccggcggtgccccggcaaggtgctgttcctccggtacgaggacatgctgcggcggccggcgagcggcctgaggaagatggcggagttcatggggtgcccgttcgccgcggcggaggaggcggccggggtggccgacgccatcgtcgagctctgcagcctcgacgagctgaggagcctggaggtgaacaggaacggcaccgacgtgctcgggctgaagaacgagtcctacttcaggaaaggtgtcgccggcgactggcgcaaccacatgacgccggcgatggcggcgaggctggacaagatcgtcgacgacgccacgcgaggctctggattaagccttgccaatgcaaccccgtctccgcccatgcatgaaaatgaaattaagggaaatttaactatttaccactcttacatttaactatttatcacccatatttgaatgacatactactactctatcctaaaaaaaaactctagctacgaacttagacatgtatgtgtttagattcgtagttaggattaatttttttttaccgatggggtatgggcttaagtactgcagtttatttttttctatatatgttactgcgtgtttcttctgttctggatgtgcggtgtgaagaaggatagtgtgaattatttgtaatataaaatgtgcagttcaaaagatcaaatagagtcaaatttaattgttgttatcctgacttttctgggcgtttgaaaattgtttagcatagaagtcctcttatttgactccaattttccaactagaagacaaatcttcgtcatttcaaattagtcataaattatggtacaaatacgtacgccagatgatacatgaacggaaaacaagtcaaaattttggttggataataataaagcagtactacaataaacaagacaaaagcatttatccttttttttaaggcaaaagcacttatccatgcaaagagagtaaccaacacagaaacaggtgggccttgtgggccgagataaatttatgggcctgtttactgggccccaccaccttaaactccctcctttctcagctggctttgcataggctttggctgtgataataactacggtcatgacacaagtcttttcgtcggcaacgacctttgcatcgtcttcgccgacgatctaaaagacttgcgtcagatggttagaatttagaaaacctgatagaattagggtgggtttagttcacgttaaaattaaaaatttggttgaaactggaacgatataacgaaaaagttagaagtttatgtttgtaggaaagttttgatgtgatgtaaaagttaaaagtttaaagaaaaagtttgaatctaaacaagagctttgtgcattacttactccggtctaaaacttgaggtctcttcgcctatgatgctcaatttttcaatatttgttaatctctttgtaaggaaaacattgaaactggctaagatatttgttaatctctagagtacatgctctccttacacaggaacttatgtactccctcctaggggcggatttaggaataaaaaattggagggctcaattacatagtttctttaacctctagccatctaggaacctttagtttatcattcatggtgagaaaattgaagggagtgctccaggggtatccatgggtcttgtgggtgtattcatagtgagaaaattgaagggattcgagtcccccctacacccacgttggatccgcccctgctccctccatcccagaatataaacaattttaaagttagacacaattatgaagaaagtaggtataagtgaatggtggagggttgtgattgattgagtagtgaaggtatgtgagaaaagtgaatggtggagagttgtgattggttgggaagagaatgttggtggaaaagttgttatatattttaggacaaatcttaagagttaaaagttgttgtattttggaacagatagattgtaaaccaacattcacatataaatatcaaaggaatttttttcttcgcacgtgcatgttggatcttctgcttctgcccttaaagatggttactctagtagtagcaggtcgtacaaacaaacgataaagagaatccggttgaattcaacatagccatcgtacgatgtatctgcaaatgaaaagtaatttgtgaataaaacttttatatatgtgttaagtgaaaagatgaggccacaccctttttcgtttgggtagatgtacaagcagagcggtgaaaatagaggagcatctgccgcgcactggcgctgtgaaactgaacgatgttctttactctactttcctaacttatctctctcgttttctgcgcgtatattttcctattgttaaatagtgtaatttttttaaaaaataatatatataacagttgctttaaaaattatatgtattaatcattttttaaaatttttttatagctaatacattaattaattatgcgctaagccatcgtttcgttttatgtgtagtagggaagtgtttccaactcaagttggcgaacccatccgaaatagggggttgggtgcagaaaatgcccaatttaatgatagctcatttttggtggtatgagttgttaggtacgactcaaaatacgagccaaagtcagggttcatactctcaataccggatcgaaatatgctgagagaggtatcattggatttcgcagagtccgttgataaatcgatacaatatataaaatttgaataaattttatcaaaacttacaatttgatttgaatttttttgtacttagcccaaaaccgagagattcgtgtttctagagacgagtaaaaatatgggccagagggtgtcggtaaccagttttggatggtgcaaaaggtggtgaagttgctaggaatgaaagatggaggcaggataggacggggcaagccgagaaggagctaacctgatcgagtttactgaaaggaatgctagtgggaggtcgccattgttcacaactcaattgctaatgcagtcatgttctagctgagttaaaagcggatgagacgagaagcttcttgatctaattcaagaaatgctcatgggctagtctggagttagcaatggaattcccataggagcacggaagatgcatatgggtttgatcctaaccgcggttgcaaaattgcccatgcacgtgaacatgcacccatgaccaatgagcatggtttacacggttgatcgctaaatttccaacctcatcgatatcatggttttcgataaattttgattgaatttcgaccaaatctaccatttaaccttcgaaattccaatcgaaacttaattccgagccgtatcgaaacatcaaaatttcgtgaaatttgactggttttcatcggaattgtgaaccctgccaatgagactgaacccatgagcgactctcacgtctctctttgagaaatttaggattgtgccattctaaaaaaggatttatccaaataccatctctcaaacacgctttaataatatgctaaaacggtgtccgaacagccaaaatgaatattcttatattcctatccaaatatcgcaggttttaattcctcaaatcgaaaaaatagaaatagaatccgtttggtttcccaaaacaccagtgatcatatccagttcgtgactctagctgtgattgtgaaccgtagttacctttttcaccaccgcccaaataggagcatatcacggctcacggcggcatcgacgatcctcagccgtcggatgtgtttcggcttttgcacagatccccatatgccgcgggggccgaaaaaagtgtcgcgatagtcgcgccctccaactccaactccgccgctctctccgcttccgttcccctctcctccttcctccgttcccctcaccggccgggagcgccgccccgcgccgccgcgcctctgatcacgccgccgccgacgccgagaccccctctccgctcggtccacccgtcctcttcgggagggcggcgccgcgaacgaatctccagccccacctccggctccgggcattgttggaaaaacccaggtaaacccctgttcactcgtaagtaacgaagcgtaggcagggagagcaaagcgagcagccatggctggcggcgtccgggaggggagggagattgagatggcgccacgccgggcgacgattttgctggggcggatagggtgatcgtgttcgtaggcggcggcgcggccacgcgcgcgtctaggcggggaggctcggccatgagcggtgagcggccggcaggctgggtgccgggaatcgccgatcgcgggcggcgctgctccatttgctggctaggctgggccggtgggcagttgagagtcattcaatgcccactacttagtactctattttcgtcatgcaatcgccagcgtgctctatttggtttgtgtttgtttgttttaggactcaaatcgagcttgttttccttcccatgcacatgcagggtgaacgcttcgagggctggagcagctgctgttgcgtggcactgattttcgtcatcttgcgttgctgaggccgttttagttgcccaggcttcctaaaattcctgcctcctctgccactggctgaaggttgttagttgttaccaatctttttttatggacagctgtcattggacctgcaattttgtagtggatatatgctattccaatgcatgcatactttttgcaaagataagtggaatgtggggctttaacagggtacttgtatgtatgttaatgttttctagtcgtgtttattgttcaggatggaggagccaagtcttgaggtgaaaatgcctgaagctgatctgaaggccgtcaaattcagcctcatgaccagttcagacatggtaatctttcacactggctgtagatttaacttactgtcattagaaataaccatcgaatttgtgttatttcaggaaaagttaagtagtgcgagtattattgaaatgtgtgatgtgactaatgccaagttgggattaccaaatggtgcaccacagtgtgcaacctgtggatcgcaaagcgtacgtgactgtgatggtaagtaaatattaattatgcagcatcatataacacgtcttttttctccatttgctaactggtaggagtaattgttaggtcatttcggtgttattaagctggcagcaaccgtgcataatccatgttttattgaggaagttgtccagttgctgaatcagatatgtccaggctgtctcactctgaagcaaaatggggacacaaaggtttgtagtcaccagattgatgtagtttcatcctgaacaagcaatttattctttttttcacaaaacctataaatatcaaattcctaattctctagtgacaaagcatcttcagtcaatgagaggctctcaagagctcatccaagcaatttacttgatgcccagttatgggtttctttcgccagtgtccaacttcttacaagttttcacctaaggagtttagttactttttacttgtggtcaactgtatcacccccttcccccaccaaggcccaattgttccatgtttgggctggtttaataactacagtaatatgagaattgcatataaaacttggggtttaggacttatacaatggggacggaaatcctgagtattatatcaactgccttaacgtgagcacagagttactgttaacttattggcctagtttatttagctatcgtcataagcttttattgcagaaggcagtagaccttttttttttttgctttctttgtatattgatgatgaattagtgaaaaccttatcatttatttccttaacacattcttctttttttcttaattaaagaagactgatgggacaacaattcagacaacttgcaagtattgctcagtaagtgcatgtgcagatattttgtgcatatttctctctcatatattttgtgcatatttctctctcttgtattaaacattgtgtttttcctggacagaaggatggagcaaaactttaccctagtgtaatctttaagatgctaacaagtccaagagtaacactatccaggagtaaacttcaccgtaacactagtgtgatggacaaaatttcaattatcgcagaagttgctggtggggtgacacataattccaagaacaaagctccccatgaaacccttccccaagatttctgggatttcgtacctgatgataaccaaccacctcaatccaatgtggctaagaaaatattgtcaccataccaagtaatgtatcttttagctatccagttgaaaaaaattctcttttgtactgtcttgcaggatagacttcaatagtacttcagttctgtatctatctactttcaagaaaattattctcttttatttgctgaaatctgccaatttggttactgttaattttggctcaaatgcaagttatagcgctcttattggttgctttgattcaaaaatttaaaacacacagaaaacataacgatactgttctagtaagccataaatatgatatattatgatctcacctggtaaaaaattgttttgtatgactataaaactcttcccagattatctggtatggatcaccaacttgatgcataatgggtcaatatggacccatagccatatagcatgatgaataaagtttgaccactcttcgatgaaatcatgatatgccttctggtttgctcttgtaagtgaaaggcgaaagtatgctgtgtagaacatattacaatacaatccgtcatcaaacttataactctggggccatatcaatgtctaaaatgactattgcttgtgatcggtaggagtactttattaaggttctttcagaagtgggtatgcaattctagttggatactgaactggcatgacatattccatcgattcatcgcattccttcatataaataaacaagatgcttatcacaattaatgaattatccttatactcattatttccattttttcaggtctttcacatgctaaaaaaccttgaccctgaacttatcaatcaggttactccaaggcgggaactattgttcctgtcatgtttgccagtgactcctaactgtcatcgtgttgcagagatgcaatatggacattcagatggcccccggttagcttttgttagtgtcaactctcttttaatatattgtttgtttcatcgctttcaagacttgtcttctccttaaactactagtattaatatactctaaccatctgtatactggatagagttaaatcttccagtgagttatcaaatagtcatttaatcaacgagagagcttagagtagcttctcaacatctttattaaaaaggtttcttcattgtactgtctgatctaaccttacttttgtgccaagaggaggcagcactttattttgttcccatggtttagttgaactagcttgtgataggggtttgacagacatgcttgagcgcatattttcaatattttcgcatctcaattatgaactaatactttcttcattccatggtaggatgaccggacaaaagcatataagaggatggttgatgttagtaagagaattgatgattgtcgccagcatccacagttcagtgtttttgcaagttcagttgtcacaagccgcgttatggagtgcttgaaatcatccaaggcaacatagctaaaaccttactctaaagcagtacctatgtagcatcgtgcactttgtcttgatatgtttttccagttgtcatattggcattaatttgttatagtacttttggatgcacaatttttctgaactttctacatccactaaaatttacctataatttatcttggtgttctgataaatcatagtatcagaacttcaaatttggttggataaggcatggtttgtttaactatatcttgtctcttgtgtttaaacacatgcatatgtacatcacaagtgtggcatcttgacaaaccattgcagtggaaattacgttgtgccctgttgttttgttcatttatctccatcttatgtttcccttatttggttcacacatataaaataactatttgccactcccataaagatgtttgtaataacttgtcacttgaaagatgtcaactaattacttgtcacttggaagatgtcaactaattacttgacatctaatagttgagtcctcttaataaaaaacccattttagccatttttcacactctaccttctaatca

SEQ ID NO: 22662 - DNA, 1091 bp, Oryza sativa
ttgatgatactaaccaagtaattactttgtaccatgtaatatgccagtatgaaacgactagcacctactccctctgtcccaaaatataagcatttttagctatgaatatggactattgtgtgtctagattcatagccaaaagttactatattttggttcggaggtagtatttcttatacaccaactacttctgtaacttgctgcttctttttcaggtaaggtaaacagggaggtagttgatgaaacagtttccacatatagagaatcatgcataacatgtagtttctgaaatacctgtatgaaatacaaactgaaggtatcatattgttcaacttttttcttaaggcattgtattggtcaatgagctctcttacaataaatcccagtcgtaacctttttatcttcattgtttcctacatatacatacaattttaaacatacatttagattccaatccaaatgtccctatgaaatcatgagcattttacttcaaaaaaaaaaaaacctcgcttaaatggaaatgagtgatccatggatttccttgtgttctctgcatatcagagctgccatatctagataacaaaatgaaaccaacatggagattactaaaatgaacaatattagaaggtgaagaaagtcacggataaaatgtactaacaaaatcataaccgtgtcaaccaaatcagagaagtccactcgctctagatgatccttaacttctagcgatgcatactcaaaaccatatctatacttctttagatacttcgataggaaaagcaaaccagtatgaactgcagattttgtacccttatggcacttcaaaacttcctgcacagcaaagtactaaagttaaaatcctgtcaaaaagaaagatgaaagggataacatgacaacgatagaccattaaagagcagaccaagaacctgcaagttcataagaggggaatcctctaaagcattaactgggtgatccaaagctccatatgcagcttctgaaatggaacaagcggcccaagagccaacaggggcaccaggttcaccttcaagatcatgatcattgttcatgccatcagcagtatcataagaaaactg

SEQ ID NO: 22663 - DNA, 7418 bp, Oryza sativa
cagttgggacggtccttacccaattttatgagagcaccaatacatgcctcagacagttggtgattagtcccaggaacaaaactaacaagaagatcaacaacttcactagtggcagcaatctctgcattgtactcctcatccagtagcctatttagagcacgaactgcaggttcaacaacaaaagtagagcctgacgtcattaatgatatcaggggttgaaggcattcagaggcaatgggtgatgcccttatagtagaattctcaaaaagaatatagcagagctgagcggcatcattcttaagctccaatgacgaactgaaggataaaattttgtagaggctttcaagtgtagtgccttctacatcaaacaaagctgaagcctttgagatattcccagaagaaagtttgattagagcaccaagtgctgcctgctgttctgtttcagttcctgactcaagcatatcaagtaatggcggaatagcttgccaagccacttcagtgtctcttatattctctgaatcaaagaggttctgtaacgtccttgctgcattaagcctagaatttcttgagcccagacgtaagacagctaccaattgatttgaagtgctaattgaggattcatggtaaagaagatcagggtttgtgtataggatccgcagtagattgattatagtagtttcagttgagtcttgaggacttaaagatagatactttgttaaagcatccaagactccagcctctgccatagctactttatttgtctcactgccttccgctagttgagtcagaaggtgcaaagcaaccagaggtgcgccttgtctgtctggcattggtttaagtagatccacaagcaacggaatggaccttcgagcagtagcactcgtacggacatcttcaagctcaaaaaggcttctcaatattattttacttgggttatctgccaacttgaattcttcagccatagcaacaaggtttggcatagtagattcgatctgtccaatcatagctatagtacccataactgcaccagaatttgcaatagcaagctgtatacttctgcttccagtggaaacaaggctagccagtgactgagcagcaaagtatttgtcaatgatcttgtctgattttagcaacgaagctaaagaaggtattgttcgcattattgctggagattgaacaagcattgaatcctgaaataaagtagccaaaagaagggcgcaagtccatacactctctgagtcttcatattggtcctgtaacatggaatcattgagggccaggaatttgccatatgagacaaaacagtataatttggtaacataaacataatataattaaggaataagtaaagctatcatatctctggtgtctagaacgactaaatatacaaggactatcatgtttctggacaaaatgctcagaatcagctgattatatgtagatagctaatcaggatcttttttttcagaaacagctaattaggatcttgaccgtacaagtaaatattgaattctatttggatatattttatcttttatacagcttaggcgcttcaaagtaacaaggtaaaatggtgaaatcagggggaaatggcatgatgtatccctaatctctcaactcaaataatatagcagttccaaacagtaagcaataagcatcttgaatttaagccaactgattgcagttaaatgatatatagaaatagtatagcgagtataggcacagagaaaattagaaaggaaaggcaaaacatatgcacctgttgattagtggtgtagctagcaagtttatcagatatagtctcaacaccaccgaggtccataacagtaagtttactactcaaatgagaagaacaaataagtgagagcaaccaaagcgcaactgtttcttccaagacctttcctgatccagacacacccagaacatccttatcatagttatacaaactgttttcggggtatggtttccaaacttcaatatctagggatgttggggcagaatcttgcttcatcatatcaatggatgcagatattagattcttcagatgccctgatgcttcaataacatcaattgagtgttccctgctgtgtctcattgcagatatgagggtgatggcactgccaattcttatttccatgtttgttgattcaataactctactagcaagggaagcaatgcatccttgacttctgttcaaatgctcaccaagtagagaaggttggtcctgacataaacttgcaagaatttgaatggccttatcttgaatcggtggaagcccaacactgatacagcgcactaaaggctctaagctttctggaacatcaagaaaggcagaccacaagggagaactaaagtgcgcgccctccttggtcctagccatccatgcaagtacattcaagggatccaaattagtagcattttctaaattgatgccagatagacacaccagcagtgcatgaattataaaatagcactgcgagtaatctggaataacttcattgagggggaactggttgagcaactgacagagcgaccgtgaagcactaatctttccttccaagctcccttccttaagtactctagtcaaagccaggacgatgttgccgtctagtgcttccttggcaatatgtgcatctgataggaaatttgccaatgcagcaattgttgtttcagcagcatcaatggatggtgactttgacatctctataagagtttgcacatagccttcagctatgcatgacatcttgttcttcaacatggcattagccgagtgggagagtgctcctaaagctcgagcagattgtgttgcaataacttggttcccacttgtcaaaagcttcatgcatggctgaataatttcatcagttcctaagatatcacaaatatcctgacgggtactgaaaatatcagccaccacagttgcagcttgttcctgagtttcctcatttgatgactcaagaatatcaataagagatctgagccctttattggctggagctccattctgcactagatctctctgggaagccatcacaagtacatgcccaagaactgtaatggcatgggcctttgtactaagagagtcactaagcagcagtgctcgtaactgattaattgtggaggaatcagcagaccgtataatcttcttgagtgctttagctgatgcctcttgtccatgagggctaccactctttagaagccaaagcaatgcaagaactgccccagcactctcgacacatgcactgatatcatcactgtgacaacacaagttccacaagatatgagcagcatcttcttttgctttttgagatcctgtctccagtagctggacaagtggaggaatacctccagcagcggttattgcccatttactgtcatctacttcatcactcaatatagccaacaatgaaacagcatactcctgatgctgctcactagaaagcccaagaaatgatatcagcaattgagttccttctctctttcctagagcatcccatattccaataccatcagagcacaagctcgttaaagcatgaacaagatttttctgcacatcagcagaagccatagtgatcagcccaacaaggaccttctttgcattcgagtgattaagcctaccagacagacatgcatttccatatagactggctaaagcctcaagaatacgatcaagcacaagattactatcataggacttcaggagcacaatcaaaatattttctatctcaatcggatcaaaagatttaccatcagtgccactaaataccatcaatgtatatgcaagtgcaccaagaatgtcagcgaggggaacaggtggactgggcacctggcagagctctccaagataaagcaacagagatactgttccaccacagatatttgataaagcatgaacagcatgactttgtagagaatgacaagtatccccacgcatgcactcttttgaaggagctacaactgctccaatgagaacaggaatgccaccagcatctaccacagccttctttgcaatactagacttggaagatagagcctccaaagcatcggccgcactttcacgaactgaaatgtcattgtctcgatttaggaggcgaagaagagccttaacagccccggcatcaataattttggggatgctatcaccaaaggcagataccaaccgtgctaaaagggaggcagcatttgactgtgaagtagtattcttagatgaaataagaccagttataatttctactccaccagcttcaagattggccctccaataaccatctttgtctccacagagattccttaaggcaccagtgacaaaaccctcaactactttatcttggtgtgacttaggtttgagcatgtcccagagggttggcacaacaccttctgtcacaaatattttcatacctatatgatcatctgaaagtccaccagaagacacttcaaaaatagcttcagcagccgccttctttgcttcagtagattcagacttcaaaagagagagcaagggtggtatgcaacctcctaacaggaccttgacacgcaggtcctcttccttgcagagtgcgctaagtagtgctgcagcatttacttttgctatagatgtcccacttctaaggatagatataaatagtggaatcgcctgagaatggctacctatcaaaacccttgcttcctttttttctttggccagttcaagcaatcttttagtcgtcacttctttctctggtagagatgtcatgctagtatggagttgctccaacaattgagcaactgtggacattgcactttcaggatcatctacttccgcaagatcacttctatccctatatagcagagaagaagtaaaaatgatgattgcgataccagtccatcaaagtacataaataaatgcatgaaataaagagatggagaatgcttaaaataaacacaaggaattacaatatggtaatgtagaaagtccaacctggtaatctaactttgcaaattacaagattttcttgataattccattgtattaatgagaaaaaaagaagaagaagaaacgagtcaatgttataccttgatctagaagatgacgtggatggtgaaggtgaagttggttctcggtactctcgtcgctctgatgagttggaattcgacatgattaaatagttgcaacttttaccacctcaattttttaatatgaccacctacagtataatagggaagttatttaacataactttgccatggtaccaaaagagagagaggaaagttaccacttaatatcatatgattaccatgacaaaagatactcctgttacttcaacaacaaaataaaagatacatataaccactgctagcaaaaagaatatttgcatattcatgttcatggacactagtgaatggagaaaacaaagacctcaaatacaagatataaccattccaccaactccaatacagtctgttgaatagcaatgcaagaataatcaacctctattacttcaaagagccaacttcattcatgctgcagtagcgaattgcccaacactaattagctgcttcgccatccatcagtttttccctcaaatacacaattgccgtgatctgtgccccaccccaacccccctgtgccagcccatcacatctctgcttctcttctccgacctgttccccctcttcttccccagccaatgccacctccatctccccctcccatcttctcctgctcctcctccctctctgtgcctccacattgcccgactgctgccatcactacacctctccttgaggatgccacctatgcacaagaagcggccactgaggagcttgctgcctttaacgcgctgctcgcgtggcccctgtcctttagcattgacagaacccgctggcctaacaggcacaagattgcctgcgcctccccatgccataatgccacctcttaaaccacccgttcccgccaattaatctgccatcatgcacgctactactaccttgacaagccaatgccgtacgagctggagcggcagcatctacctctttgcactcagagggagcagaacactgagccagaggccatccttggcgtgactctttttttgcggggatccttggcatgactcgtgagacaggtggatgatttcaggcttgactgcgtgagattgaagatgaccagccccttaccagctcctcctcttgagatgcctcagcacttgctacaaatgatctcaagaaaacactagtgtatcgtccaatttcgcaagaaaaaagaggaaaggtaactcccactaacttcctcacctaccgctctaaataagaaaattcccctcagctcctgagggagagagaaagcaacattttattggaactttccccagctttgcatgccatcttctcaccgatctcatttcttatacacttaagaaatatgcaagaaaaattgagccatattttgggcattgacaatttcgattcttagaaattggcaggtccgaggccgcacggggcgacaggcggaggacctgcgcaggcgaaggcgcgtgcggcatcaatggtgggtagcgtcgttagggggcccgggtttgctcggcgctggagcatgcatggggaagggcaatacaccggccgccgccggccgaagccgtcaggatcaaacgaaaccaccgccaaatctcgccgcctctacctcgccggcgggccaccgagcgcgagatctcggccgccacgctcgtcgacacccccatcgtaaccaccaccccgctcagctttagtcgatcgaattctagcgcagcgtcgcgtcgcgcctccaaccgccagaaccaaaccgatgcgagattggcagtataggaaggaaagcgggggcgggactcaccagatagccggagacggtggccggaggcggcggtcgctccggcgaagtgtgcgcgtcacagcgcaggagagagagagaggagagggtaggggggaagagtggagtggagtggagagagaaagggatggcgttattgcggatcagtcctgtcgttttcatgctattctggaaaaggacagccggcttgcgttgcgttgcgtggtgagaattaaaattttaaataaatgtgaatcatcgtttccggtttgaaaaaagatgcgattgcaacagtagaagggcccggtacagctcttacctaggagacattgatagtgacctaattctatcatcatcaataactagtatactagtaatatatatgtggtgtaactttatgcaactatcattgtggcgctttattgataacggctatttttaagttatggatgttgagtgagtacagtaacgtttttacgttagagtattataacgtatgagatatagatttattgactttcaagactaagagatagccatgtgtttttgttgttttatgcaatagttggttatggcaaccatagtagccaaataaatc

SEQ ID NO: 22664 - DNA, 26340 bp, Oryza sativa
  unsure (1)..(26340): unsure at all n locations
atattgcagtttgatgataagaatcaaacaactgaaaggaaccgtattcatatgttatgtttctgtgtactcaccggtagatgcttgagcaactcctgctgtacatatcatatacaaatgctctaccatcctcacaaccaattataacctctggatcggcataactgtggaaagtggaaacaaatgagcattgggggttaaagctaacaaaatctttatcataaaacgtttggacagcacacgaccctacgcaataatcctgtgcctctgagattacatgctttcatgagcaattcagtaatttcagtagtatatgtaacatctaacttttcatttgttcgaaacaaaaggcatgtcattttacaaacttaaagcatgttcctcacctcatacataagccacggttgaatgaggctccacgagattgaaaaatacttctcggctcactacgtctccatatgcaaagctgggagctagtcaaacctacaatcttcacagaggattggaattttataacatgtaaataataagtctatagatatggtgtggttcataacttaaatcaaagttgtttgaacctggtttactgcatctccatgatgaatagaaaagtttatacaatatacaactattagaatcaccaattcagccaatgttattaagctgaagatgataatatagaacatccaagactacttatgtgcaacctaatgcacataatggtaaaaatcccaacctacaaagatttccaggacaaagcacagctggtgtttctaatgagaccataaccatctccagttttatatgcacaccattttcccatatgttgaccactatcgtgggggggaaaaatgcacctacaagagtcagcaactaagcaatcattctcattatgcttgttgaatctcactaatatataatcgaattgcttcaaatgttatattaataatacttgtaaggatcaatagcataaatagtctattttgcagtttccattcacattcgaaaaagaaacatagcactaaggcaaaggagatcaaatgcttatatctgcacaaataagatgtttaaatatgtggctggagcttctgacatataggtgagctactacaaataggccttcttgtacatagttacagaacacttggaatttcatatggaacttttactgaagcaagaatcaattatagcccttcctgtcaaatgcataaggacaaagctagtagcagctagaaattaagaacagaagtactgaaagctaccaacatcgattaccttattttcatcaaaatcaaagttgaccagcattttagaacttggaacaatgtactcattcatgtatttgcaactttcagcagaccaaagtcggagagtctggcaaaaatcaaatgccaagatgatcagcatgattataagatctgtgacggtattaaacaaaattaaaaaaaaaagcagtaagcactaaaaatcttcaatcatgctttcaattatctaaaaacttcgcaatgtactcaggcagccatggtttccacaatcatgtcatgtcatgtttcatctggcattctgcactactatagcatcacctgaatagcgagagtggaaggccattgaccatacccctattttttaaaaaacaaatataaatataactttttttttgtatactacatcactacatttctttttgctaaaaggacctaccaaaaaggtctaaagcacaaaaattattattgtactagtacaaacattaattatttgtgcctgttacatcttacttttttatttcaaaaaacagccatttcacattgatgaaggataataagaacggcacatgatgcaaggctcaccttatctccaactccagttaagattgaaccactcttcatgcggcatatggtggccctgaaacaagaaatagaaaactgaaagaaaaaaatgtggatattgagccacaatcccaacagtgcagctccagaaaagaagatacttgatcaaatcgaacaatatgaaaaaactaaaaagaaaatgtttgagaacacgagaactcttttagttgatataactaattcactatgcacaagaaacagcctaaatacagaagctcagcatagtacagggctacaggcttactggttaggatgaccaatccactgataaacttcagcaggacctctagagaaagacgatgcatgttcatcaagtgcaagctccttgaagtaactctttattgaagtattagaccctgaacttcttgcttgtggattcctcttgtaatatagatccctcatcagatgagctgtgtcaataactctattcctataaaccaagcagagtagaataagtacgtacaaattttaataacaactgataaattgcttggtaactttggaattttcacaaggaagatctggcggcatagacgagaaacatgcatgaataaaattaccaaatgaaactaaaatgattagcaccataaatgtatttgtcagtatggaaaatggtagctggaaaccagaataacactgaatcactgaattaatagtcaagtcacgaactactggacagagtatgaataatatccaaactaaaatgattagcagcataattggcatagttgtcaggacagaaaatggtagctggaaaccagaaacagcgctaatttagcagtcaagtcacaaaccactggacagagtatgaatatccaaagaagaaacacacaacactgattagctccccagaggtacatggttaagatgcagataacaaacaaatgagaggttaaatgcatcttcaacaaatgttaccatgacgaaaactcatcaatttgactagtcattcagtgttctaagcaacagttactttgaagcatatatatataccatttaaggaaaaaaggaaaaccgcagacccggagtattgggacatgcttcatagttatccacttatcctgcaacctctaggcataaaatccaggcagcagagttcaatgcaatgcgacagcagagtagtaattgaggctatttcttctaatctcgtagtagtagatacctgccgtattgtactgtaaattagagcaaaaaataaacatccccagcgaaacccaaacacaaacacacagcgtgcgtggtagcagtaggagggggaacatgggagtgaggaggggagaggagacgattcgcgcggcggatgggacgaaccatgagttgcagacggtggagcagcgggcgaggtcgaagtggtcgtcgaggcgggagaagacggagcggagggtgtcgtcgttcagcgcctgcgccgtcgaccccgacccgccgccgccgccgccggggcccctgcggcgcttcaatcccgcgctcccgctccgtccccggctgctgctcgtctccatggccgaacccctctctctctctctctctctctctctctctcccgatctctctggaggcgccgccgtttgctcgttggtttcacggtggccggtggccggtggccggcggcgactattcggtccttccgccgattgtgtggtggataacggcgtgttgacccagcaaagtcccgagtcgatctggcccaatggcccattacactgacaactaactcggtacatttaggcccatcaaattttggatcgctccatggtagtaacccaactcggcccaacttaattttgaatatgtaccatgtcagctatcgaacataaccacccgaattttgtagggaaaagtgcactttacagattataattcgtagccctcaatcacaaaacctggtatagcgtgtcccctaacttttaaaataagtgacatatgaatctcttggcagttttagacgatggtttcattctaagtgacatccagatggtattttgactttgtcatcattaacgtggcatgtgcatagcatttataataattaataaaagaacagtgtgatccacatgtcaatggcatcaccccttattcctcatctgcctcctttgtctctctcgcgatcctcatctcttcttctttggcaacgtcggcatgggaaagggagcagcggtcacaagagagaggagaaggttgaggccattgcagtggcaagagaaagacagttgaaggtagagcagtggcgcatctgccacgacctatagcaatcactgcggtgtagcctctgtaacgtggccgcagggttctcctttccttcgccggtgcagcaaattaaacgacgagttggatgaggaggtgaagaacctccatgaattgatccgttgactcgctcattcctgccggttcccctcaacgctctcccatgttaatgcgccgagcaacgcactgactctggttttgggtacagctacaaatgtgtgaggatgatggggagttcctaaaggttgcatgccgcaagttggagtcgatggttatgcaactatttgccaattatggatggaggttcacaaatatatttcaataaatgtgttctccttattttggcttggtttcctctgtttttgtttggtgtgtcctatttagccgaactatgctcttttctggattgctacaatgtaataattggctgtagctctttttgagcaaaggctgggatgttaaattccattatctaaaaaaaatgttaatgcgccgagcaaaatgatatggggaagagaggatgtagaggaagaagggatgatatcaatgatatgtgggtcccattgatttttttttaatgatgctatgtagacaccacgtaggacgataccgtcttccaaaccgctgagaaacttgatttacactggttttaaaaattagaggatgttaaatacctgttttacggttaagagacctaatcacctaaagtggactttttctaattttgtaacgtcatgattggtgtcgatccaactcgggccaactgaatcttgatctgctgttcagtgagacatagtgatagtgagtagtgacggccaacacgtcagcggtggttgatgcgttacggcccgaccaannnnnnnnnnnnnnnnnnnngcagcggctgatagatcggtgaggccaacgccgctaccaagaaaagctggctcctgcactaacctaacaagttcaggtagagagaaaaacatttctctctatatttttgcagttaacttaaattggtgttgtaatgaatagtatgattatattgcttgtttatttatatggttgattcatgcgcggtttggaattttgtggtgctgactcttgcatgtaattcaaagaagagtagagtgcggtttggaatactgatcgccagtttgaccatgcagatgtcaccggtttggccaaaagaagatcagatggtctgaccgcccttcgccttgctgtcacctgccaccgccttcggtccaaccgctgtggtgccatcagtctgactaccggcatcctgccggtgtgagactgccaccataaaaacattaattgaagaccttttaaaagtagattgaactttattacttttatttgtgttaacaaaatataacaacattactcctcacgctacaaaatataacaacattactcctcacgctacaaaatataacaacattactcctcacactaaattcgactaaactcgaaattctaacttttctctaaacttaattttcacaaaatccataccggtaggcctcaaccctctcactatttatgtccgaggttggtagcctaaaatcacgaatctaacttgtacaagatgttttaatccactaggaaactttcccgtataaaaaacaaatttatttcatcattcgaattctaatctttccaaatttggactcctttcaaaattgacttttttttccatatgcgcacgatctcccatcaatatgtcgtatgaaatctccatcaataatttgcattgttctttatcctaagcataccgcatgatatctcgactgatcgggcgtcatcttatctcaacttgacttccaattcatcaccgacaacgctctcctaaggcatcaaggtacacctatatatatgaaccaaacaataaaccatatccgagcataagttctttcccaacttgctctacattagcacacaacagtactacacacgtatagaaatcatctagaagtcataaccacaagatagttatgagtatccaaatgaacaacccgaaactaaccccaattaggatccagccgatcagaccatccggttggcctgtcagacctcacgtactacgctggtctgaccggtctacccgtgtccggtctaactggctccacacagagagcaccactttgtcataattatcaaatatcaaaataaattacatgtcacgccaactgttcatcataaattaataatcaaaaacacactttgattttacaaagacgatgtgaagttctatatcaatacagcaggagaagaaattacaaggttataaccctaaaaggatataaccagaaaaaagataaatcgtatcaccacacgctagcagctaataacacatccccaataaaagcactgacatcaaatcggtcgccgttgtgcttcttatatcaatgattttattctcgatattatatcactaatatgtgagcttaattaattacagtggtgcaggtgcagatgagatattgtctaggtgccagcttgataatcctccccactccaactaggacggtaccactcccaaaccggcaaatattataaaatttataaccgaaaagagaagacagttgtagacggtagcgacggccaatggatactgcctcttgacggcattagtccggtgactgcgccacacaaacctccagaatatacgcatcgtcgttacaggttcaacccatgttccgacattgacaaccaaaacgatgaggcacacgtagataaccatgaacacgatggagactgccctcgaggttctcatcgtggcgcgaaaagccgcaaagaaggccaggatcaggctgacgagcgagacccagataaagtgcaacgccgccacgaagctcttccacgagccggcggagcgcgatgccttcccgtagacgagtaggatcacggcgaccaccgatgccgctacggcgacggtgtcgaggaccatgaaccatttgaatgagaacctgcccttgaggttcgccgtgccgtcgtctccgtagctgcctggcatgttgaatccggcggcaaaggcgacggtggcgatgagcacggccaccaccgcaaggctgtcagttgtcctctctatccctttacctatgtcgcggccgctccacggctttagatggtcattcctttgtggtcggccttgtgccccaaaagcaactaatatcaccacaaagcttacctgcattgcatgcacaccatgaatatataccattaagctgagggcccatgccatcatctctgatgtgtttgggtttcgtcaaaaaatagtggtcagttatgactccacctaatttctaacgagtggaggcctgtcagtacatgtggtggtcaacatctctgacaagcctcatatatgtaagtgttttttttctaatgaagatcaatcataccaaacttctaagtcaagatgtattgaaccatttaatgcttgcacatatttggttattgctcaccatgttgaacaaattggtcgatgtcgaagcgagatcaagcggcgagtgtccatcgtcgttcaagacatcgctttgcactttccccttatggagtaaggcattcacaatgtcaggcgagccggcaaccacggcgatgtggagcggcgtgttcccaaccccgtcctgcgcgtccagaaggccaccgacctgcttgtgtttcttgatagcgagggacacgatcgaggactgcttctccctgaccgcggtgtgcaggaaggtctctccatggccgtcacggagctcaacagcatcagggcagatcccaattagttgcttgacaacattggcatgtcccaacctagccgcgacatgaagagcggagaggccatccgagtccttcatgtacactgtgccagttggcacgatggctaggattgcatgtacgattttgcggttgccgtcggatgccgcgaaatggagtggggtgctgccattgcagtcgacctggctagccagttctggcttccattgcaataataagtgaaccatctctgccaaagacacaaatttatcaatcgagttgacaaacacattcttgttttgtgcttgagatctgccgaatcaacatgagccgatatcttacctaagcttcggaagacggcagcatgcagagcattctgggagctcggcccaacgggtgatgcgtcgctgcaggtagtaactattgctcttacggcaggcactgacctgctcatcactgccaagtacaacggtgacacaccggctttgtttagctcggtctgtgaattagtttgggtggaaacgatcgcactaatcctgtgcgtcgccttcgtgttaatatatatgtgatgggaacagcccccatcgtggcgatacagagttcggcgcagctgagaacaaccgaagccgagattgatgaaacgactgcatgcagtaacagaaaacagaaaacaaactctaacaaacatctgttatcgcatgtggaggaaaggctaacctgatccgcatggatagactaacctaatccaaactaaccttaacaactacatgcatgcaagctatcaggtcgtcatcacatgatccgaacctttcatgctaactaacaccctctctcaatccggacctaaccaggttcagattgcttttgaaattctccaggagtcttactgacagaggtttagtgaatccatctacaacttgatcattagtggaaacaaaatcaatttctagaagtttctgacttacccgttctctgacaaagtgatagtcaacttctatgtgtttcgttctggcatgaaacactggattagctgacaaatacttagctccaagattatcacaccatattttagcagcttttggacttttaatctctaactctgcaagtaaagtctgcacccacattatttctgcagtggcattggcaatagctttgtattctgactctgtgctagatctagacacagtggcttgttttctagcattccaggagaccagatttgaacccagaaatattgcaaatcctcctgttgatcttctgtcatctaaacagcctgcccagtctgcatcagagaagccactaactaaagtagatcctgacttatgaatttcaagtcctaaccgagtgcattgctttaagtacctaagaatccttttcacagcaatccaatgtacagttgtgggagcatgcaagaattggcaaactttattaacagagaaagctatgtcaggtctagtaagagtcaaatattgcaaagcaccaacaacactgcgatagtgacttgcatcttcaggccctaacaatgagccttcatgaagagagagtttctcacttactgaaagaggtgtattagcaggtttacaatctatcatgcccactttcttcaataaatcattggcatacttgtcttgattcagtacaatgccattctgaaccttgcttacctctattccgagaaaataatgcagctcaccaagatctttgagtgcaaattccccttttagattctgaagtaaagctgcagtggccttctctgaagagctggctacaatgatatcatcaacatataccagaacaaacatagttatatcacctttattcagaaagaacagagacgtatcagcttttgatcctttaaaaccaaggtccatcaactttttacttagtctagagaaccaggctctaggtgcctgttttaacccatatagagctttatcaagtttacacacatgatgtggcttagtaggatcctcaaaacctggtggctgtagcatataaacttcttcttctaggtacccatgcagaaaggcattttgaacatctagctgtctaagactccaacctttagacactgctaaagacaatattattctgatagtggcagctttaacaacagggctaaaggtatcttcataatcaataccatacctctgtttaaatccttttgctactaaccttgccttatacctatctagggtaccatcagctttccttttaattttatacacccacttacagccaataatatttctccctctctgaggaggaacaagatgccaagttttattcttaactaaagcatcatactctgaatccattgctagtttccaatttttatcctttaaggcttctaaatcatttgtaggttcacctgaagcagtaaaccaagaatgcttatatttaatagtaccatcagtatataccttttctttgcgaactccactttgcaacctggtgcgcggtcctgccggtgcctctgaacctgtgtcagtcacatctgcatgctgtaatgtattagtctcatctgtgacagcctgtgcatgttcctgcgctggtgaggactgctcctgctcctgcaccacctgcgactcctgctcctgcaccgcctgcgacactgagtcttctgctgtctcctctgctagcgatgatgctaccccccgtggcacagaaccaggtgtgggacccggatgacggcctgatgacgtggccgcaggggagtggtggacgacacggtctggttctggaccaaaactggcatccagaggaggcgtcgccggcggatcttctgcatcagcgggatgtactgcaccatctctatgtggctcattagcacgattagataaagcagcagaaacatcagcagataatggattagtcactggatgcatgcattgttcattcccaacagaccgtatgggtcctagcagttcaggagtgagaatatcaatctcagaacgaagacgggcactagcattggcatgaagttcagtgaagggaaaaatattctcatcaaagacaacatcgcgagaaatatagatgtgtcctgtagagacctcaagacactttaaccctttatgcatagtgctaaacccaagaaaaacacaacgcttagagcgaaattgtaatttgtggttattgtaggggcgaagattaggccaacaggcacaaccaaaaattctcaaggaggagtaatcgggtttttgtttgaacagtttttcaaggggactaatattatggataactctgctaggcacacggttaataagataagttgccgcctgaaaggcttcatcccaaaactttaatggcatggatgcatgagataggagagataaaccgatctcaactatatgacgatgttttctctcagccgacccattctgttggtgagtatgaggacaggaaacatgatgaacaatgccaatcttagaaaaaaaagagttaagggattgatattcgcctccccagtcagtttgcatggctagaatttttctatcaaattgacgttctaccatgacttgaaactcctgaaacttgtcaaacacttgagacttatgctgtatgagataaatccaagtaaatttactaaaatcatcaataaaactaacataatatttttttctcccaacagactctggagcaggtccccaaacatcagaaaagacaagttctaaggggtgtttggaaacactggaagaaataggaaaaggtaattgatgactctttgcttgttgacaagcattacaaactgactcactagacaaatctgaacaggggaggctaaacttattgactacttgtttaaccgtggtaatggaaggatgaccaagacgatgatgccaccggtccaaagatagtttgatggcactgtaggcttgcttcaaggaggagtgtggtagaggatatagcctgcgccatgatcttcccttaaggagagtttttcctggtgatttgatccttaagaaagaaataatcacgatgtaattcaagaaaggcagagttatcattaactaagcgatgtactgaaacaagatttttcttagcttgaggcacatataaaacatttctaaggtggatattacgactattgggattatgaacaatagcatgaccaatatgactaatatccatacctgcaccacttgctgtgtggatttgttcaccaccgttgtatttttccttcatagtgagcttgtccagctctcccgtgacatgatctgtagcaccagtgtcgatgtaccaatttgtgtcaactccataggagttaaccgctgcagctgcaacatgcttggcgtcaggaacgtaatcctcgtcgtacctataccaacaatctgctgccgtgtgcccccgtttgaaacacacttggcagattggtcttttatcaacgcctcctggtgtgcggcctcgaccacggccacctcctccgttgccgcgaccatggccgccgccgccgccgccgcgcgaacctccttggccaccattgctgttgccacgccccccgtggctgaagcctccacggttggcaacattgacggtgacctcctgtgcgccgcggtagatggcttggcgagcttcaaagttcaacacttgagagtacagatcactcacagagattggttcaacccgagcgcagacagccgacaccacctcgctgtagccctcgccaaggccggtgatgatatactgaatcagctcctcttcatcgatcgggcgacctccggcagtagccatctcatctcctaaggatttcatttttgcaaaatactcaggagttgacatgttacctttctttgtattggtgagagcaaaccgagtgttaatcgctcttgctcgtgtgtgggtggagtacatctgctcgatggcgctccacacttcagccgcggtgtcgcatgtagcgacctgcatcagcacctctcttgtcagcgacgagagaaggtaccccagaacttgctggtcggtggcttcccagtcttcatgggctgggttcggctccttcttggtggcgccatcttttgtgacagcgatctctgccggcggccgcttggttgcaccggtgagatgcccctgaagccgcgctcctctaactgcggcgcttacttgcaccttccagagcgcatgatttgccttcccaagcttctctgagattgggtggccttggaacggatttgtggcagccgtactggacgacgaggccatgagtattgatctcttagggaattgatcaacgctctgataccatgtgaattagtttgggtggaaacgatcgcactaatcctgtgcgtcgccttcgtgttaatatatatgtgatgggaacagcccccatcgtggcgatacagagttcggcgcagctgagaacaaccgaagccgagattgatgaaacgactgcatgcagtaacagaaaacagaaaacaaactctaacaaacatctgttatcgcatgtggaggaaaggctaacctgatccgcatggatagactaacctaatccaaactaacctcaacaactacatgcatgcaagctgtcaggtcgtcatcacatgatccgaacctttcatgctaactaacacggtcgccttcgcacgtgccacgacaagagcctccacggtggcgccatgcccgtgcctcgctgccatgtgtagggccgtgtccccggccgcgttctggcatcccaggatattctcctcgcagtcctgggccagatttacaaggatcgtcacggtgccggcgtgccctgccctcgccgcgcagtgcagaggtgtgtccatcgccgagttccggcgagagaggagactattgtccctgatgaacctatggtagagctcctggatcagctcgccatgccctttctccgctgcgacatgaagaatggtgttcctctccgccgtcacctcgagtacgttgcactgtctgtgctgaatgatgcctgaaatgggtacgaggagaattaaatgctgcttgtatgatgatatactagtcaaatgtctgtgagttgcaacagaaatcaactttttgaacaaaagaagatcattattgtgtggcggactagagaaggagagcccatttctttttttctagttctcacagggtcatcccccctggttttctaattttttgcatgctaggatgaccgaggatagaggatcggtttggggttggatttttggatgatggcatcgtgggcggagatggtttcgcaagataaaataggtttattttattggtactaagacggttttgaaacatcagatacttagttttattggtatgtctgtgagttctaggcaaactgttgttttcctgacagggggtggtgggctcaagtaacagagatagagatatcataggcttgcatttctttatatattttttgaaatgtttcagtattgtagctaacatttaagggcaaatgtagatgaaggacgtgcatggatttgtatttaaaaatcaaacaatggacaattttgatttatgatagtagcactccatctctctgtgcaacaacctccttgattggggctttgcatctcgaggaaacatcacgtttgtcccaaacaactttggatatacttcctctgtttcaaatactcatcacttagaccctctttgtttaggcttaagcttcagtttatagccagaaaagctaaagcccaaacaaagggcaggctttttcatctggcttttaaaaaagcctaagccaccctataactaaaagccgaaagcccatagaaaggtgctttttctggcttttgtgggttggagaatatccagtgccattaaatttgataacaaattacccaccatgcaatccatttataattacggaacgaatcgttttgtttgaattctatcctcgagcgagagcgaaccaaggagccatctctccgccgccggcgacgggcatcggtggccctcttcctcccctaggcccctgctgctcttcttcccaactgtcatcagattcttccctgacactagcgccatcttcttggcagccttctgtgatcaaggtaattaagacaagcccatattctcgatggataaattagcaggtgacaatgatggaatatcagtatgatgtgttttattgcgtgatttgcctacatgatttatttagaccattaatgtagttgttacacagcacgaagttaaattgctgaatatctttttttttctgaatacattgctgtgcatctttactgcctaaacatttttcatgtaataaagtcatgtagcattacataaatcttactataaatcattaaaatgtgtttatggctgaatgtaaattgtctagatggatctagttcctcgatccaaggcaaattgggacacatttagcaacagggccttttgtgagatctgtgccgaggaatgtgaggctgggaatagacctacgggttgtttgtcaactactggctacaaaaatctacagctgaagttctttcagaggacagggaaaaagcatgaccaaaaacaattaaagaaccactgggaaacactaaagaaggaatacaacttgtggatcgaactgaaggaaaaatcaactggattaggctgggatccaattaaaggaacatttactgctgatgatgcttggtgggcggaccacatagtggtatatactatttaaacactttacatgttccagttcatatttacatttaaacttgtgctaactttgttcttttttccctttttagaagcaccctaatcatacgcattttcgtaatggaccaccggctaatctacaagaaatggacgtcgtatgataaagcttttgtcactggtaacagttcagctatacccggatcttactgaatttgccaagttatcggatgaaaaggcaaacgaagattattcttgcatgtatggctcttcacaatttcattcgagacagtgttttgcgtgatgaactttttgggagatgtgatctcgatgaagagttcgatccaaacactgaacaagctagttcatctcaagaaaatggtatcaatggattagcggtggatgatgaagacatgaatgctttccgtgataggattgctaattcactaacggcaacaagggcatagattgataggttaatttatatatatgtgcttgtattattttacttcctcatttgttgtcgtggcatatatgtgatcttattattttactaatataatggtcacggtaattgtaacaatataagatgatgtttgtgacgttactagcagatcatacgtacgccagaaaaatacatttgacaatgtccttagcttgtaaacaagccaccaaaatctcaggggtgttttggaccattcaatagttagcaaatcagccatcccacacaaaagctagattgccaaacaacacagtggagacttttaagccaaggaagaataagctgcctaactggaaaaacctggcataagctgcttatctataagcctaagcccaaacaaaaggcccataatcctatttactttttaattttcacagcttcctccccttttcaaaaagtttatatatacttgaaagtaatatatatgcgtcgtaccataaatacaaacgtgcaacttttataaattaatcatttaagtgttatcagtggtcaaggttgaaatgttgatggtcaataatgaaaagaaaacgaggatggagagagtatgataaaattatccaataatatcaaactttataataatttaaaccaagtcaaaatatattttatatatggtgtatgaattgaacttatactaatcttcatattacaaattgtttccacacgacattgattttgttgtacaagtcaaagtctctggattttttttatcaaaccaaaacttaccagggcaacacggtcatttggtgctctggtatggactatacgactctatgagcaaggatgtttacacaccttatacgaagtgttgatacgtgttacaatagtgtcatgtcaagaaaggaacaggtctgtacaagacaagagaggactaatacaattcaaagtcaccttgatgcatatcacatcacattcttggactattgggatgtttttgaatggatgattgagttaatagactcatggagcgatgaattacatactactccctccggttctttaataattgacgctttggataaggttgagatcaaacttttataactttgaccatcaataactttaaaaatatttagtttaaagaaactagaataacatatatagatttatctttcaaagcactacaataaaagtaaacatgtatttatttattgtatatattataatagaaaaataaggtcaaagatatatttgtagaccgtgtcattgtccaaaacgtcaattaaaatgaaaccggagggagtatatttttttccgagtgcataatgatataaaaaaacattaaaaaatgtaagacgttattaaaacattataaagttgatgattcctaccaagaatttgagatggcaagtgtttatttccataaacactttataatgtttatggaaattattggtaggaatcatcaactttgaatgattataatgtttataatcggttctccgtaccgattggagaaaattaagatggcaagtgtttcctttgaatgaacagacaactgcagtgataagctgtgtgtggttactgttaaattaatcaattaccagcgacttgacgatgtgctgctgcaccatcgccgggccgttgctgcagaagcaacgccatgacctcctccgctcgcccgctccgtgcagcgcgatacagcgacgggcacatctccatgcgaggcgcctcatcaccattcgacgccgccggctgatccattgatggagtatgcatgccgtacgtacgtgtcaaattaagcttattagagataaagaggatataaagtatatgctagtagtaactagctgtaagaattagctagctgcagctgcatgcgtgaatatatagtgtgcagctgatgaagctgggggaaagggatcgagatatttaccgcctaatacgtacagactgaatttgaggctgtgaatggcaatgcataccctcatcctggactccacaactgcaacctagctagcttcctggttgctgctgctgtcaatattgcaaattaagtctcttgttctctaccgtacccgggtcgttactcatgcgtagtatactatggctgtgtttagatcaaagtttggatccaaacttcagtccttttctatcacatcaacctgtcatacacacacaacttttcagtcacatcatattcaatttcaaccaaaatccaaactttacgctgaactaaacacttttctttttcatttcaaaactcagcagaaacgcatgcgcttataaaacgtgtgcacaggtacgtactccctataaacgcatatcctttttatataagtatatatccgaagattagaccaacatattgactcacaaagttatcactagtaccttgttatcgagggaaattaagtcactcactcccttcgattctataattcttaacattttgagcaataacactcgatctctaaaatatacatttgattatatttttgtaatatatgcaataaataatttttttttacttttattatactacaaaacaaattgtcgacgtctgatgtcacgactacagtatttggacagtatggagatcgttggtgttaggatatacgtgagactgaggtaaaagagacggagacagagatttttatacaggttcgggcccctcgtaaggtaataaccctacatcctattggccgaagccggtcgttgatcttattcaccataatcacactagtacaatatttggggtagcctatctaactgttgtcgacatggcggtctataggtctgactcgtagtcgacaacagggtagccttcctcctcgaatccgtatccggcgagatcagagacaacgctagatccctacggccggcctctgaaggtaccagatagggtcgatccaggcatatctctgatgtcggtatccggcggcttgtcttggcgtatgttggcttgtatgttgttccgtagattgtggtgggtctcttccttcatctctctcctcctagggggtcttgtatttatacacataggtgtccccttgtccaagtagaactagggaaatcaatatggatacaaatccgagtagtccttgtcgtttccatgtagaactctgattgtatttccttattcggaactccctccatatctgaaggttgtttccgtataagatatggtatgtggtgggtcctgccgagatttagtcgactactattaggtatgtggtatccataaccctgacacaaatatatagatgttgacttaaatattcttaaaattatttatagtgaaaattataaaggtttaatctcaaccttaacttaaaacatcaagaattatgaaattggatagactattacttttaaaaattaatcaattataaatacatgtacttatataaacacataaaaaatacgggttaaaccagtacttatatgaactatactagtactaggctactagctaggaaatcaggagtacctgtacgtccagaattccagaaagggacgcacggtcattctctcacactgtcacgcgcatcggagaacatctatctcgtcaatttgactcgtagtatttgcgtccaaatttttttgtttgacttgtatgcgtttcctgcttctgttggctttcttcgaaaagccggatgtccggctgccgtcccaaatgaatttgcccctttggatcgtccgcgtgtcgctcaattaattagaatcgtcttcattcgtggggttcagaaaaaagaaaggacaatgcacagggtaaaaggtgcaaaatatactagaatttctttttacggattcgtgaaaactatcggcagtttttttcctctttaaaactttctaaggccctgtttatttcagtttgaaattattataatttagattattgagtcagattactataactaatctgtagtagaataagcggttagttatttctttcatagattattagagcctagattattgggtttgcaagtctaaatagggagtggggtggcatgatgggtaatttttcacccaataatctggaaaagctcacctaaatgagtttatcagattattattaactgggctccagattataataagctactttaataagttgtctgtttctttcagcttacttccaataatttagattataataatcccaagctgaaagaaacaggaccttaagtcatctaccatctgattgcatcgagattcatacaacgaaggacaaaaaaaatacttatgtttttctacacatgctcgagaaggacccaaaccagcggaagcaggctgcgctagccaaccggccaccactggtagagaaatcatctttggtcggtcgacccaaattcacaatagtcccggttccattaaaaaccaggatttttagtcccggttaataagaggaagatctttagtcccgctaaaaatcatctaaagttcatttttagtcccggttgattccatgtcaggccgtgtcaggaccctatgatctttagtcctggttagtaacaccaaccgggattaaaaacctatttttagtctcggttggtgttactgatcgggaataaaaatcaaaacacactatataatccatagtaccgatcctcttttcccgtccacacaacaaactcctccctctatctctttttttcctttctaacttcttgtctctttccttatctctaactcctctcctctccttccttttttccttcacccacagtgcaggcggccggcgcggaggcggcgacgcgggggacggcacggaggaggcctgcgcggcggcgcggggggccgtgcggcggctgcggtgggccgccggcgcggcggcgcggggggccgcgcggcggcgggcggcgctggctggccggcgcggaggggaggaggggaggcggcagtggccgccagccggattttttttctttttttttttttgagatgtgaatctgtgatgtatttttgtgtgagatgtgaatctgtgatgaattttttagaaccctgtgatgtaattttttttaagagtttgtgatgtatttagagatgatttgtttgaggatttgaggatttggagatgttctgtgatgtgatgatttggatatgggaggggatggtgtgaaatcaatattcaatattaaaagcggaaaataaaaagaaaaaatatctttagtcccggttggtgttagcaaccgggactacaccaaccgggactaaagatgctcctattaacaccaaccgggacgaaagattgatttttagtcccagttatttgaatcagtactaaagatagcgatctttagtcccggactcgtagtcccggttggaaaaccgggactacaggggggttacaaaccgggactaaaaagcatttctccaccagtgcacaaatcatttttttcaattatactagttgcatataagctatattatagtcataatgtagttacaatctaattacacttcatttgcagtatatttatatttataagttttcaatgaaaagactatcaactgttttaaagctactcctttttttaaaaaaaaaatactaggaagatagcccgcgcgttcgcttagacatgcgcattagtttttttgaaaatagttttacaaaacaaattgtgtcgacgtttgatgtcgcgactacagtatttggacagtatggggatcgttggtgctaggatatacgcgagactgaggtaaaagatggcggagacagagatttttatacaggttcgggcccctcggaaggtaataaccctacatcttgttggccggagccggtcgttgatctttattcaccataataacaccagtacagagcgtacgactaagtcttccgtcttgctgtaatcgagaatttggattgaagtcaagaaattttatctcggcgggtacaccatctcttcagtccgtattccttgtcgagatccagcaaccgttctcgagcgatcgagaaggcgtagagtctacgacggagccttgtcgacatttgttgtactcgccttagtcgatcttggtgtagaaccatagagacatggagtcttcaacaatgtcgaatagaattttccagtgttttgtatatgagcgttttctctcttaccgactccgatcagtcagtttgtagagtcatgcactctgcctagccccgagccttgtcttcggagaatcgttctcggatgataaggctcttggacctttgacctacctcatttgaacaagcactgatcctagcccccagccgtgaagttcgaaagctcaatttccgattacacggcttggttaatacgcacggcgagaactcttacacgaccagatcttacatggtgttttgtctctgaaggatccgacaaggccttatcggctctgggtgtccccagctgaagttcccttaggttcctcggaggccttgtcaagacggcgtaaagggacagtaggataggttgcaacgctaggtgtcttctgtggtgagggatctctgggtaaaacacttggcgatcttgtgtacctgatatcaaatttgttgaagtagaggtagtaggagaaatcgctacatcgctggtcgaggaccaggcagtagtcgtaactcgaccacttgaagtggaagtagtgggagagacactacatcgttggtcgagaactgggcagtagtcgtaactcgaccactagaagtggaagtagccagagaaacgctacatcgctggtcgaggaccagacagtagccgtaactcaaccacttgaagtggaaatagtgggagaaacgctacgtcgctggtcgaggacctggcagtagccgtaactcgaccacttaaagtggaaatagtgggaggaacgctacatcgctggtcgaggaccagacagtagccgtaactcgaccactgaaagtggaagtagtcggaggaacgctacatcgctggtcgaggaccaggtagtagccgtaactcgaccactgaaagtggaagtagtcggaggaacgctacatcgctggtcgaggaccaggcagtagccgtaactcgaccacttgaagcaaatgtacgagagatcactacgatcaactggttgagaaccggtgagtaggtgtccctcgatcatttggagtcgtggtacgaggaccgctacgctgccgtagtcgtaccttgaccatctgaagtaaaggtgcgagagattgctacgtactggtgcgagaaccagtgagcgagcagaattatgtctcgaacaccgatggaaggtgcggtgcgagaaccagtgagcgagcagaattatctctcgaacatcgatggaagttgcagtgcgagagattgctgcgtactagtgcgagaaccagtgagcgagcagaattatctctcgaacatcgatggaagttgcagtgcgagagaattctgcgtactggtgcgagaaccagtgagcgagcagaattatctctcgaacaccgatggaagtgctagagttggtttattgcaagtgtatctcatgtagccagcatgactcacgtacccaacttatagcatatccggatgtccgttcgcaatcatgtcgggtgatcaagccgacgacgttcgcgaggaattatctgttaacaaccttttctcgagtagtccagccatggccggttctatgagataggtcatcgatcttcgttggcaggttgggtgcgataactccgcatttgttgagaatgttctcgataatggagtgtactcgaccataacctactcgagtgctcaattgttcctgaaaaatattttctagaaggcaagatatatagcagagaatatcgaatatgtacttaaaaaaactgcatggatcttctaatattatcacgatacaacaagcagatgtaaatatcagggcattatgtaaaccgtaaacaagcatgatttatacagaagaaaacagagcgagcccccagcgttagaccgtagttggcctatcgtcggaagtactcgcacaacggatattgtataaaaagcatgctctaggtaaacataataaattatagatctgacaatgctgtatgatctgaataggtacgataaattgcagataaaatattgtgtaccttagtagatacatgccggatgtatctacgaaattagtagattaatttaaaaaaccaatctaccaattaccttgttgcgtactcgttcgacatcatacggtctgacatctttttggtacgccgcgaagcttgaggcttgaatgatctcgatagaccaagttgttgacgacgatggttccgatctcgtcgggagacatactccggtcgggttggatgttcccacagcgaagtcgtcgagtagcttgttgtcggagagtccatcttttgaacccatctcgtcgaaatcctagagcaccaaaatccccctacctggcgcgccactgtcgacgtttgatgtcgcgactacggtatttggacagtatggggatcgttggtgctaggatatacgcgagactgaggtaaaagatggtggagacagggatttttatataggttcgggcccctcggaaggtaataaccctacatcctgttggccggagccggtcgttgatctttattcaccataataacaccagtacaatgtgtggggtagcctatctaactgttgtcgacattgcggtctgaagatctgactcgtagtcgacaacagggtagccttcctcctcgagcttatgccaggtgagaccagaggtagcgctagatccctacggctggcctctgaaggtaccgggtagggtcgatccaggcgtatctctgatgtcgatatccggcagcttgtcttggcgtatgttggcttgtatgttgtggcttctggtgggtgtatggggggtcttgtatttatacccataggtgtccccttatccaagtagaactaggaaaaccaatatggatacaatccgagtagtccttgtcgtttccatgtataactctggttgtcttttcttatccggaactcctcctatatccgaaggttgcttccgtataggacatagtatgtggtgggtcctgccgagatttagtcaactactattaggtatgtggtatccataaccatgacaaattgaaattaaaataagatatttttctatttttaatggagcgttcattatatctctttcttgtgaacaaatctcgacaaacttggtaataaatgtatttttttattatcctgctagccccctctttaattgcttcatatatatacaattcattatgcatttgaatcaataaagataaaaaattcttttaaaaaatatttattgtattttgaatttagtgattgagtgattcttatttcgaatttgtattcaaatcaaattattgttttattcaaaattgtctttttaggaattataaattatacctaatctcgtatcgtgttgtatttggactcttctttgaatacttgttttattattccaaatttcaaatatttataacttatggttttatatggactcttgttattttatattgagagaattacctatatggcactgaaaattcgcttggtttcttatatgccaatagaaaacatcaatctccttatatgccatccaaaaagtttttccatccctcttgggccactgccgtgagctctgttggagaaatcatccattggctggtcaagtttttatccaagtacccaccctacccttcttcagcattttccagcaagcttccatgaaatgaattgcagcaagcaagcaacgatgggctgggcggttgactacaatgtaagtagttgaaaactaatctttttttttattctcgtacaggatagctcaaaattttgagatgaaaaagtattgataggatccatgtcgggcatacatattgttgccgaatcatacagaaaccaaaggtaaaatggatgcccatcaaggcagaaataaccggagaggaaacgaaagaacgcatgagagatttgaagggcaacattgtcttttattaccttaattagcagcaaaccaacagctagctcacgtagtggcacgaaggggataaaaagttgaactcagtgacatataagggacccaacaattttcagtgacatataagggactgaggcaatttatagtggcatatagagaattttctctttctacatggaatcttgttatattttttatagttttaattatttttttaaaattttgtatgtgattttaatcaaattgcttgttttatctttttgttctgaatttaattatgaactccttgtagtgatccgcctgtcaccatcagcctcgcagatcattgtcaacctcctcaccagtgagcctctcttgatgcattggaaatgatgtggtggggctctttctagtccttgtcgaagacgtggaacgcctccctgtgccgctcctctcagtacttgcccttcacctaatcatctagcgtgctatttagggccaggagggctgcaggaa

SEQ ID NO: 22665 - DNA, 16306 bp, Oryza sativa
cagaacagtcgcattatcttttatatagtaaatatgagcaatatggatcttggattatgtatttaattataaataacacaaaaaatcaaataaactaagaaaagtacatgtaacttgggagccatgatcacttagctattatttttttcatatatatgatatattatgtgtcaactagaaaatatgaaaagttagatagaaaataggagatgagagttggatcccagaggtgagttgcacggtggagggagtatgcatgtacatgcgtgctcacatatggtaggggtggaggtgggggtaccggatttattttttgtgacatgtagtagttataattattgggtccacgtacctatttaaaggaaaatcgatggtttgattttttttatcataatttctaggttttttttaaatttatttgagcaccacatggtgttttaggagtgtttgtagaacaccatgtgacagattgagagcatttgtagggagtttaatggacttttagtacataatagatagttaatatattgtgtagttaatatattgtattgtttatgtactgagctactggctagaaaatatggataagaaagtgagcaagagagataatatgagatcatttatgatggcatgatatattttatttttataatattttattactatttagttgtgatataaagaagtttatgtcaaatgatatatttcttatatatgtacatgccaaaatatggtaaatttagttcaaagtaaaatcaaatatattataagatattctaattatttagttattgtgttttatatataaaattttgctactataaatggaagaaagaagagaggggtgggggagacggacatacgtacgtgtgaggagaggagtgagaggtgtggacgtaggtgacacttttttttttaacatatatagatttaatgttgtaaaatgatgggtccaccatattaaatgaaaattaatggtaggatttttttccttttttttggaatttcttagatttctctaatttattagagcgccacgtggtggcttaggaacgtttgtagaagccatgtggcggtttaagagtgtttctaggaagtttaatgaacttttagtatataccagatagatatttacaaaatatattatgtaaatatacatagagggtaacaggtgcaaaatactacttccgtcctagaatataaggatttatagggttggttatggttattgagaaagtaggtagaattaattgtgagaatgttgtgattggatgagaagtggaagtaggtgaaaaaaaatgaatgttagtgacgaattttttatattttatgataaattctaaagactataagttgttatattttaaaacggagagaatataaagttctcctcggttccaataatccgagacaggtgaagctctaaccaacggcgcagcttaaatttcatccatgctctctatgtcaagacagtctctttgctatcccacaaggctcttcagaaatatctccgtggcattctttactatatggtcccatgacccagtgtcgaacataattctcaatgtcatctagtatgatagtgtataccccttgctggagataggttatgatagggtataccctctgctggagatgagtgttgagattgataggtaatatgtgcttcgtatgaaggcccgctcccttgacagccttgttgccatggttcgtacaaccacttgtttaggagcataatgccctggaataccttagctaccagcagtgcaatctttatatggttttacaggtgacaataaagaagatatgctataaaacctatgatcgtgcatgctaagctaaaaaacactccaagcatttaaagattgcatcatttcttaagtctatgacttgtgatgtgttgtccttgttaactaatgaagaaacattaaaaaactataccattgttgatgcagctcttcaataagtgtataaaatattagaagtgaaaaactcatatatttcaccatcaatggataattctaaattatgtccaacagcctggaatatgcgggatgtgcgaatgactttatgcagaagcagaagttttttcatcaacccttaaaagaacggtggtatgattactcgaatcagcatacttgggtaattataatttaacccttgattacttgtatttttttagttgctagttttttttactttaagttgattgattgtttgcttgaatagtttagataatctatttttataggaaataaaatttctcgaactgctattgcaaaaatttatgtcatttcaatccaatttgggttaagtttatgcttataaaacatgctttatttgttttttatagaacttgttctaacttatttaacttatttataaaacatgttctaacttaattactcctgacggtctggtctattctcgtagaaatatatctttatctcaattagtctagtttgttgctagaattttatattagtttgaattgatcagacagcgagacacatggataatcactaaatcttaattaattagggacaaatatgatctatgtgataatggatagaagcattgttgtgtatgtactgctggagtataatcgttcataggctcatgcttggagctagtgggcttgattagtgttgtcgaatgacaagttcgtccgtcgaaggactagattcactctttttttagaagtattacatccgtcctataaaagttgaatttatatggaattaaggacataataggaggatagacaaataactaccataaactcatttaatgaacaaagtacatgcatatattccatatataaacttgattagaaggaaggttgagacaacgggttagtgatgggaaggaaggaagaaagactaatggtcccatattagtagaaatacaatttttatgggacaaaagttcaatggtagaaattcaatttttatgggacgaaggcagtattaatgtttaaaatttttttggatccctcaatacatgccccttagggcctatttatagacttagtacaaactcatgtgccctagggttatcaagtgcatgggaatttacatggctacccttataataggaacatttatgagggtaattgtaggtaattcagctttgggcttcttcttgggccaccaagtgggcctccataggccagttggccccttcgggtcctgagccctttgttttgaggtgaaaggtccttgactcgtggcgaagatcttcggctttgtctagcgatttgccttaagccttcgtcttcgtgacgaccgaaactttgctgccatgcttcgccctagcaactgtgaattggttttagcagacttgatcgaatgccttcatgacatgtctccaacaattaggattggaacaaagaattggttatcaattggcatacttctatgtatttctgttgaaattcaattttcaagtgcttgtaagaatatatctcgtctcaattaatcagttaaagatcacatatattcatgttaaaaaggagtatttttatgaggacatattatttggatagattgtggagtacattttaaccttatgccaccctacttagagcaggtacaatagcagctataaacatattttaaagagataaataaaaagaaataatagtctatagctagctgcaatacggactccaaaacgtaatgtgtgtatgacaggtgggaccaggtattaatagtatagtaagcaactatttaatgaattggctattacattagctatagatgatttggagctagtagtgggctataccattaaacttgctcttattgtgggaactagttccaaagcgtggtgtgaagaaaaacaacagtgggcattcaatgtcctaccacatcagtttcttggcatattataatgatgatccttcagtccgtgtgctcttcttcgctgaagtgtgggagtcaagcttgagcattgaactgcatcttggattctgctaactgaaagcactgctacatagtacataggagtgccatgtaaaagagaatgacattttcagaagtgtacatatggagctcgcatgtggagtaacaaatgtaaacatcacaataaaggcttacttatcaattaaggagccttattgttccttcaatattccttaaaaaaatccaccttccaaaggagccttattgttctaccacatactatgtaaaactctagtactcctaataactgatataatccatcaattacaatttcagttcataatatttggtactgaaacaaaacttcaacagtaataaactatggtaattggcatcaaatcaacatcccaagcctaataacagatagtccattgttcacaatctcattctgcataaataaatagcatggatccaacatccgaaccatggtctagtttagttcttaactttttcttcaaacttccaactttttcatcacatcaaaactttcctacacacataaactttcaactttttcgtcacatcattccaatttcaatcaaacttccaattttagtgtgaactaaacacacccagaccaggaataaacaccctgaggtgtgggtgtactgacctaaatgaaggtccccagcccctacctaggtcccagccagctcaatcaatatcaacattagtgtggagtgataaggtttcaaggataagaatgagctgatataagaaggcgtgaaggattatttgccagaaaaatatgtccaaaaatatggttaattaccaagtaaattttctgttgcttgtccatcagaagagctcattgcatcattaataacataacaagaatagaacacgtaaaatataagaaaaatattgtataggtagtgctctaattacataggtgcaggggcaggtgagatatggttcgggttccagctgcttgataatcctccccgatccgaattggagtgattatgtaccactcccaaaccagcaaacattatataagttatatgtaagaagagaagccagttgtagatggaagcgacggcgaacggatactgcctcctgacggtgtgagcccggtgactgagccacaaaaacctccagaatgcacgcgccgtcgtcacaggtccaatccactgtgcgacaaagagagacaaaacgatgatgcccacgtagataacaatgtacacgatggattctgccgtcgaggttctcatcacggcacgggaggccgcgaagaaggccaggattaggctgacgagcgagacccagatgcagtgcaacgccgccacgaagctcttccacgacccggtggagcgcgacgccttcccgtagacgagcaggatcacggcgatcaccgatgatgctaccgcgatggggtcgaggaccacgaaccatctgaacaaggacatgccctcgaggcttgccgagccgtcgttcgtgtacccgcccggcatgttgaatccagctgcaaggcaacggtggcgatgagcacggccaccaccgcgaggctgtccgaagtcctctctatccccttccctatgttgtcatggccgctccatggctcagatggtcattcctttgtggtcggcattgtgccccgaaggcaactaatgccatcacgaaccttacctgcattgtgtgcacaccatggatatatatgtaagtgtttcttttatatgatgaagatcaataatcatatcatataaaacttctacatcaagatgcattgggacaatgcatgcgcatatttggttattgcttaccatattgaacaaactgggcgatgtggaagcgagatctagcggtgtgtgtccatcgtcgttcaagacatcggtttgcactttccccttctggagtagagcattcacgatgccaggcgcgccggcaaccacggcgatgtggagcggcgtgttcccatccccgtcctgcgcatccagaagaccaccgacctgcttgtgtttcttgatggcaagggacacgatcgaggagcgcttctccctgactgcggagtgcacgaaggtctcaccatggctgtcacgaagctcgacagcatcagggcggatcccaatcaactgcttgacaacatcggcatgccccaacttagctgcgacatgaagagcagagaggccatccgagtccttcatgtacactgtgccaggtggcgcagtggccatgattgcacgtatgattttgctgttgccatcggatgccgcgaaatggagcggggtgctaccattgcagtcgacttggctagccagttctggcttccattgcaataagaggtgaaccatctctgcaaaagtcataactttatcaatcaagttgatgaacgcattcttgttttgtgcttgaaagctatcgaatcaacaagctgatatctcacctaagctccgaaagacagcagcatgcagagcattctgcgagctcggcccaacggctgatgcgtcactgcaggtagtaactattgctcttacagcaggcaccgacctgctcatcaccgccaagtacaacggagacacgccgactttgttcagctctgtcgcctttgcgtgtgccgcgacaagagcctccacagtggcgccatgaccatgcctcgctgccagatgtagggccgtgtccccggccgtgttctggcaccccatgatattctccacacggtcctgggctagatgtactagggttgtcacggtgccggtgtgcccttcccttgctgcgcagtgcagaggcgtgttcagtgccgagtttcgacgagagaggaagttgttgtccttgatgaacctgtggtagagctccttgatcagctcgatgtgccctttctccgctgcgacatgaagaacggtgttcctctccgccgtcacctcgagtaggttgcattgttcatgctgaataatgcctgaaaaaggtgtttggagcattaaatgttgttttcatggtaactagctgggtcgcccatgtaattgcacggctagcacccatgttaaattatctattttctaatatatgatattacttaaaatttgttaaatagccatcacgttgtcttagaaccttaaaagattgaaccttatcatcccttaatttttaattttattgtttttaaagtcacatcagtctctacctcttactctaattttatcacccttctatcttgttttcccgatttaccatggcttctatttatccttcttgaaatctttaataattgggccttctagttttcagagtccattgtctcgtcaggttctgttattataatgtttagaagtgtcgtcaaacatcgctattgtactcctctatgacccatccgttgtctcccctacttattgttattgggattttaaaatttgaacataattatcattggggtttatttttttactttctagaagtcccgccaaccgccaccggctccggcactatactcctgtatggcccgcccattgttgccttccctatttattattattgagattaaaaaaatcgaaaatgattgtcattgcggtttatttttttactttatataagtcccaccaactatcgtgaccttgctacctaacggtctgtgtgtcgtcctcctcttaatcgtcattgggattctattcatggttttgcttatagtttttagatgtccattaaccaccaccatcttactcttttatgagtctattgcttctctcctttttattgttatttgtcatcattgacatctagataaactgctttttttcaaaatttcatatttttcattccaatattttttttacttataaagtgtattcctacatgaagtcctataattatttttctatttttttatttttttattttgaattttaattaatctcgtattcagttttatatgaactcttcttacaatattacttatttttaattccgaatttcagttatttctaaattgtattcctatgtatgcatttatttatatatttgtttgaatgtttcaatgttgtagctaactttagggcgaatgtacctaaaagaattgaatagatgaagattagacgtgcacgtatttgtatttgaaaatggggacaattttgatttacgatactaacattacatcaatttgtatggcctccttcatcggcgctttgcacctcaagcaaacatcatgtttgtcccaaataacttcggatatactccctctgtttaaaataatactcaccattgaatactatttaccttttttactttttcactttgaccgctcgttccttttgtaaaaactttgaatatactcaaaagtatgagacgtacattagcaaaatatatatgtgttatacaataaatacaaccatgcaacttttataaatatgagttatatttggtacgaattgaactaatactaatctttatagtacatattgttcccgtaggacattgattttgtatctttgataataaaaatatcattgtagccttattgtaggacaagtcaaaagtttatggatttttatcaaaccaaaacttaccagggccacaaggtcttttggtgctcttgtatgtaccactagcctagttcccgtaccgttgcaaccaaaaaaaaaagagtttcaagcttatctattactactaatttagtttaagtaatactaatattttcttatcaaacaaattggtgattttaaaatttgaaggagccaatagtaaaatatgggatgacttgttgaaaagtggtgtaatagtataaattgtggagcccagctgctagtaataaagggtggcgaggaaatggacatcactgctactaacaactttttaagtaatactccctccgtcccaagatgtagctatttttagcacagtatcttgtcctaaaatgaagctatttcttcacctacctcctcctctcaaccaatcacaaccattcttctttacctagtttctcttttcaactaatcacacacttccttcaatcattctcacatactttcttaatacccgtgccaacctcaaaaatgtctttattttgggacggaggaagtatagatgagcaggatgtggaaaaaatatgaagttgacgtgttacgtcttcttgtagggtcatgtgtacgtcaagaaagaaacatgtctgtatacaagcaaagaaaggaccaatacaattctaagtcacattgaatccttgacgcatatcacattcctattgtgacgtttgaaattaatgattgaatagactaaggacagttgcttttaggggtgaattacatgttataaaatatactccctacgtttcaaaatatttgacaccgttaacttttttagtacgtgtttgaccattcgtcttattcaaaaaatttaagtaattatttattcttttcatattatttgattcattgttaaatatactttcatgtacacaaatagttttacatatttcataattttttttaataagacgaacggtcaaacatgtgctaaaaagttaacggtgttaaatattttgaaacggagggagtagtttagaacgagttatatgtaagcaatgctgattaatgccaatgagtcgtagtgacattaaatcatatttttagaagcgtaacattaattaattaataatgcgaaaacaatattcactggccattagccgaaaaagaacgcatggtagttgtacctatcgacacagtgaatgatttggatatatccaagtatccaacatagctggaatgtgtgaccacgagtcaccgtgatctcatggccaaccgcgaacgaaataatacttgccttggtttgttatacatgttggaattaatgaatgggccttagcccacacgaagattaattctttggaaaatcacaaaagcccacctcatgggatggcatgcatgtggagtttagtaccaccttgcttattctaggagagggggacctccttaaaagggaggatgtcctcctagccacttgaagcatgtgtggtggagagaagaggggaaacacgtgctcgcctcgcctcgcctcgcctcgcctcgcctggcagggcaggcggcgcgcgtgcacgacgtacgcgcagtagagtccgaataagttacgcgcgacttatccggttcggttacgcgcagtagagatcgtgcgggcgccctgatcaagcgacccttctctatataaaccgacctgccgtcttcacgcaacacttgcgaaatcaatctagggtttgcctcctactctgtactgcgccgtcgctcgtagactactccatcccgctcgccggcgtgcaccggcgatcgggagagcaggtctccggaacctctgcctttgacgttctgcaccgggagaaggcggcaataaggtttttgggaagcgcttcgcgcgactgctccctgtttgttcgcgacggctcgccttcctcttcgctcgcgtgtttcgtgccttcgtagacacctgcgaaaagtttcaaccaagcaaccggtctttacgtcacctcggtacgtgttcaatatgttgcgcatatttgatctgttcatattatactatgtagtttacatgtatagatctaatgatgcgttcatgctagttttcatctgtaatgtcatgatttatttatggaatagattaaatcattatatgtctataatatcaacaatacatgactaattatatgttcaagttacaatttttcatgtgttgtattattgtataaggttaggttagctattacccagccaataacttagaaaaagttagacagctgataaataatacaattgtatatacacttatatctttgaaaaaagacatccggctgtgttcatttgaagcacattggaaagaaaagctcctcgattaccacaccttcctgaactgtaaataatgtgttttttaaaaagatttcataggaatggtttgaaaattatattatattattttttaaatttaaaataattaatacttaattaagagataatccattatatgccactgactttgtcgcacgtctacgatttgccactgactttgtcacgttctacaatatgccatcgacttttgcttaacttctacgatttaccatcaccgtccggttagccaccgttagtactgtacaaatttatcgaaatgaccaaaatacccctatgacaaaaacttccaaaatttggataaaattatcaaaatattatattataaacataagattgtaaacatccaaaatttgaccaaaaacttgaaatatgatatttcataatttttatccaaattttgaaaccttttctcccaggggtattttggtcattttgacaaatttgtatagtactaacggagactaaccggacggcgatggtaaattgtagaagttaagcaaaagtcgatggcatattgtagaacatgataaagtcagtggcaaatcgtagacgtgtgataaagtcagtggtaaataatggattctctccttgattaatcatacactggtgactcacctcgttgcgaggatcttctacaatcacctcctctcaaacacaacagacctgttatataactcaaactatgtaaagagtttcacattgattggagagaatcaattaagatggcatatgctgcagtaaaatactctcttcgcaaatgaaccagactgcagcaatactctgtctgtggtttactgttaattaatcaaattaccagcgacttgatgacgatgtcctgctgctgatccagcgccgtgccgttgttgcagaagcaacgccacgacctcctccgagcggccgctgcgtgcagcgcgatagagagacgggcacatctccatgcgaggcgtcgactcaccactcgccgccgccgcaggtggctgatctgcggacggcgagcctgaataacggtgctgcgcgagctggactacgacatggtgatccattgatggagtatatatctggctagctatagctactgcgcgaagaactagagaggaatatatgcgagtacgaactagctgtggactgtggcagagctaggagggagatgatacggcctaatctggactgaatttgaggcggtgaattgcccggcctctgcaacccttccttgttgctgctgctactgtcatggcaaagtctcctatactctcaacagcgtgaaacaaatttactgcggtcagtttcaaaccaaacaaaaggtcttatcttttcgcttaggcttttatttatcagtcaaaattaaattttttaaccttaaatttggagctgattttaaggttttttttatcaaaatttttttcatcatttgcttttacccatatgcatatagacgttgtgtctagattcattaacatctacaggaatgtgggcaacgctagaaagtctaacattataaaacgggggaactagatagctaagaatacgtatataaaagttttattcacaaattacctttcgtttgcaaatatgctaagtgaaacaatggctccaaaagtgtagcatgtactcactctgttaaaaaaaatccaattctaaatatgtatatggacaaacacttttagaattgggttgtttttgacaaaaaaaaaatgtaaagaagtccagatctgaagaacatcttctattcatctcacccggttctagagatcgaatccccttgccctagaaaaagggacgaacggtcatttttacacacataggagaacatcttttactcgtatcgtactagtacattttgctttagaaaaattttcaagagctttgcttgcttagcctgcaatcctaaaaacatcgatatgtgactacctgacaggatgagtgtgtctttttatttaaaactctctctgttattttatttgacgttctagctcaaatcggatcagtgtttacgttcgcggttttgatcctagtataaaaaaccggaccaccccggcggttgaaccggaatcaggcctctcaccggttcggtttagtaaaaagaccgattatgcatttgacccaataggaacgaaccgggctagtaagaaccggcggttcactataagttcagctaacgcttgggctagccttataaggcccatcatcctactccacggcccatttacattttaattatttcacccgtttcttaatttggtcaaacatgtctgaagggtcaaataaagaaaaacggagggagtacgaaggataatccggtttttactctaaagaggctgaaggaggaggcattggactgaagagccacgccgacggacggtggcggtttgtacatagcgagccgcgtgcgatcgagctcatcgcgattcgaccgtgtgaagtccggcacgccatccctggatctcggacgaacggctatatagcttggttcaaggctcggaaggctggctggcctggatcaggtcgactagcttgtcttagcagtatccctgtttgtgcttaatataacaatcaatcagctatggcttggctcggttaaaaaggagagagagagagaatgaatttcgaattatgttgaaaattttcaattattacctttatagtacaatttatacataccccttttacaatatttcaaatccaaattaaaactatacatcaagtaaaatatgtatgaacaagatggttggtggaggcgcctccaatctcattcctccagagtaaaatatatacaggatggttttattagctgtaaaaatttccctttgatacccaaaataaactctctacacaatcatccttcttatatcaatgagttttattctgaatatatcactcatatctcactgacatgtaagcttagtttcatgcatgtcccatatattctcacatattctcacataagtgcgggggcagtgagatgttatggattacctgataatcttctaccaaaaaataaggcatcattcccaaaacagaaagttcatgtttcatttcatgttcaagttcacgatgttattcatgtttcattcatctggaagtttttgtttacattattcaagtaccatgcgtagtcatgggagtgcaatttggatctttgttcatgatccttgagaagcgttgattacgcttgctcggcttaccggtaatgctaagaggatattcatacctgcccgggagtgaactactatattttgacttctttgttttagaataatgtaaatccaaattttcatattggtttcttattgcattaaacttgtctatgttttactagtttaatgttgtacttgctgagtaatctttactcactcttgtgtttaatttggtttttaggtacctaatgacttttgatcggcatagggcggggtacgcggttacctggggtgttacatcgacgacgcgagatgtgccagcaaccagatgcacatgctggttgcgaaattactacctgtttggaataacttaaaattgttaaactttgattctttataatatctcacttgtccttataacaattaaataaagagaaccagtctatgaaagtaaccaaaaaccaataataaaatctaatagtctcgtgattagacaatgtggaatgattttagaaagatgaggttctcttttaaaactccattgcaacacacgggcatttagctagtaatataagtagatttattatcttaccaataggggcatcatacaaagtttgaaactaaattagatgaaagttagacattaatttgtatagaaaatcacacaaggactacacatatttgaattctatttaaatggcgatattaatggctaatttggcagagctccatgtctagctccatcctggagctggagcctaaccaaaatggtcttatgtccacctaaaatgggagttgagcgagctaattaaaatgctctcacaaaatgagttagagagatggagcgggatttaggctgctccacaactctattccagacctagctcttaaaattaaatttaaaaattgaaagctctgccaataagggtggattcaatgtagatgccggggggactcaagtctcccctaccccactagatcaccattgaggtaagaagagaggggagtgggaagaagagaaagagaaggaagagtaaggtggcttaaggaggaagaatgagataaacccttctctattagaattatggatccgtccctgccggccaaacaggtacggatactccttcatacaatctcatccgggggtatctcaaggaaatcaaggttgtgccaagtaactttgggccattcagctgtatataaggcatccaagtctccaaaaatatcatcaaactttgtaatagtttatacaaaagattaatcataatgtatatttggtgcagatagtaagcttcatattaaaaataactcacacaggatttttatattgtagctatcatagtaataaaataatgtaggacaagtcaaagtctaattaaggattacagtggaacgaaaacttgcaagtgttgttgatctatgagcatgacgtttgcaggttgcaaccacgacattgctacatgttccaataggattactggaggccttgtcaagaaagatacagctctatatgaaaaccaagattttttttttgagaacttagtataaaaaaccaagataagaagtccaagatactcctatatacttctacattcaaaaccaccttgatgtatggcttgatgttacgtatatttcccaattcccaaaacaagccagctagcgctaacacctccatttactagaagatatatacggaccgctcaacatagatcggatataggaaaaaataatagtagagattaaacaaactaaaacagatccgccaatggagcatgttccatagtatagcacactactacctccaattcatctatagccaatttaataaccaattcatacaatagttgcttactatactattaatatatggtcccacctgttatacatacattgtgtcttagagtccgtgctacagctgcctacaaatctgtagcccactgctcttctctctcatcgtttatctcattaaaatatgtttatagctagctaatagcctgctattgtacctgctcttagaagtacacaataattttactcttgcctttagtccatctaaaaatagtaaatctaaaagtagctgtgttttagaataaatggagtataataagtttaggctattcgttgcgcaagtttatcaagagaaaaaaaattcaatgaagaagagtcggcagtaaactcgagatctgtgtgtgctgttaatattacttaccagcgagatgatgatgacgatctcctcctgcatcagcaccgtgccgtcgctgcaggagcagcgccatggcatcctccgctggccctccgtgtgcagcgagagatacagagacgggcacatcatctcgatccgtgcgacgctctgcagacgccgaagaaccagctgccggcggctgctgcggagggc

SEQ ID NO: 22666 - DNA, 19014 bp, Oryza sativa
tgttgaacactgttgaagtgtttgggcactgtttcgcactgtgcaacactgtttcgtactgtgcgtggggcgcttccgcacattggaaccgcgggattgcccatgaacagtgacaaaacagtgacaaacagtaaaaaaaacagtcctaaatagtgccacgcagtataaattcgctgtcatataataagcgcgtggcagaggacgggaacgagccgtcccgcgcaaccgtgacgcgcaatcggcgcggtcccgcgcattggcgacgcgcgaccggcgcggtcccgcacaacggagacgcgggaccgtctcgggacgcgtgggcgcgagagggaggcggtgccgcacttccgcgccgcgggagcgagacggtgccgcatggacgttctgcgcgaccgccagtcccgcggaatggaagagcggcactactcggtcccgcgtccccgccgtgcggcgaaggtatatttgtgcaaatatttttcatgcagatatataaacataaaatattaaaaaaagggtatattttcaatttttttcccggagggcaacgcgagagctggactacatgtcgactacgatccattcaataatatgtgtagctagctaggggataaattaattaaccgcctgatcaagactgaatttgatgctgtgaatggcctcaccaagtgttctatgctcctttgctcgatctatatgcatgtataactatataaagcggatctattatctaaaaaaaactataaatattaagctgatcaagtcgttatcaggtcgtactgcatacgcttgagccaggattaatgctatttttcctacaaggaatacgtggaaaaaattttggaaatatacgtgtttttgaccggaattgcaaaagtaggttgattaggggcagttttgcggaaatatactggcatcgcgctttgaatgtgcgagagcgcgatatcatcgcgcatggaatgcgcgaaagcggcggcgctatcgctaattgagagggagggagcgctaatgcatcggtctcacattcggaaagcgcgagagcgaagtggtctcgcacttttagcgtgggccggccggccgacgccgcctgacgcactcgggccaggaagcggtctcgcactttgagtgcgcaatagcgtgtgcagtatcgcggtcggctcgcgtgagaccgtagcgacgggggccgtctgacgcacgtgggtcccggagaggtctcgctctatgtgctagcgagagcgcggtcagtatcgcgctatacgcgagcgagagcgccaggggtatcgcggtcggctagcgcgataccgttgcggcgtggcccacccctaatcagctgctaatcccgtgggaggcgacagcgatggcttcggtctcgctctttgaaagcgcgagaccgcgagcgatatcgcacctcgcgggcgtgagagcggtgagctaattgcgcatatgtggccttctcgctttcgcgcatgccgcgtcaccggtctcgcgcgcgcaaagcgcgataccgcgtgcccacatttcccccgtcgcgtcactctcggtctcgcgctttcggattacgataccgaccttggtctcgcgcaacgaaaaagcgagagcgatggctccgcctgaggtagtttcgtggatttctccacgtggcgttctcgcgctacggaaaagcgataccgctgcagtttcgcctttcgcttccgcgataccgccaactcaacttcgctttcgctctttcacatcgcgatttcgccacgttatcgcacttttcagatgcgaacatcagtatcgctcttccaaacagcgataccgatagtatatttccgcaaaaccttcgttatccgatatatttttacaaaatcaatggacaaacagtatattttcaaaaaaatttcggaatacgtgtcctaaggttccagcatctaggaatcagccagtagtatatatatgcgtccagaaatatctgatcaatctgacttattcttaatataacaccaatccttcaatttttcctaccctcgccttaatatatggactagttcttgtccgccatgacgcctcgtcacactcgcaggtttgcattgcatataagtcgataaacacaggtaaccatcattggggcccaataggggatcgccacaaagatggtagttagtggtgccaaggggagttcggccgaaccacctccaccgtctctggccatcgcatttctcctgtatatgacttgtgggcccggcccctgaggtagttgacgatggtttggcccctcttaagtcggtttatactgtcatgtgggtcctccgatccttgtactcgcacataattggtcgaagaacattttcatggtatattgggtgtattttctccttaattaacctgcatatatatatatatatatatataccaaaactagtggaaatggttagtaataaactcctaccactaagttttgatagtatatttgatatcttttatgtatgagttgacggttaaagtttgcacttaatgaccgtcaacaccagcccacgaattttgtggtgtgggccagtactcgggttggttcattggagggtgaggcgcgatgctgctcggctggttgccgccaccaccaccgcctctgccgccgcgacatcggtgattgcgagaagaattgttcccacagccttgattctcgttggagccgcatttgttccctgcaccgaaataggtggcgtgggcggggttggagccgacgagcagcttggcgaaggtgctggcgaggaagacagtggactggtcggtgtgcctgttcgccttggagagttcctcaagtagaagttgagagcgcacgtcggcgaaagacaggaatgggcactgcatcgttattaaggtttgcatattatcaaacttggagctccaactgttgagggtggtgacgacgagatagcggttcgtgacagggtcgccaagggagtccgccatggccttcatcttgcggcagtagtcggtgatagataggtcaacttgatggaatgtgcgaaactcaacagagagattgagcgcacgtcgttcactgttgccaaggaattgcaacttgagcactcgctagatggagtgtgcggttgcggtgtgcgacataacctcctagaggagaccggcagagatggagccgtacagccaccagagaacaatgcaatccatctgaagccagtcggagtggtcggggtagtaagcgctgaagagaacgtggtatgccaaagcatatttgccaagagccacaatgaagagggagtgagggactccagagcgtcgtgttgtagaagccggatgcagatggccctacagcaagacgagccacggcgaagagggactccaggacaggcggcagagaggccgcaccggagggggccgaggagatcggtgggggaatcggcacggtggataccggaggagtcgtagtgtcagtagtcggtggtggatcaatcggcgctggggatgtggaggaggaaaagagcgaggcgaaggcattggtgatggcgtcgtggggggcttgagaagcgtgcttagcagcgacgttggcgatagtcgaagcggtgcctggatcgacgtcggtagaggcagaggtagtgaaggagtcgcgcaccgcgtcggcgatggctttgacaaccttctcaagagcggtgcttgcagattcggaggaaaagggcaacgacatggcgtcgtgcggcgctaaggagagcacgcgggggtttgggtttggagtggagcgaaagcggagatgaatctggtaccatgtgggaaggaataactcaacgcaattgtattgatcacggagtgtttacatatataagcccgtccatataaccactcaactaacttatagcaacagaatcggaaggataaggaacagggatttgaggagataagatacatgcaaacagtatagtctaacaatatatatcatatatgtacacacaaatacacaattgtcccagaaaagcctagacgttattatccattaagtcttatagatagatatagaccaacgatcagatgtagccatatatgcacgatgcagctatggacttgaactgaccagagcttaatcagctttttgaaagtgccaagaaggcaccaacgtatgccaagatgtttgtgacaacgaagacagaatagttacgcgagtaagtgccggcaaacggatactgccgagcgacacgcctgtgatgtctctcaggcaataaactgctgaacataaacttcacgaagctgatccacgacgccggcttagtcaagatcatgatgctcaagaccaagacatagatcccattgattatgacttcgtatatcacaatattgattgtcctccttctcatgacggcgaccagagccgcccagaaagccacgatcatgccgatcatcgaaacccacatgaagtgcagagctaaaatgaagctcttccatgaaccagatgctttcccatacacaataagtatcactgcgacaacggaagtcgtcatggcgacgctgtcgaagacgatgaagaatttgtaggcggtcttcgcctggaggaccgccttgccatcgtccccgtagcccccgggcacgttgaacgtggcggagaaggcgacggtggcgacgagcacggccacgacagcgaggctgttggacgtcttccttatccaatctgttgtgtcattgcctctccattgattcaggtggtcttgcctctgcgggcaggattgtgccccgtaggcagacagtgtcaccacaaggcttatctgcaccatttatatgtacatgatattactctcatcgagtaaataatatattaaactagtttagtttaccaacattgcatatatattggactagggttaaactaaatattcactttagaccaggtatcttctctgcttgttctcatatctctcttcttcctctcctttttcccggattcagtctcaaggagaagatcagaagactatgagagcaagtacaatagcagcatataagccagctataaacatattttaaagaggtaaaaaagaagagagaatagcagcgagctacatccctgtagccagctgtagcacgaactctaaaacgtaatgtgtaaatgaaaggtgggaccagatattacagtagtatagtaagcaactattatatgaattgactattaaattggagcacatagttggctatactattaaacttgctcttaggctatgttcggcaccccttttcccaacccatctccctcgttttccgcgcacacgcttttcaaactgctaaacgatgttttttttgcaaaaagtttctatacgaaagttacttttaaaaatcaaattaatctatttttaaaaaaaatagctaatatttaattaatcacgtgctaatgaatcgctctattttctccatgctcactgtacggctgccgaacacagcataatgaagaagaaactcttctgtcacggatgtgcgtgcctacaggtactccaaagtgcaaaacttggtaatagaacatggtttaaagtgaaaaaaaaaaggcaattccgttatccaatataagatattggtaataaaaattggtccaaactgtaatctactccatgcttatgagccaaatgttacataacgactagcaaaattgagttcaccacattaaagtactttttcaacatactccaaactagagaatgttcgaggaaaattttatgttaactacagaaaaatataaggatataaccatatattgtccacttgtagcaccaaattgctacagatacagagaaattaattaaaattaagaataaagaaagaaaggaaactagtgcaatatattgtataaactaatttctacactaaaaattaatattgaaatttggagttgaaaaactagtagacaataacaattgcaattcgtataagaaatcggcttgaatcataagaattaattttgaaatttaaatgataaaaaatagacaatattattgactctaatttcatattaatcaacttatatatgtatcataacaatttgtatcttaaactatggtaaaactccttattttgtaaaacttagtaattactactcaaacttagtaaaacttaataattaactctggtaagaaaacttgatttagaactataaattatatataaacaacagcaaaatgatttatgtgcaccgatgcatatttttcatgtatacaatttgaaatttaatcgttctaaagaaatatgcatatgaatatgtatttgaattgaaaacaaatatgcatataatatgtatttgaaatgaaattaacgaaaaaaacatatataatagagtgcttttctacaacaagtatataaaatcataattaatatcagccaataaataaaacatcctaaaaaattccaaaatggcatttaaatagatgggttataggagaagttaatttctaccaatataaataatagattttgcactaaagttggagtcttttatattgtacaagttttgtattggtgaccgagggcctgacaaccagctgacagcaaacgctaatattacatgcatgttaacattgatgctatcttaatggttcaaaaaagatatcttttatgtgaaagggcctgtaacatagttgttacatgagcctcagcagtagtaccttaggtcctgggttcgactctccatgcgagcgaatttttcatgatttaacaacttcgtgctttcggtgtaggcaacgtacccgtcaacagcgaagtgcctgtagtggtgacttcgttaatctcaaagattttccggcttgccggcccagtcttcgaaaatgcttatatgggtagggtttgcgtgcgtgtgttcttagagatgagtgtgcatgtaattctaaagaaaaatgattttttatagtaaatactcaatgtagttagagttgaccaggttacaaaaattttctggataaaatcatgacgagttgtagatagcaaattttttttgtttgcttaccatggagaggaagctagacgagttggcagcgagatcaaacggtgtgtacccatcgttgttcatgatgttgactcgtacgttgtctccggcggaaagtagtgcggctagtcccttggacgcggctgcagccaccgcgaggtggagcgccgtgttgccatccttgtcctgcgcgttcacgatgccgcaaagcatcgggttcttgacggcgagcgagatgaccggcgcgtgccctttctcggccgcggcgtggaggaacgtcctgccgcggccgtcgcggagctcggcggcgtcgggccaggcagatatcagctcctcgacgacatggtggtggcccatccgcgcggcgacatggatggccgagaggccgtccgagtccttcaggaacgccgtggacggcggcgcggcgcgcacgatcgcgcttacgatggagcggtcgccgtcggacgacgcgagatggagcgggctgctgcctttgacgtcgcattgtccagacagagctggcttccatttcaataccaggtcgaccatttctgcaaattaatgaacatgatgtgacatttttgctcatgcgcttgatagctagagtgggtgttaagcaaatgagatcatgacctgagatctggaagacggcagcgtgcagagcattctgcttgttcggcccaacgggcgatgcatcgctgcacgtggtaatgatcgctttcacggctgtaaccgacttactcatcaccgccaagtacagcggcgacacgccggcggcattcagctcggaggacagctccggcgccgccgccgagacaagggcctctaccgccgcgccatggccgttcctcgccgccaggtgaagggccgtatctccggcctcgttcttgcatcccaggatgctgtccagggccagcagctggacgatggccgtgacggccccggcgtgtccggctctcgccgcgcagtgcagcggcgtgtcctgcgacgagttccggcgagagaggaggctgctctccttgaacctgaggtacacctcccggatcagctcgtcgtgtccttgctccgcagccacgtgaaacacggtgttactctccgcgctcacctctgatatgttgcactggccatgccgctgtagaacacctgagtaatttttttacacggatattggattaagcttttagggtaaactggtcactaacggtaattaattcagagttcggccgaaaaatgactcaaactgtgttcggcccctccttgccgtcacacaaaacgaagcacttattattgcatgattaattaagtattaactgtttttaaaaaaatatagattaatatagtttttaagaaagggggaaatttcagcaaatactccatatatccaaatcgatcatccgcgttcttccttgtcggctaattaagtagtatacgtactaaattcttacttcatgatatgaatgcattatgcatataaatattttataacttttccatctatctaaataaagaggtttgttacggtccagcagatagtacctcgaggtactagtaccaccaggtaccaaatgaaatccaaccgttgaattagcagggcacgataggaaacgaattgaaaaggggcggagaaggcccgtgacacacatgcgcgtgcagatgccgccgcaatctcctcgtcctcacgcgccaacgggaaaaaaaatttggtggagaccgggtgtaaaccggctcccgtgcagccccgaccccgatgattgccgcgtggcaatcacagaatcggacgtctcgctatgcatggctccaggcgcagcgcaaacaggatggaggagccgactcgctcgatggctcccgggcccgtcggctcaccggctcaccggctcatatcacatcgatatctcttctcagcagcagccattgccaccgacacaacctctctcatccgtcgtccgcatggcggtgatagcgagtggccgatggcgaccgccctgactgaggacgaagacgacacagcgccgcctgggacgaggttgccctgtttgccggcggctagtgcagagatgtactccatcttcctgtgggcagtagctgctatctcttcccgatcacgggcttttttcttaccatggtgcaggattgatttgattagttattagtttgatttgggcctctgcattcaaactttaatatagttgttaactgctacatttcaatggatgcagtctgaatgtttgcagattctaattagatttgacaaagtacaatattgattttagtcctctaccatttcgatttgatacatactgaagattttggagacatgagcatttcatttcttcatggtcacttggtcagtgcatatatttccagggccggtcctaatattttaggggcctagggcgacacaaaaattagggccctatattgagttcgttttttttaattgtattaggtgccagaattgaagaaaacttcattttagagtagcataagaaaaacagatttgcataaaaaaatttaatcatagtatcttaaacttatcatattttatgaagattttccaatgtagattaatttgatggttagaattttaaatatgtatggcccgatggagtaatttttacaaatctagtatttatgggttcaaaatcaatatcagtgatcctttcaaaaaaatcaatatcagtgatcccttcattaaggagtagtagcactaaaattgttgataaatgataatcaccttggccatcagcctataggcttgcttgaccaatcaaatgactgctctgccttctatagctacgcgtatgggcctcaataaattaaggggcttgtgtttttacgctgttgttggattgcaaagcagacgatgcgatccactggaaatcaacgaattgtacgatggcaatagcaaacctacttacgtatacctggtcagggggcccctgacttggcggggcccagggcgcttgcactgctcgccctgccccagggccgggcctgtatatttcagtaaaagactgtcaagttcagttgaacaaattaacatatcatattctggccaatatgtgaacagcggataaagtaaatggcagacttttgtttaacaacaatgctttactaatattatctagtacctttctgtctctctgaacaaatttgctccaaattcacgctacatttcttgggtttcatctatataaactgagaatctgcatctatatacatgatactgatagtgccactaacattttctgatggcataatgtgcagttcaagaagatgagtgacaagaccgatgtgtacagcctccgtgtcatcatcctcaacctcaatctccttaccggtaattaagtttcttgccgaaacgaaaccatgcatggagttgccgcagtgggtgtcgtcaattgtgaatttgtgatgaagtggcgaacgagccggttgccctcgccatcaccgccgagaggacgacgtctgagagagggagcggtggcggatgagagacagtagatgagagaggcgccgctggcagccggcgcggcggcgactgcggacgaatgaggccggtaggagagggatctgagcccgcgagccggcgtgcccgggagccgagtcgagcgaggctcatcttatttgcgctgtgcctgaagccgcaacgagctaaacgtccgattctacgattgtccacgcggcaatcatcgggatcggggctgcacgggagctaatttacacccggtctccaccaattttttttcccgccaacgccaatatccttgccatcatgcgtgctaacttcctccatcatcgccgccaaatcctcgattccatacagccccctccagcgcgagcgcaaaatccgccgctgcctagcgcagaaggtcatcctggagttggcctcaacttcacccattgaattttgtttctacggctgagactaggtcatcgcacttcaaactatcctggttcataaatcggcaagatgtatggcaatatcgcatcgttgtggtggtcgacttgattgctccgccgacgttgctgctcacgctgggccgtgcgctgggaaagcttactgctgcagcttgtgcaagcacgaaggttttgcaatgcatgtgtggcaagatgactagatgtctagatggggctatgtaccgaacatcccggaaggagtgaggaagcgtcggctgtaagattgcagcttcatcttccttgcttcgtctcctgtagcgccggctgcgaagtcgcgatggcagtggttgccgtcggagatgacaggaggggcctccccatcacgatgcagggaggagagggcaaggtggctcctacggctctggcttctggccttccggcccgcctgcctgcccgaggcgagggcgccgtgcggaggcgagggaacggcgaccaggacggggccggaacggcggcggcggtggatcctatcgctccacagttttgactcgcacaattgctaatgcgaaaggacgaccttacccttccacctctctaccattatgcggtaccatccaagtacctggcggtaccggcagataacagccattggatctgatccaatcgatggctacgatttggtaccgccccaacctgctggactgtaaaaaaactcctaaataaaactatctgaggttattgttaaaaagaaaattagtacgtgtaacagtgctctttaagtatactaaatgtgtaaaagcaaactaagaggacatgaaactgcgtaattgctgtcaattacttaccattgacttgatcaagatgtccctgcgcaacaccaccatgccgtggctgaagaaggagcgccatgacctcctcggctcgccctttggaggcagcgagatacagagccgggcacatctccaagccacctgcagaatcacctctcgccgtcaccgccgcctccgagccatggtgctgcgaagaacagcgcgcgagctggatgtcctgcatctgacgatgatgatccatttggatcaaaatctagcacagtgaagagcctatagatgaatgaatatgattaagaagacaattaggtggtgtttggatccagggatttaactttagtccctatatttaaacactaatttatagtattaaatatagactacttataaaactaattacataaatgaaagctaattcacgagacaatttttttaagcctaattaatccataattagagaatgtttactgtagcatcacatagtctaatcatggattaattaggctcaatagattcgtctcgcgaattagtccaagattatggatgggttttattaatagtctacgtttaatatttataattaatttccaaacatccgatgtgatagggacttaaaagtttaatcccatctatacagggccttatacggccacctcgcctttgctgcttaaatttgcactgattagtctcgcacatacggccaatcatgtcatcgtcattctatcaccatatgcacgatacgggccatacggcgtgtgcgcgggaaaaattgactgttgaattgagattttctttcaaccattttagtgaaaaattacagctattgacttgagaaacgtccaagtgtcttctggctagcttcacaagatgatgggctagctggtataggttcgcagccttacctcttctatttatttgaatattcgtgttttttgctattgactttgcccagagggacattcaaaacaatgaatagtacatgaatgcgaccgatcaaggctggtagaggccgcaagaaattatgaaaaatccgatgcagtatttaaatatcctcgttttgaagtagatagagtgtataagattcatttagcacgatgacagaaagaaaaggaaaaaataaacagtgaagtgctttttgtttcttaaacttgtttttgttatcaagtagatctccatacactctaaatgttgattctggtaattttatcaagtgtatctttttgatccaaaattatgacgactcctccaaaatcctacatggctgccacctccttttctttttcttcttgtttttcctttcctttctcttttcttcttccttcgtctcatccgtccatccgcatcccgccaacaatgcctcccgtaccaccatcaccttcacctctctcccaccagccaagacgacttcgacccgttcctagcctacctgaccttgggcggcgccatcctatagacaaagcatgtcgcccctctccccgtagtccatcacccttatatcctcatcgcctgcctcccacttcccgttggcggtcacctttctccccatctgtcgggtcccaaaactaatgattcggaaaccgacatgtttaactgtatcaagccctggatcagtaggttgatacagcttcgacaatctggatcgtctttgcatacgtttagacatagctttgaaggagataatattacataaagtaatagggtatttacgagattgtggctaactattacagcagaagctttagaatgacctaactctgttgttttactatagacttaaaccatttaaattacctagacttgaagattaagttaaaagagaactaacttatgtgattgaactcctgacttcggcaagaacatcaaatggactctgaaaaaggtggttgaagcaagggtgagtacaagtaacgccccgattttcgttcgggtttaaaaataaattaataatacattttctagaaattaaataaaagttaaatcaatttatccaagtgaaatgttgggagaattaaaattttcccttaaaaatcattggccgggaatattttgtaatattctttgtgccctaatgtactctccggaattttccgtgaattttcggagctcgagaaatagttttaatagcacaaaggtcattgcatcaatttaaataaaaagaaaacaaaataaacttccccttcctccctttcgggctcggcccaaaatcctctctccttcccctcccgcggcccggcttgcctcccctttttggcgcaagtctgcttttcctccctcccggcctcccctctcactcaggccgacaggtgggacccatggaccccacctgtcatccccaacctccggccagctccaaccgccgcccacgccgcccactccctccgccgatcccgcacctcccctcgtcccaaccggcgtggacccgagaccccttccacctcgcgaccacatcccgccccactccccctctctccccgcgggaatcaacgccacgccgagccgccacacccccacgacgccgccccacttcccctcgaaatccgccgctccccggccctctcctcgcccccttgagctataaaatcaatccccgtggactcctcttcctttttccccgttttcccgagtcccccacgccctctaccgagctctccacgccgatccccttcgccgccgctcgccggcgatctccagccgcccgccaccgccgctcccgtcgctgccgcgctgcgccgccaccacctatagcatcacaccaccccaccgcaccccggcatccactccatctccctcctccaccgccggaaccaccttcccatcgcgaggccgagccactaccgccacacaccgccttcagccggccgctgccgctgcgttagtcgtcgccgcacctcgccgcttgcgccgtcggcaacgccgtgccaagctctaccccggcctccgctccgtttccccattccaccaccgcaaccacccttccaccgtgcatcccgagccacctccaccatacgccgcctccagccgtgtgccaccgtcgccttagccgccgccgcgtcgctccgtcttcacctctcgcctcgcagcgccgtgcagcacctcggtcaccgttgttcatcgccggaaacccaccggaacgtggtacctctcggtcgccggtgagccccaccattcctctcctctctggcgtggtattctcgccgctccggtcgcctatttccctccctaaccgctccaataatttccctaggtcttgccggccctcggccgcggctccgccatggtcgggcgtcgtcggaccgccgttcccgtcgcctcccgtgtcggccgccgccatcctttccgccgccggtcgcctccccatggtcgtcccgtcgccggcgctcctcggtgaggacccccttcatctcctttccctttcccctcttttcgtcgcctcccgtgcgtgccgtcgcgccggtggtcgtcgccggcgaccatcgggccgtgcgccgtcgctcccggccggccgaccggtgagctggctcccgctcgcccgtggccgcccgatcctccttcggggcgatctgggccgtccacgtggccttcccgtgccgcccgcgtcggtgcctctgtggcgccacgtcggcgccacctccgctagccgtccgtcgtggccgccacgtgtctgccacgtggtgcgcccgcggaccagcgcatgcgtggactcggtccacggtgcgcccgccacccgtgagtcaccgtcaggtggggcccgcttgccggcgccacctctcccccgtcggatgacgtcataattgatttaaattgcgcaataaatcggtaataattctagaaattcattaaaatggctcaaaaccttctaaaattcatatctaattcattcgaactccgaattgagccattcaacttgcaaaattcatctaaaattgagctctacatgtttgtttactttttatgtactgttttcttggtgtttattagagtttttcctcgttttgcgtgccagcgtgtagtttccgtcgtttcggaagtccgcggtcgcgaggaaaagagttcagaagatcaaagtgaagaagcaaggcaagtcacacattctccttgagcatgttgatcccaatttataaatgttttaccgtttacaaataaatatgcatgttttgctaattacatgggatcagggttttcctatctgctcgcttgcgccatgtttacttgatatctgttctttgtcaaccttgggtaataaattgactagcttgtgttacttatgtgacctagctagaactatatgcttagccatgcttaattaccactagctcagtcgatgggataattgcagtattagacattctagtatcttgttgagctgcgtgctcgagacatctggccatgttttatggtcgtaattatccaactaaaatgcgactgaatggtgggctgtggatgcatggttttgcgagtcgcacccatagcaattaaggaccggttcacgggaaaccctggaagacttacagcgcttgccacaagcgggaatgggtaactgcttgatctgaagtatagctcgaccctttcctaggcaccggtggcgagggtgggcgtgatggagttgggtcggccggggtgtccggttgtccagctgccggattcaccgcggcgcaagaggggaccgcccactgccttttgaggggtgggggtgaaaccttagcgtggtgtggatggttaggggagggttatgcgaagggtctcgtcacaatcactcgacatggtgacgtgtgcatcatgggcacatgatgacgcggtgacatgtcggtgggttgtgtcttgtgggtacagttgtgcacctctggccagagtaaaactattcgaatagccgtgcccgcggttatgggcgatcgaccagattcaccgtgattagtctcacacctaataaatcgacccaatgcactgtagtacaggtgggttggttgggcctgttcaacgtggtgtagcgttgatcagtggagatttaatattactttaattactcaacagttttactgttttgctcaataaaatgttttacaaccgcctttatgcaaatagccacaaaccgtccttgtgttcccccttgcacgtctgcatcgttggtgtggcttgctgagtacggtggttgtactcagccttgctattattcccccttttcagaagtgtagtgcttctgagctgaagatggagttagaggaccaaggctcagaccccagttgagttttgcctgtggagtggagctgaagccccgctaggatcgcctttttccgctgctgctgcttttgtttcggtgtgaggactaagtgcctcttctgtaagtattttacgctttatttacgtttggaactgtttattacttgtcgttttgtgtaccctggctggtcctggacagggatttaatacacaaaatagtctggaaatttgggctaaatttctgggcgtgacaaagtggtatcagagccaacttgactgtaggttgagccaaatggtcaaaccgtaaggacaagttttctgaaaaccctacttgcaaattgtctcctctcgcccttcggcatttctttgtgaaacggtttttcaaaattctcctcccaatctctccaattcttttagttgtcaaacctagaggaccagctgtcagcttcatgtctgttcggaagtcaagtcaattcgagcctcaagcttcgtgcaaggagcgagaagatcagttcagagtcgtcgttctgcgaagatcaagtggagttttcccgaagttgacctaaacccaatctttcccagaagagtagttccgttagctttctagatcgtgtgttgtttgcttgtgtgtaggggtatggtttgcatcattggtggggatgcgaccatactaggttgtttgcttaagcaacttgaacaataaaagtctactcacaacataacagtaggcaagtggtttagtaccttatctttagcaacccctctcttccacctttcttccgtcctggcagcggatggtcagtgtcagagataagatcaattaaagtcaccaatcaatggttcagttgaaagctacaaggtatcccagtgccagaagaaccctgctcgtgatcaacatttggtgtccaagattagatgatggatgtattgatgcgggagatgcaaagctcgatgcaaggtcaagtgtagcggaaagaactccagcagtagtgtgttgcagtcaagagtcagtgtgtccatgagctaaatgagagtcacttttatgtggaatttcctatcatcaactaagggttaagttccaaatcttgtcggggtgaaagtgcatcgccattgcttcaatttgatggaccgatgaagttttcagttttcaaagtcagggctctttgtaaatcagagaagtgttggctatatttgaaggacaacagttcaactgatcccagccacgcggaagtaagactactccctgtaaggggggtaggtctcggagaagagttttgcctcacttcgtcgctgttttagttgaaggttcaaccagtgccgcaatcagggtagcacttgaagaagcaagttgcaaggtatcagaagaattaagccgatccccgggcaaccgattgaattctaaggtacacccatgaggccagttcaaccgcttagcttagacaggtcaagcaggtttcctggatttacttgtcatttgagttgggaccagtccaagcggacatagggtaaatgatttacaaatgccagattcaattttcatcctcttatagccagcgtggtgaattctcaggttaccaaaattgccaacctcaacagttcagtccaagataagtaagtttcaggagtatccgcagttctggcctaggtcagttcaagcagaaccagtcggtccagttttggcaaagcaaaggaacagaaaggtcgaatccagccagtgcaatcgtgcaggtttgatcaaccagtcaatcaatcagttcgaagcagaatgtggcagttcaatgtgcagatcagtcagaccgcccaccagcaccggctttctttctagccatcccagaatctcgggacgagattcctgtaaggggggtagatttgtaacgccccgattttcgttcgggtttaaaaatcaattaataatacattttctagaaattaaataaaagttaaatcaatttatccaagtgaaatgttgggagaattaaaattttcccttaaaaatcattggccgggaatattttgtaatattctttgtgccctaatgtactctccggaattttccgtgaattttcggagctcgagaaatagttttaatagcacaaaggtcattgcatcaatttaaataaaaagaaaaca

SEQ ID NO: 22667 - DNA, 1011 bp, Oryza sativa
tcctgcagcccaaataatggaaaatgtaacggtaggggcatggaagggatcaaactgaaatttcaggggcatagaagggatcaggtaaatttcaggggtatggaagggattgagtgagttttcaggggtacacaaggaatttactcttgtttttttctttttttaacgactcgcatgaaacgatgcgaagttctattgatagaggagaaaaaaattacaaaattacaatcctggagggtcgtaaccagggaaaagaaaaaaatataccaccacccacacaccgacagcgccaacacacaagaccgggagaagactaacaccggaccaggcgccgctaagcgtgaccgaccgccgctagaccaacaaaggaacacagacgagatcgcccaaaagaacactctcacaaccaacacaaagccaactcctagagcgtgcttgcaccaatcgatcgagaggcttcggccaggggatgccaaaacgacgtcttcaagaagagaagcgacggtaaaccgccgccgctgtccgtcggggctcaaaggagcttggactgggctttcgcccagcaaccacctctgagggatgagacagcacgacaacgccctcaagagggggaattaaccatcgttgtcacccactgctcaccacctgcgaatccatggctgacgcattgatgctcccaccacccctcaacctctgccaacatgtgggacccctgcaccggcgccccccgccggccagccttcgagcgccgaagaccgcgccacatccaccagcagctccttctcgtaccgaggtcgcctcctccaccgccggcagcgcctctcgcgccaagccggcttcctccaccggatgcacctctcgcgccaatccggcctccctccatcggccgcgcctcacgcgccaagccggtctccatctccgccgcccgcgcctctcgcgccgagccggcctccgctgccatcggtgtcacgccctgaagtacccctcccttgctctaaattcataaaataa

SEQ ID NO: 22668 - DNA, 20578 bp, Oryza sativa
aagacgttgctgtggtctcatcagtgcgagagcaaggcaagtcatgcaatacaattgatcatattgtacccaatttacaaatatcccgcatttctattaaatattgcattgttttacaatatcatgtgggatgggtcctattactcagccatatattgtttaccttatgccattgataacgtgggtattaaaatgactagatgttggtttaggagatgcttagccatgcttagttcaactagtgcacaaagagggatcacattaaagcatagacttgattattggcatagctttgatttagtgccatcgtaatggtgttggttaattaaaatacacgtcatggtgggctgtgggtgcatggtcttgctagtcgcacccatggcatttaaggaccggttcgcgggatgccctggaagaactgaccgtacttaccacaagccagcgtgggcaacggctgggcttgtagtgtagcttttctctagccgacgtacccaggcgagggtgggcgtgatggagttgggtcggccggggtgtccggttgatcggcttccggattcactgcggcacgaaaggggggctgcccgttgcctgttggggacgagggcgaaccctaaggtgttgtgcgatcggttagagggggttatgcgaagggtcctgtcacggcctctttccggtatgtcgtggtggcatgtcggcgcacgggaacgtgtcgtggggctatgtcttgtgggtacagttgtacacctctgatcagagtaaaactattcgaatagccgtgcccgcggttatgggcggtcgaccagattcaccgtgattagtttcaccctagttagcttttggaactggttagttcaggtggtggtttgggcctgttgcaacgtggtgtaacgttggacagtgattggttaatatggattaattactacaactgttttactgctttcaactactgctttgaaatgccggctttatgcaaaagaacctttagcctcccttggatatatcttgcatcatacctcctcttccggtatgacttgctgagtacagtgggtagtactcagtcttgctctcttttcccccactccagagttgaagtccttctcagttgaagatgtctcgaagaggttggtttcgtcgctgccgtcaaggattgcctgtggaatggagtcaccgctgcaggagtcaagtcttcaggcttagctcgcttttatctttttccgctgcatttgtaatcttttctatttttgtaagacgtggatctgtatgtcaacaattgtcgtttgtgtaccctggctggtcctggacaggggtttaatgcacattcagcttagaaattctggttcgtgaatttctgggcgtgacaatcggctgcgccaagccggtctccgcccctcctccaaacgctgtcgcgccggccagatacagtcgtctcctactccctcggctagccgtccgaggccgccatgcatcctcccacctcagccacggtggtcaccaccgtgcctcctcccaccgcagccacggtcgtcaccttgcctccacattcacggccgccgcaagccggccgccatcgccgctgctgtctccagccgccgacaccgccaacgtggctgctgcctcgtcgccctccgccaccactgcctctgcagtcctccgctgccgccatcgcggccgtggaccaccgccgccgccgtcgccgccatcagggccgtggacctccgccgctgccgtcgcccccgggaggaccagaaccggcctcacccccgggccttcgccgccgttgccacatccgtcctcggtggcgcgcatccgtcacctcctttcggccgccgtcgccgcgaggctcgctgttcgctcggcccctggacgtggggaggccggatctgccgccgggggaggcggatccacctccagcgtgcccgaattcgccgcggtgacccccggcgccgcttcccgtgccgctgatcgccgctcgccattgctcggcccctggacacggagaggccagatctgctgccgagggagacagatccgccacgccgaccccccggtgccacctcccacgccgtggaccgccgctcccgagcagccctggtgtccccgccgctggcttcctcgaggaggggagagggccccgccgccgctgtccttgaggccggccggctttgccaacgcgccgctcgggcggcgcgaggcagaggagaggaggagggagggggcggcggaggaggatgaggtgccgcccatggacgggagcgacgcggacgaagaatttttggccaggagccgaactgatgtgctgatgattgttaagtggtaactatggcaatgcatgcgtttatccaaccatttgccatcaatgtagttcttactatcgaatattttgtggttgatctatgaaatcatcagtgtactcatgactgcaaagtgcaaaccacgtccaaacacctttgtacgctgttgtacatcaaacctctataatattcaaatccaaacgaaagctactcttgtttgtaactacacacaagatgattgtggaggtgcatccttgataatttctcctgagtatgcatgacagatggttagtttttgctgcaaaaaaatctctttgcttctatatattaattacttcctccgtaaaaaaacgaatctataattagatgtgccataacatagtacgataaatttggacagagatatgtgtccaaattaatagtgctaggaggttggttttttatgagacggtcataataaactactcctgcacaaatccttctattattaatgagtactcccaactaaaatatcactcatatctcattgatatatgagcttagtttcatatcacaatcatcaattgttcgacaatcttctcacatcgaaataatacaccacaaccagaacgacaaatgctgtgatatttataattataaccgagaagataagcaagctgtatagggagtcgccgaggaacggatatcgcctcttgatggcgtgagcatggcgaccacgccacacgaacctccaaaccgcgcgatacgtcgtcgctgcaggatcaatccacttctcgatccacaaaatcaaggcgttgaagcacacatagatgaccaagaacatggtgatcaagaccgtcctcgagctcgaggttgcgatgacgacggcatggatggcggagaagaaggccaggatcaggctgacgagcgagacccagatgcactgcagcgtcaccacgaagctcttccacgagacggcgaggtgcgccgccgccgccgtcttcccgtatacgagcaggatgacggcgaccactgacgtggtgatggcgaaggtgtcgaggaccatgaagtatttgaacgagatgttgtccctgaggttggccgtgccgtcgtccccgtacccgccgggcatgttgaacccgacggcgaagacggcggcggcaatgagaacagccaccaatgcgaggctgtcggatgtcttctcgataccactcgccatgtcatggccgctcgacggcttcagatggtcgttcctttgtggctgggcctgtgctccgaatgtgaccaatgtcacaacaaagcttaattacctacattacattcacaatgaaaatataggatgcaagtcacatatacagtgtaaaaaacctaatgtagtaataaaggcgtgaaaaataatctcagacatccattctgactatacggtaacagggttttcaattttgatattggccattttggttctcctaaaatttcagtatcttcagcacttcttggaccgatttttttttaaataaattaacataattaactgaatttgactaaattttgaccaaattcgtaaaaatttgagaaaaccgaaaatttttggccaagatagtcacttgcggggggtccgaaatttcaaaccaaaattgcaatcaatataagtttctaggtttatatatgtacactctagattactactacctccgtttcaggttataagactttctagtattgttcacattcatatatatgttaataaatgtagacatgcattgtccacattcatataatgaatctagacaactagattcattaacatatatatgaatatggacaatgctagaaagtcttataatctgaaacggaggaagtaacgagtaactaataacatagtaaatgggcatgcttggtttatggttgctcaccatattgaacaaactgtttgattctgaggcgagatcaagcggcgtgtgtccatcgtcattcaagacatcagtttgcacattcccctcccggagcagggcctccacaatgtcaggcgcgccggcgaccacggcgaggtggagcggcgtgttcccgccggcgtcctgcgcattcacgaggccacccatcattatggggttcttgatgtctagggacaccaccgacgagcgcctctccctggccgcggcgtgcaggaaggtctcgcagcggccgtcgcgcagctcggcggtgtctgggtagaaccctgtcagctcctcgacgatgccgccgtggcccagccgagccgcgacgtggagagcggagaggccatctgagtccttcatgtacgccgtgccaggtggcgccgtggccaggattgcacgtacgattttacggttgccgtcggacaccgtgaaatggagcggagtgctgccattgcagtcgacttggacggccaattctggcttccattgtagtagaaggtgaaccatctctgcgcaatttaatcaattgataagttaagttgggcaacacattctcgtgtttgcgctcaaaaccttagaaatcgacggttcaacgtgtaggatcgaatcacaagaactaagccaaccagaggggggtgaatggttggtatacccaaaaaccgaaaacttttagcggaaataaaagttaccctcgaaatcgatggagatcggtctgaccgagattgatctgccggtctgaccgagtggatgccgccggtctgaccgcccgtatgccgctggtctgaccgccggtatgtcaccggttggaccgccgaaactcggtgaaacacaaatcgaagaactcttaaagtggatgacaactttattacttctctctgtgtttacaaagtgcaccaacagcactccttacaaaaatttcgactaaactcgaaaccctaactcaaaactcaactcaattactctctaaagcgataccgggaagcctcacgctccccctctatttatacatgaggtaggcagcctaaagccacgaaccaaactcatactaggagtcctaaacaccttaggaaaccctctagtacaagaaagaaactttacataaccaatcataccaaatttggactccttccaaattcgactccgcatcccatacgcacacaataactctatcgtatgccatatggaatctccatcaaccacatgcatcaactctagcctaagtatcccgcatgatctctgaccaccacggacgtcgtcttatccccaagccgactcccggtccatcactgcaaatactctcccgagacatcgagtcacctacacatgaaacaaacaaagaaaccatatttcgagaccaagctatctccaacttgactcattagcagcaaacaatagtattacatacgcatagtatccatctagaagtcataatcatggaataaactcggatatccaaataaacaacctgaaaccgaaaccgacacagtgtcggccggtcagaccgcggactgcgccggtctgaccggcagcacaagcccggtctggccggtcccacataaaatcacagcagtacctgtatattcacctgtgaaatccaatcatctccaaaaccactttgtgaataaattccaaatatcaaaaccaataatctccaatgcccaattgttcatcacagaatatgaatcaaaaacacctttgattttacacaacggattgatagcatactcagggttcaaaatttcagttttgctattcctatcggggacattgataggaccgaaatttccaaaactgcagaaattttggtccaaaataattttatttttaacaaaatttggtcagatttgagttatttttgttaaattcaaaaatagaagaaaaagtgaaaaaaaatgggtgaaacaatttgtatctatcccctgaaattttgaaccgtgatcatacgtaagcttcggaagacggcggcatgtagaggattctgcgagcttggcccggcggatgaagcatcttcgaaggtgataatgattgctctgacagctgccaccgacagatacagaaggaaggagagggggagagaagatgtcaccgtcaccgccgctccccacagggaaaagagagagaagggaggaacaggcccggccctggggcagggcgagcagtgcaagcgccctgggccccgccaagtcaggggccccctgaccaggtatacgtaagtaggtttgctattgccatcgtacaattcgttgatttccagtggatcgcatcgtctgctttgcaatccaacaacagcgtaaaaacacaagccccttaatttattgaggcccatacgcgtagctatagaaggcagagcagtcatttgattggtcaagcaagcctataggctgatggccaaggtgattatcatttatcaacaattttagtgctactactccttaatgaagggatcactgatattgatttttttgaaaggatcactgatattgattttgaacccataaatactagatttgtaaaaattactccatcgggccatacatatttaaaattctaaccatcaaattaatctatattggaaaatcttcataaaatatgataagtttaagatactatgattaaatttttttatgcaaatatgtttttcttatgctactctaaaataaagttttcttcaattctggcacctaatacaattaaaaaaaacgaactcaatatagggccctaatttttgtgtcgccctaggcccctaaaatattaggaccggcccttgggaggaagaagaaggggaggataggaaaggataatatgtaggctccacatataagtggatctcataatattttttcgtgtgaatgataaatggctcccatatatttttttttatttatgcctgtaatacgaatagaattggatgatatgggcaacgacgtacgtgatatccacattgactctgtgagtttcattcgcttggtatccacatcacacggactctctttcgtagttcgctcacgagtcgtgactttgcaatgaatgttacgcgtgacgggaatcggatgcagacgaagtaccatagttttaacaaaaacatcttcaatttttaaatcgcaggcgagggcgacatagtcccaatcagacatacgacaagggcgcaaatcgtgtgtgcgagggtgttgcggtctcaatcgcggcggcgtgtaaaggcacatgtggaaaatggactcaggcttgggcccgatccctgcgtgcgacaaggggtgtgtgaaaaggtgaggtcccaattaattcgcgcgcgtctcggataagagggacactctggcgtaagaaaaaataaaaagatttgacagaacaggaaattaaaaacgattcaaacacggatgacgcaccaaaattctgacggaaacatcttcaatttttataatagtagagatagagataatgctacataagcaccatgtcgtcaacgaaaccgctctcaaaaatgtcaagagagttaaattacaccgattttaatacttgggggttaaaatatcgggtaatatggttcaagcatgtaaatcagataccactagttaagtgagtcaaagtgaatttattcctcttcataatgcttggtgtcctctctctggtcttctggagagagggcatgtctgattacggtgggctctcggaccttgaccagcgttcagccagactgtcatgcgtcgtcgctcacggagctccactgtgcatggtaggggtgagcgttcggtctaaccgaaaatttttttcgtctcggttttcagtctttaaaaagtgaagaccaaatttcaacacaaaaatattatgaccaacaaattcggtctcggtcttgatcccgaccgaaattcaacgacatttttatatatgcaaagaaataacggacattttcaacacaaataatcacaaaaaaaaatttgtaagcatgtatgagtaaaggctcttattagattgtatgcgtagaagaagtagggaagtgtaagttaaagtttaatgctattgaacttagtggattgtaggttgcatttatatatttatttttattaatttggtcttttcggtctatttgattaaccgaggagactacgaattgactgaacaaaattcggtctttcagtacctaagaccgaatttctcggtctcaatcttggtcttttcagttcggtctttttctgcccacccctagtgctcgagggcccggcttgagcaggatgtttgggtgacccatgtaacaatagatattataattttttcgtattttttaaactttttgattttaaaaataattcctcccaaaacttatttctaaatttttatagcttttgttttcagaagttatctgaatagatatcttgatagtttcactgttttccattttcatggatacttaccctcgtgtttttttttaaaaaaaaaagtcggaatcagtttttgttttcaaaaattatctgactgatactatttgtttcggaatggaggaaactatccgaactgattttataacttagttatcaggtacgggaatatatttttgagattatataaataaaggtgagtttctttgcaaattgtataaactgaaagcaacctgggagtgcctgagagaggacggagctccaccatcaatagggggagctgcgatgcatttcttgcttgcacagagaagctgcattcaggaacaaaaatacagcagcaggaagaagcggaatcccgcaaatctgtacacagctcgtgcgcgtggattttgaaggagtttatgcgcgtggatttcgtatgagctctggtcggctctgttctatttctttaactccatacttgcttgttgtttgttagcacgtttttcaaactgttaaatgatactccctccatattttaatgtatgacgccggggactttttaaccaacgtttgaccactcgtcttattcaaaaatttcatgcaaatataaaaatacttatgtcatgcttaaagaacatttgatgataaatcaagtcataataaaataaattataattacataaattttttgaataagacgaaaggtcaaacgtttgtcaaaaagtcaacagcgtcatacattaaaatacggaaggagtatatctttaaaaaaagattttatatagaagttgttttaaaaaaaacaaataaatctatttttaaaatttataatagttaatatttaattaattatatgctaataagctttttttgttttgcgtgtaaccaaaatttatctccatatgtggagatagaacagatgaatattggcatcacaagtcactgaattcaaatattcgagtggcataataaccaaaagcttaatttgaccatatgccatattcagatgagcgctataggatatgccatcatctagaatcaaaaagaataaaaagctcaggtttaattaattagtttggtaaaaaaaatactaacctctattttttattgataactttgactaaaaagttatttactttcctattttacccctacaagtaatttaatcgtatgtctatcttcataatctagaaacttttatctattacctccacccaaaaatatagcacaatataattaaaagggatatagcttagtactacgatcctacagttagagattgttgtggcatgggaagagtaaaaggccacgatttagctgacatgcgagacccatatacaatgtaacgccgccatgaagctcttccacaagccggcggagcgagacgccttatggtagacaagtaagatcacagtaaccattagtgctgttacaacaatgttgtcacagaacatgaagtatttgaatgaggatgcgtcttcgaggttcgtccgccattgttcggtacccactgggcacgttgagcatcatcattcgccattggcatcatcgcgccactgccaccatcgcacgtcgctgtgaagaacaacgtacgagctggatatcttgtatctgaggatgctttatttaatcaaaatctagtgcgtaaagagaggatataatctttggactgattatattgattgtataatgtagaagtaaactgaattagtttgagctccactttgcttgttgccttgatgctgctatatgggtatagctaggtgttgttgctgccgctcaagtggtcttagcaatacattagggatttatggtgtcataataattggctaattgtatttgatttctacttttattatgtgtaagctcaacgcctttctcctactccattttaacacaatttcgcagcagggtcacattaaaatttaaaagtgaccatggataaacaatggtgtcaattagaagtagacgattataacagacataactctaataatatatgatctactaattcaatatatttctaaaattattattcagttatccaccattcgtattgtttgctcaacgtttctaaaaacatattttctaaaaaaactttcctctatgaaccacttgttctaacatttttcttcatgtgaaaacaagatgagagcgcacatccaaaaaaaattatcaagtttttagtttatgcacgacaatatgatgtctatgaagttagagatatttttgggtccgtagaaaatgagctagtttcacttagtctttaagttccgagaaatgacgtgtttggctacaatgctagcatgatcctagcttgacttggcaagactaatcgtttggtatcgccataaaatcctagctcccagaagcgaactagcccaaatgggccagaaaaaggctagctcatcagggagagccaaatctgctcgcttccgacgacaaactaatcgcgcgaaaaattgatgatacacacaaaacgatttctcctaaacctaccaacaatcggcccatatcccatatctcatcgtactcttcctcaattcttgactaaactctcaggttagccaatagtaataaataaaacatgaagttgtttctcgaataatgaactataactcttttttagataattctttttgcacattatctctgttgtttaacgaaaacactcgtatatatagtcttacgttacttgcggaaaaattacaagccactaattttaactaaagagagcaaacgaaccaaatgcagagatacaagtaagcaatgagttgatttgcctttgccgagttaggctagttaggaaaagaaactaaaagtgcaccatagttactgctagagatgctacggcagggacgaaaattcaaaacaaaggcaaaaggcaaaaacagtttaaaactcgaactacggaaatagattccgaatttatccttgttttcctctttgagggaaagagttcattcagtacactgattcactcactcccgagtcccgacctccctcgcacgtgcttccctgcgtcgaccccgtcccgacccgtccccctcactcgccgccgccgccgccgccgccgacgccgacgccgaggacgacgacgacgatgccgcggaaggcctcgtcgacctcaggtacgcacctccaaccctcgccgaactccaattcccctaagcaagcgctaattccccgaaccctaactcccagattcgcgcctgaaatggcggaagtggaagcggaaccccaccgcgtccccgtcgccgtccaaccgctcgtcggccgccgccgccgcggcggaccactccgacgactccgactccgccgccgttaacgaggacgacgactccgcggtccccgaggacgccgacgacgaaaccctagccggggcggaggaccccgtgctcgacctccgcgaggcggaggtgctcccttcggcggagcccgtctcggcgttccccgtcgccacccgacgcgtcgtcaaccggccgcacccgtccgtcctcgccgtcatcgcggccgagcgatccgcgtgcgcgggtgagggttccgccgcggtggcggcggcgccggtgctggagaacatctcgtacgggcagcagcaggtgctctccggggtgctccctgaccacgcttcgctcgcgacggacactgacaagccgtctacctatgtgtgcacgccgccgaatcttatggaggggcatggcgtgaccaagcagttccagggtcgcctacatgtcgtgcccaagcactcaggtccgcctgctctttgcaaccaaaaacctgaatgtctgagctataatgcggcactaacttgtttgcgatttgtagattggttctccccagggatcgtgcacaggctggaaaggcaggtggtgccacagttcttttcagggaagtcgccgggcaacactccagagaagtacatgctattgaggaataaggttattgcaaaatatttagagaacccaagcaagaggcttgcttttgcagagtgccaggggcttgttgcgaacacagctgaattatatgatctcagtaggattgttaggttcttagacacttggggaatcatcaattaccttgcgtctgggtcggtgcaccggggtctaaggatggcaacctcccttctaagggaggagccaaccggggagttgcaactattgactgcgccactgaaatcaattgatggcctaattttgtttgatcgaccgaaatgtaacctccaagcagaggacatttcttcattggcatcaaattcggaggttgtggattttgatgctggacttgcagaattggatggaaagattagggagcgattgtcagagagttcttgcagttattgcttacagcctttgaccagcttgcactatcagtcactaaaggaggtgagcatctttgtaattttcgtttagatgttctctccccatttttcatgtgcaggaaacccttctatatcttagtgttgttgcttacattttgtttgacacctaaaagatgaataatacaaaaactgggaaacgatatcacagtaagctgagcagtagtctagcaagttatgacacacgcttttgctgagaattgacatactagattctgttgttgaaatttaatatctgtctgtctgtgtttgccaacccaatgaatacttgctctgtgttttgcatcataatcctgctcctcactgctctgtgtttgccaacccaacgaatactctacatatgttgcgtcatgctctgttctgctaaaacatggaaactgcatttttaatttgagaaaagaaaaacatttagaacacagaatcttacactcttactagtcagcctaagcaatttatggtctttccatacaagtgatcaacccaaacattatattgtgctgaaagcttctgaacagaattggttattaaatgatcagtgttcctgcatagaaaaaaatcacaatacaagatacagtcaacaacaatattaacttaaagaattaatagaaagtttatatggttgttcatgccacttttcagtgagtgataagagtaatgtggcaattgattggatggcaggccgtagtgatactgtgaactgtcataagaaaaaaccctgcaaaatttagttgaaataagaagacacatacaatctgtagtattcttttgaattaaaatacatataatttgtagtatcaaactgtattgaagtgagatgattcatgtaaacttgacaaatattgaattatttattggaagtacaacataaagggcaacataaagatcctaagatgcctatacaataacatgttagaatgcagctgggatagggataaaagttactaccaagagatttgggatgtacatctggacaagagcatttaggtggatgtttactgcagccacctccctgctgctggtcaatgggtgcctagaatgtacggattggagaaggatgcacacctgtgcaccatgcttatacttaccagctccttggttgccgtgcggtttactgctgcaaggaggccaacaatcaaattcaaaattaaggagagcagaaatgatgcagatgaaacaataatgttagacactcaaaatgtgttggataagaagggccacaaagcgtgcatccatgacagctactgtcctccattgaagtatcccttgatgcagcctgccaccacaaactccataacagctttgaaagttctgcttggaattttcagggtgaagatagcaaataagacaactgctccttcatatattagtagatattattgatggtatcatatatttgtggtgtagcaatgactagaaccctgtttgtagctgaacttaactttaagttatgggataggtgagtttcacactttcacttcaaattgcagtttgtgctattttgtcaactatgcataaattgattacagtagtactctattttctttgttgaaggaagataaactggtaggtctattttgcctgtgcaatattaatgcatcatgctggttcccactcttttctttgtgggggatgagaagcaaacaatgacaatcttcttgttggttgagcaggcagatatcgctctatgctctgattgcttccatgatgcgagatatattactgggcattcaagcttagattttcagaggattgatggggataacgatagatcagaaaatgatggggatagttggactgatcaagaaacgttattgctgttggagggcatagagaagtacaatgacaactggaataacattgcagagcatgttggaacaaagtcaaaagcacaatgtatttaccattttattcgtcttcctgttgaagatggtttgttagagaatattgaggtgccagatgcatctgtgccatttagagcagaaaccaatggatacccacatttagattgcaatggcagtacttcaggtatttttacatatttacactgatagttcctctgttatcagttctcgaaatttgttttctcacaaattttagattataataactagcatttttaacattgattaccatgtttttccataggaaatctacctcaaaaaattccacctgataaccagcttccgttcattaattcttctaatccggtgatgtcactggtaagcagttgttcactaaacctgtttagagaatgagtggacaatttttcggttttcaacagtgagttgtgtcatttagatttggatgacaagaatgcatggtactccctccgtttcatattataagtcgttttgactttagtcaaagtcaaactactttaagtttgactaagtttgtagattgatatagtataacatttacaacaccaaattagttttattaaatttataattgaatatattttcataatatatttgtgttgggttgaaaatatcactatttttttctataaacttggtcaaacttgaagcagtttgactttgaccaaagtcaagacgacttataaatctgaaacgcagggagtactattttttatgttagctcatagaatttgtgtttatctccacttctttaattctatttgacagtgacattttcttactgaagttatatttgcatagctctgcttggcactcctttggattataatccgaagctgattttgaatttgggactttgattttaggcttaattatgttcaataagcttggttgctgtaacaacagaaagtgttgaagttaaataagccaatgatgttacttccaaaaacaatttgtatttgaatgccaatttgatagttagtagtagctgcctttattcctttaatttggaggtggaggtctaagctgaactatcttggaactcgattttgaaaatcatagcttataattgttgattgattatccagacgtagcagttgattttctctaggctgaaagttaaatgcctgtacacattattttcagcagttgattaccagctcaaagcctcaaaacaccatatgcactatagagctgacaaaatagtaatggaagtgcactacgagtgattttagtattaaatgtaatcagttggaggtttagtaattaggatgttagagcaatgacatagtagaaagccccttataacccctcatttttattattcttttttgctcgtatcccttctaatcctcagactgatctgaggttcatttcaaccttagtgccttccaatttttgtgcctgctccagacttagcattcctttacaaaatgtatgctggcacatatacagcgagccactgaatgcttaagtttgagtaaagtgcatgggtgatccttaaacttgtaggggtgtgtcatttaagtccctaaactctaaaactacatatccaagtcccaaaacttgtcatagtgtatcatctaggttccaaatcgccatggtccttaaggatcctacgtggcgctgatgtggcatgccacacagacatgacgtgatatcattttgattgacaaatgggatccatttaaaaattttcctttttcttgttctcctattttttcctttcttctcctttctctgtgacccgagcagaagaaaggaaaaaaaaatgaatgagaagaaaacaaaaaagaaaaagaaaagaagaaaaaagagaggaaaaggacacatcatgttcatgtggtatgccacatcagcgccacgtaggattctagaggggctgtgttgaattgggacctagatgatacactttgacgagttttgggacttggatctacattttgagagtttggagatctagatgacacaaccctacaagtttaaggaccgcctatgcactttactctttaagttttatagagatctatacttataacttgattggcgcaggccacaagttctgaagtgaattcttattagttcaaatgcttcctcttgttctgcctgccttggtgttattaatcaagatggttttgtccgtcatattatctcaagtgtatgtgttatcttccttgctgaatttgacctgactatgacactgtttctagtatagagtgcttagtaacacgagaaataacatcagtattatcctgaattacttttcatattgttccctgattaattttaatttgaaattattgcaatcacacaaatcctgtgcttcactgcttcaacgtaaactagttctcatgatgtttgaaccaaacatatataggcttcttagccttctgtatatgtctggcattgtgtgtcttactgtttggagatactgtgcaggttgggtttttggcttctgctatgggaccaagagttgcagcatcatgtgcaagtgctgctttatcagttttgacagtagatgatgattccaggttagccatcttccctgaaatgttttattttagtagcatgattaaatcatttaacacttcagtcaggattttagaaaaaggttacataaattgaatactagatcttatctggtacaactacaagctaccagcaataaccatctttgagttctgtttgagtttattttatcaaacagcatatgagtactagataaatgaataagattagtccagaaatatcgcaccaatacttgtagctacagtactactgatacggctacccagatagtaaccaggtggttactactgatctttatccctcattgagattgcggaacttatccacctgatgttaaaattggacctttggtttgtttcatttggtcgttaggttggtttgcagtctcctttggacttattatggtagatgtaggttttgacttaccttttgctgaacactgaagggtgaattcagaaggcatttgctctgattctaggggccaaggtccgcatccgaattttcgtgatcataatggtggtaatgacttcatatttattctccactatgataatcagttttctgcgcaatctcatgtactcatgcaagatattagtgttaaggaaaccatcctatccttaaataggtgtatcttcatccatctctccagaaaaggtgaagcatgctgccatgtgtggtttgtcggcagcagctacgaaggctaaactttttgcagatcaagaggaacgtgaaatccaaagactaactgctactgtaataaaccatcaggttagtgtgaacgttgccatcttgtttacatttgggccttgtttttctcattattgctgtcaccagggtgtgaaaaaccgccggtaaccgcgcggttaccgcggttaccgcccgtaccgcgggggtacggttacccgtaccgcgcggtacggtttaataaaattcgtccaaattcaaaaatttaaaaaaaaaaagaaaaaaaatcaaaaaaaatagtgaaggtagtgcttgatttatagtgttttatggtgaagaaatttctcaaaaaagagtaatatttattcaaatttgagagcaaaacggagaataaatttgaaaattggaaaaagaaaaaaaatgggccggcccgttactgtgcaacccattacacatcgcgcggtaaccgcgccaaaccgcgtggttaccgcgtcaaaccgcgcggtaaccgcgccaaaccgcgcggtttgcccaaatttttgaattcaaatttcgatttgtaaatttgtcgcggttttgcgcggttaccgcggttaccgccggtaaccgccgtaccgccgggtggcggtaaccgggcccccggcggtttttgaaaccctggctgtcacatctgagggtgtgttcgccgttgcatggaaaacggagcagtccattagcgcgtgattaattaagtattagctattttttttcaaaaatggattaatttgatttttttaagcaactttcgtatagaaactttttgcaaaaaacacaccgtttagcagtttgaaaagcgtgcgcgtggaaaacgagggagagtggttggggaaaagggcatccgaacactgcctgaatgtctgagtgtgcaaactcctacttaagaaaaatgcactattgcatagccccactttatggcttattttgtacttggtcccttaaaatatgagttctagaaagagtttgaaaatggcagtgtaaagttggtgtctgtgtacacgatttcctttcctagtctaatttgatggtgaaaggtgtttctcatacattctgattaggttttggaaacttatataactcaattgcctataataccaggtaggcatgtctccaatgatagtgttgtggtgaatgataagtatagctggtgaggactgagtctataactggctgaactaattgtgtcgtcagtcttatgtataattgccagtaagtaggatcaataaaattcaaaactgtaattcatctaggaagcaagttaggaaactgtaattgatctatgtttgatctgccgttggtcatagtcactagctttttttaccaagttgcattgtcgtcattgataatatttgtttgcaacaacaattaacttgcagttaaaaaggttggaactgaagctgaagcagtttgccgaagtcgagaccttgcttttgaaagaatgcgagcaagtggagagaataaggcagaggattgcatctgaccgtgtccgaatcgtgtccacccgcttggcctcgcctggaaatagcctacctgggggtagtactagcaccatgtcatccaatccaatgagtatgagccccagaccgatgggcgtgccaggctcgatgcctcaatccagtatgccagcaccatttgccaataacatgcaggggcatggtcacccccagatggcattcttacaacagcagcagcggcagcagatgctgtcatttggacctcgtctgccgctgtcggccatccaaacccagccatccccacagacgtcaaacatcatgttcaacccaggcatgcccaattctgtaacccctaatcatcatcaactgttgaggtcgtcttctggaaacaattcaagtgtaggataggagaaagaaaaaagggagattcataagattccaaccagtgtagcttcctcagttgtagctttatatgattcataaacatctcattgttattcatttgtacaatatgttccattggtcgtataatttatgatcacttaggttctcattttatgtatttatgatcacttgggttctcattttatagcctcaaaagtgttgttacggatgtctcacgatatatcgtttgaatctggtgaaattgcaatatttgcgctttaaatatcacatagcaaacataaagccctctttggcacaactcgagatccaagatttaatggagctgggtatttctaggagttgggtatttatagctccataaatccatggatatagatctatgatcacgcggataatatttgattcaatcaatttgttcttattttaggtaaaatttaaaattttaaaccactataatttaacatataaacattaaatatactgtaaatctaatatttggagctatgccaaatagcatttagagctgtaggttggttagaactacagatttagcgttggtcgaaactacagattttgaaattttacgctaaatctgtagaatgctaacgttatcacaaagctatagatttagcgtgaaatttctcataaaactacagatt

SEQ ID NO: 22669 - DNA, 23567 bp, Oryza sativa
gatgtcgctttgatttttttacttgcaacgtttgatcattcgttttatttgaaaaattagtgcaaatataaaaaatgataagtcatatttaaagtacttttaataataaaacaagtcacaaacaaaataaataataattctaaaattttttgaataagatgaatgatcgaacattacaaacaaaaaactcaaagcgataagtaatatgggacggaggtagtataagagtaacttaaatatttaagaagtaaacttaatcagtagcaaattaatcgacctgctattaattaatgttggtatttatgttaatttccagagtaggatctacggctcaaattaaagccataaatcaagtactttacaaatctaaattgaaattagctcaaataattgcagttacaagcttttgtacaattcacctatgttctcaataaaacaagtcagaattaattaacaagggctaaaacaatcgaactaaattataaagaagaaacatatcatttttaaagaaacacagttttaaagacattgagtaagtaaattaacctactcatacagatagggtgtatgtgtgtatgttcaaaggggtggttgtacgcgagttgtggacgcatacgtctatacagtggtggatccactgttggggcttgtcagtgcgcaagtcccagctccatgatccccttcctctaattagcaactaatgactctattagcatttagtgtaaatccagtagtatgacaaggaaagctagctcaagcactcaatgtccaaattaaattgcaatgtcaaatatgttataagtataccatatcaatttcttgatacatttgtgtgtatatattaatatagctgcaaattaaaatggagaaagcaatgggttgtcttttgatcatatgggtttgggtttcatcgaaaatacttagttgatatatcctagtttgtttcagtcacattgcccatatttatacaaagccctccctcaatttatatctagattcgccactgtgtctatactgtgtttttcttaaaaaaaagacgtggagtaaataatcatacttaaaaacaaggcgagatgagatgacaaaagatgagagagagagtaaaaatcaccactttggcttgtatatatcccggccgccgcttgctgctttcttctagtcttctccaattattcgcccatctctctctctcttcttcctcctctcctccatgaaagctagggaaattaactaagggcagtggtgcaccacaagttggtgaagctgccagcatgatctgatgatgatgatgatccacctctctcatctgtgttcttgattaattacggatcaatcgatcaggtcatgctgtagtttcatctgctggttgggagcacagcaaaaaaaaaccctaactttgtagccggatttgcatggattaatctgctaggtagctcatcagattctttgagagtctgccttgctcttctgcagatgaagacgtaatctttgaacagatgggattctcaactctcaaggtgaggtagtcatcaatccaatccatatacctgctcaaattcagttttaattaaagactagctgcttctatggagttaattagggatccttttttatagatctctcttgatctgtttcttagtctgttctttcttaataaggcatatatacctcttggatttggattttcttgaaaattaaggtagtttatgagttggatgtgttgtgttatctgcccagccttaatttaactgtgcttcctaaaaattcgtttgatttgatggtagcatctgaattgtgaactcatctttggagcttggactttagaccaggtgccttaattccttaacataagatttggtccatattgtttatggagcttcttatcaagaaatactcttttgattagggagtccccttgtcactttcttcagttgtgcaggtacatatgacatatctgtattaaactgatgacattcataaccaactgtccaagtagggattcatatctttctactaattgcagaatgttttcttggctgaaggaagtttaatctaactgttcaagttagttgcttggttagctgatagtgatccctgtgttttctagttgttgatactgcatatacatatatctgtgacatatggctagttcttgtttgttgtgtgtagataagatacatacaagattctgatctctgcagcaaaagaaacaaagcttccttttttctcttgttttatcccctaatatatctcttcttttgcagttctagctagcaatttcactgtaaaacatgtgtattaccgatcaatactggcatatatctgaacttgatgcaatacatgtgtattactgatcaatacataaaactgaaaatgtggaacatatctgctaattattttcatgagtgtggctttgattattgtgatcttgccacttgccagcaatgatgttagctagtgatgggaatatcacctgaccaaaggagggacatgattaaccttgctaattaagtaacaagaaaaggaggagggggcaaaagaattatggaatgggttttcttgacctgaagacaagtagtaagatttgctaatgcttgcttgcaagatatgcatgcctaaccacaaaacaaggagtttggcactacaaaactgaatgatgattgcctcttgcttgaaggatgaaactgctgcccatcttttgatcatggcacccccttcgcatatgcatgattgcccacacttttctcctcttttgggctctgtactatggagatattcaagccattttcttgagattttctctgcaatgtaatgacctgttctgtcccttgatgtttcacttgcaaaggagactgtactacagcatctctctctctagtctctacctctcttgatgtttcacttgcaaaggagattgtactacaccaccatctctctctaccaatctctctctctctctctctaattagttgcaagttttgttggcatctctaaccacctctccacactcatggtcatggccatggctagcacatttgtcacctagcttgcattgcatggtcctttggaagattcatgggccacacacacatggtgacattcatgcaaagctccaagcaggtctcctttattgtgatttggtcagctagctggtttgttacaagatgcccacaacctttgtcctttcaattcaatgcagtgtgcagtgtgtgcctgcaactttcatatacatgttgtaccatcatgtgtcctcttcctggcttgcaaaaatgtaatggctaatcacatccatcatgcttgcaaattaagctaattaattaatcacaggtggctagctaattaccaactgatgatgatgattagtgacaggcaaagatgataatctagatatcttgttcttctcactactgtcttgtcattgttggcgtggagtgcaatgctgccgtttgtgtggctccagaaaggttgccggctttgctgcccttctctccatgttcttgtctgaatcctgaacattttaacaaccgtgtctttttctcttcttccttttcctctttgctgacaagttgatggttttgagatatctattgttctgcttgtttttgtttttgcatgtgaagtcatattcagatggtttgcaaggattagaagtcatgggtgtactgtgtgcaaattgaacttgtcaggaacagtgactgaattttattgttcaggctttgcttgtctgaactcaagaagaggtagagctagggtgttattttttttatctgatttatgtgatacataatcaactaccattcgtttgacagaacaagattgataggtgcatgttcagagaagttccttcaggttaatttcttatcagcttaagattttcctccttttttctctctagtagctaaagtacacttgcatgtacaatatattcaaccggaacttacacagaagagctaatttaacttatagtatatgcaaattgttcttgtttttctcatacctgcatcagatattcagattagtgatacgagtaatgggcctgttcggctgctttgtaccgccgctgccctgccacagctggagaaacaatataccatgcttgttggctgcacccgaatagagccaatacactcagaataagttcactttaggtccctcaatttgtcacccagtctgatttgcattctcagtccagaaaaacggatacaacgcatccctcaacttacaaaaccgtgcagaaaaggtctctgggcagtattgtgcccggttttggatgatgtgctccctttgattaggtcctcgcccacgtggcattgacgtggtgcttatgtggtaattggatcccggaaaaataataaaaaatagtgggacccacatgtcagctacacaaaaataataagaaaaggtggggcccatgtggtcccacatgtcagccccctcttctctctacccccctctctctcccctacagaacagcgagcagtggcgcagaggggggaggtgggcggagcggcgcgcggcagcgggcaaggagggaggcggtgcgcggctaccgggaaaggagggagggctccgacccggatgtgaccatcgaggacgtcggcggcagcggccgggcgaggagaagccgcgggcggcggtcgggcgaggagggagggggcctgcggcggccgggcgaggagggaagcggcgctcgacgaccgggcgaggagggcggcgccgttctgttgggcatcgcgggcggagcggccgacggcgtggagctaccgcgctcgcgggcgacctcttttctgcctcttccacctccggccacctccgccgcccgcggcctgctgtcgctccgccagcgacctcttcctttgcctcttcctcctccggccacctccactgttgctccgcccgcggcctgccactgccgccacccctgccgctctgtccgccggcattctcatgccgccgctccgccgcgaggacgagggtgagccgagaggaagaggagggagagccgagatggacttgtggggcccacgtgggccccaccatctcttatttttagctgacatgtgggcccacatgggtcccaccatcttttaattaatttatgtgtgagcctgacatgtgggtcccacgaagtttactatttttccgaatcgaattatcatgtaagcaccaggtcaatgccacatcagatgaagaccaagtcaaatttgtcacgtaggcgtcatattagccaaaatcgccgtcaaaaccaccgagggacctcgtctgcactggttttgacagttgaggcacccgttgtatctggttttccgattgaagcatgaaaatcggattcgttgacaagttaagggacctcatatgaacttgttccaatacactccggctgatgaggaatgcatgtttcttttggcccaatcaggtactgttctaatggaggaccaatcagcccacatatgtaaatgggccgagcccatggtgctaagctctcaatctatttgggcttattttagcccaacctaactatctgggccatctctaaaaacaatactctgaaaaggccttctcgccattttttcttcagaaatcctcaacacagattctcaggccagttcagacttcacaaaagcatgtactccagaattaggattcctgcattctcagcaaaaccagttgctatgaactagtggattatcctatgttcagctaattaattcagttatctccaactagtttctgtcagggttagtaggagaacagaaacaccctttctgaagaactgaagaatggcatcacattagttcagccagcttgcaacttttctaaagcacttgggattaatacaataatctgtacttgaagcagtcgacggatggagccttcaatctgtacttgaagcagtcgccaccgccgtctcccgagcacagtgatgctcccaagttccaacatatactccacatggttgattcttttcttcccaaatctgaaggagaaaacaacattggcaattatgtgtgacaattattggagcgtacaaatgaatagattaactactatgaatttgaaaattatattgaaatcaatattataagaaattcatatactgaaagtttttacaaaaatcacaccactaatcgattcatcagaaaagatcagggccagactcacacacccagatcactgtctgtcttccaaaaccagctgtcctacccttgatttttcttcggattcaaagaaaatgatgttaacgaatggaaagagttgaaacaaatactaaagttctgctgctgatgctactccaacacctgctacagtagtactgcctactccatatgaagatgctgatgcttttgctttgcaggacgactcggcatccaatccaatcacgtttatcaaaagaagctgcagggccctgtagttgtagtactagtactagcatctcctgatctgatcatctgaattgacctgcctgaattgacctgtcccaattcttttcttattattactcctacttgattcttttcttactctattataattaatactgaaaagaaactcatgtgtttttcctttccttcttgtcgttttggctccaatctttgttcttccttgaagaggatgatgaatagttgtaggtttcagcaacagcaatgtggtgtttagtttcattttcttcttttcatgtttgttcagagaaaggatctcaaggcaggagcaagttttgtgatcttgcagcctttctctaaagagatgagatgagctctcacttttactttaccgtttgcttgctgcctaaaccccactgtcaaagcctgagattgcattagattcggcattatatatatgcagatgtaaacatgaagaagaaaagtgaggtttgagatgatctttagtcaccaatctcgagcaccgaaaagcatttcacagtttcacatcattccatgtctgaacattctgaatacctcctttttatacaagtttaagtaaaaaaagaagatcaaatgttaagcttatctgaacttaaaatgttccacaatccatacacaccgtgtttagagcgaatgaatttcatatgaaacaattcaattcccgtattagaaatgggaccctcattgttaagtaccacttctatacgatcttaagtttaaaaaaaagatcgagtttaaagtttacccaaacttgaaatgctccacacttaatgcacgccgcattcaggggcatgcatgaatttcacaggaaacagttcaattcccgcattataaacgggacctcatcgttattatagcactacagttttgcatgattgcatcatttgaaacataaattcctctcactcaccaagacagcaacagccatcaatgcccagagcctgaactgcaaatgcagctaagctaattaggattcaagaattgtgtggtccttgcaaaaccaaactgtcctacatccatataagctggtcctggaacaattcctccttgcttcgtccatatctacagttggagaggggagaacaagtgaacaaccctagctaatacattctcaccctgctatatgcaaatgcaattgcaaacaaagcaatcatcattaagggacccagcaattcaaagggggcaacaaactatttggtgtatgtagaatctatggattgataggcaagaggggtagatgatgttaaggtggcaaatggttaattggttagccaacttttgctttcaggctgcagtcaaagattctttagcctacaacaattctgttgtgacctgtgacttgtgagtactgagtagtagtaccaggtacactctattgttctttcttgttcttatatactgaaaaaaattacaagtagacataaacagattattggtaatgacaataaaagcataaggagaacattcaagtaagttcactggctgacaaatgcaacggtaatacttcatccatttcaaattacttgttgttttagctttttttctaaatcaaacatttgaatcttcaatcatcaattttcgtatacaccgaaagatttatgttttagattcactataagaaatactttcacaatatataatctatatgttaataaagtacacaatttttttaaaattaatagtcaaagataaaggtgtttcagtaaaaaaaaaaaagatgataaaagtatttgacttaggtcaatggagggagtagctaagtttaccacggttatcggctttatcaaggtaatacaaatcgagaaaccgctcgggaaaccagccaagttagagaaaagaaaaccgaaagtccaattttcagcaaatttgtttgaattctaccccctttttttttgttagtaatcgaagtgaaaccacggttaccggaagagcaaaagcacttaagaagttatgattccctgcagacaccacatattacaaatgcagatgatgcttgtctgtctgtattttcattgcccaaaccccctcaagttaaatcagagacaactgaaaagagaagatacaaaacaacacttcttacatgacacataaaaccaaaaaagaaaagagaaatcaacaccacacacatctacaaaccatctctgaatcttgttcagttttctgctcctaatgacagcaacagtgaagagtgacatgatcacaacagcttttgcaggcaatgccggcgacggcggcggcgttcggtcaggcgaagcgcttgcgacggccatcgatggtggcgaggaggcgggcgacgcccttggtccacatgtcatgctctctctggctgccgcactcgaactcgatcacccggtgctccgcggtgcggagcccgaagtaccgccggtgctcgccgccctctagcaggtgcctccccggccacgccgccacgtccctgcacacgtccaccaccacatctgccgccaccgccaccgcgacaaaaccccgccattgttagagacaaaggcatacacccctccgttcttaaaaatatatatatataaaaatcaacttctggaaacgaatctggacaagcgcttactcttcttcttcttggtgagcgtgcccgcgacgtgccggctcttcatcttgagcatcacctgcaacaatggcgaaccgcaacttgggatcagtaaaccttttttttcgccaacaaatttgatacatctaagaacacaatttggcatatgttggttatggatttaccactcccgtccgatggatgtagaccgagaccaccttccaatgcaaagctcctgcacatgatcatcgagtttgattgattaacatcatcgaatcgaattagtggatgatcaatggtgattgggtaggtaggtttgttacctttgcgagtgcgcttgaggagctcggtgccacgggcgaggagctcttggctgcagatggtgaggaagttgttgtcgtcgtcgtcgtcgtcgtcgacggcggcgacctcgtcgctgaagctgctgctcgtgttgctgccgttgccatggtggcggtggtgatgctgctgcttctgggcgttgtgtttgtggtggccaccgccggtggtggcggcggcgatggcgttcttctcgacggggatcaccgcggccacgttccacacgtccttgagcgccctcgccttgagcgtcgcggcgcctcgcaacgctgcaatgcaatgtagagagatggcgtgatcagtcacggtggctcgccggagacgatgaggatgggggtggaacgcgaaccggtggcggcggcggcggtgatggtgacgatgtcgccgggtgtgcggacgttgacggcggaggcgatggcggcggcgaggtggtcgcgctcggcgccgagggactcggcagcctcgacgcactgggcggcgaccagcgtcgccgcggacgccacggccatgtcggtgcgcgcggcgcggtcgtccctgccgccgccggaggccgcggtggcggcggccacggcggcgacagtggccgccaccgccgccaccgacaccgcggcgtggacctgcgcgttgtgcgcccgcgcctcctccttcttcttctccttcctctccttcagccaccgccccaccgtcttcccgccgccgccgacgacgccgcggtacggctgcggcttcggcgtgctcaccgctctgcaaaactgcacatttttccaagaaaaaaattgtctaattagcaaatagttccaaattagttcctagtaaatcaaatccctaggtttcatattatatgtcgctttaatttttgttagtcaaacttacaaaatataatatattttaacacaaaataaatatattatcaaaatatattaatgttatatttagtgaagctaatataatgttgtagatgttcctaaatttttctataaatttaatcaaacatacataaagatgtttctaaatttttctataaatttaatcaaacataaataaatttaaatagaaaaaaatcaaaacaacttataatataaaatggagggagtagtgttcaatgcatcaaagtcattcgatccgattctgtcctaataatcccatgtcaccatcatataattcaatccaaaacccaataatcctatcaaaaaccgaaatttttttaatgaaaagaattgtattaatttcatcggattggaactgcttaaccaaaatgtggcattcatgtacatgcactcctactacacaccattaggtaaaatggaatggatagctaataaattcccccaacttaaatttgatctacagcaaaagtggcaagcaaacagtagcattacaactggagcagctaagccaagaacaaactctgaatttgacaggttgcatccaaaggggttcttatttctgaacagcagcagcacacactgtaactgtatcaaaatgatgctaattgcaaagtgtggctgcatttcactgacccagggcaaatcattgtgcttcttttccattccatgacgttaatctagaaccctaggttaaatcaatggagaatgttgagcgtgccataggataggccaggtcagtcagtgcacacgccactgaagaaagaagaaagaagaacacaagaagacataatcatggagggcatgagcatgagccccaagcagcagctttctggagaggagaatttacattacattactctcaagcccctgttcctttcagatctttgtcgcagattatttgcttcccgcttctaaaaatatgatttctcaaaaaaaaaaagtctactgcgaagtttatttgtcaaaatattaatttatcgtgttaacaaataaaagctatttcctcagacagtgccttgattagagcacagattaaaataaaagaatggcatcatcaggttaggaacagaaagctgtgggggaataacacttgattagggataagaaaggcatcaggtagtcttgacactctcagctcatcactctcatcaagctcatggggcaaaaaggcaggcaagcagctaaagttcagagaagagagagagagagagggaggcaaggcaaggcaaggcaagcctgctgcttttcacccagagatggcagtgaagagagtgggggcactgaacatgttgcagggctttgcttgtggaaagaggagaccacaaggacagaaatgggagcaagaatcaaagcttcagttcttacacaccaagcaaccaccaaagaccatcaaatcaaacacctcttcctgctggtcagagctacaagtgtacagtacagaggaggaaatgtttttttttaaagaaaaaatggaattgggagtgtttcttgtggaaggaaaaagcatgagatcacatggtggtcttttcttcagttcttctctttctgaactttgagatggcccagaggctcatggggcaacaataacatgcagtgacaaattgccaatcaagtcttttgaccatgaccactctcatgagacatgtctctcatgagccaatgcaaagaggagctgaattgtggtggcacccatgcataggatttctgttcctatcaagattcaacttcaggaccaaagcttggctgagtacacagtacactgagagtgcatttcacattgctttgtgatgctatcagagtagacatcagcaaaggaatgcatggttgggaaaggtaagcagattctttcaatattcaatgtgagcattggtcaggtgacatggtccaatcactagtctttggttgttgattctttttgtcaccctaatgtttgctctactacatctgcttaattagatggcatgcttcagttgctaggcttgataagctattcacaagaactgcctctgttaaagagcatggcatgttggcatgcctatgtagctgccgcctgcagaatggagtgaaaaatgagcaatcattgctgtgagagctcaaaggcaacactctaacaaactagtgcagtgattcagagaacaaaatgtatcaaagggagaagaggataccagccaggcatgagaaaaggagcaaaagcatggaagaaaaggggaatgattattggtcacaagatgtatcccattttggggtgagaaattctgcagatggaaggaagaaaaagatatctccatccatatttgtgaaaaattcacaagtatatacattattctgcagtggctttttggtgtgtagtatttctgaagcatgtgagcctgcagagaaaatggaatttgggcagcaaagtattccattggatgaagagaaaggcataaactggaattctttctcactgtgcagaaaattttgtgaaaaggaaagctgcaaggctggtgtttttgtcccagaggccaagtccccacaagttctaacactgaaattgactaacctggaaatgctaaacactacacaaaattagccaaagtgacttcttgttgtgtcccagatatatattgctccacaccaaaaagatgcaaacaagctagtgttccatttccacaaggaaaaaaggagtacacaaaatcatagctgaatataaccatctcaaacaaaatgcaatgagcaggataaaaagatatcatggaatttcttgattatcttatccaaattggcagtaaagaatagcttatcctgtttttacccaacaatgctagtgcagcaactcccttaatcatgttcagtatgtataaactagagcaatcacacaccccccccccctctagaattgacaagattaacaagtcatccatgaagggaaaaaaaatgttcaggtgcagggatcaggagaagagaccttgctgtcgtcgacgtccggcgagaccggtgggctgtcggagagcgagccgccgccgttgagagggccgctgctgtgtgagaggcggccggaggtcagcggcgacacctcctgctgctccatgaaacaagaaacgagtaaattctcagtgtctatctgcaaagtgagctactgttccaagcagaacagcacaatttcacaataatcattgaacatgcaaggaagttttaaagagtaggaaatgttggtgtgaattgtgatcattaattagcttggattcatgttacagaaccaaataaagatggctagtattttgtgtgtgttttttcgttgattatgatgggggtgtgtggggggaaagaaatctcatatttggcctcttgttcttgtcctcacttcagtccaagaagtacaggaagtcagagaacattaaagcaaagcaggtactactaatcgacgaggtaatacccatgagaaatcaaaccaaaaacatgcagttgagagaatcacacctaaaagttgggagatacaagttttttactgcactgattgaagttcatgtattgtttggctagagagagagagaaacagaatgaaaaagcagagaaacatactacagaataatctcaccaacctctcacctaaaaaaagaataaaataattaaagtccataatccggttgctattaggatgtactcagttactcactcactcagggacaagctcaattaaaaaagaccgaattaatctctctattttttttaattaaggaagagagagagagagagagagagagaggatgaggcaagaacgaagggacgaaacgcgcacgcaccgattgcgacatgatcctgtccatgatgagctgcgaggtggccgccgacgcgaaggagaaggagctcccggaggcggagccgtcgacgtcgagctcaccggagacgtcctcggcgatgaccgcggccgacgccgccgccgccgggaaggcggcggcggcgagcgcgcggcgggagacgtcggcggcgcccgacgcgctccacgaccgggacaggaactccagcgccgggtcccgcggcagctccggcggccgcagctcgccccttcctccgccggcggtgaccctgccggattcgctcatcggagcagtcgctctcgtcgtcggcggcgagcggtggcggcgtgcgtgggcgcgaaaaaggtggtgcctttggagaagtgggggtgttggttttataggagtgaccctctgcaaagaaagacaaggaggggattaaccgtttgtgcatctaaagtgttttttttcttttttttttagtttctctggctttttgttttttgaagtagaattggtcattttctttattggtatatattttacttttttttggcttttaatatgtttttaatacttgcaggggatttcgcttacggatgttgttgataaggtcgtcttgatttacggggttgtcgtttctgatgtaatgacgtggtattgttggcgtatacggaataagtgataagctctacagaaagtttaataccgtaaaccataattctcgatgggttgttagaagtttaatcgtgtgggtttgaggtatgacgtggtgagcgagaggtttactcattgtcggtttgtcgacttgctggtttggtaagacaacgataagaaagatgaagatagtatagtatactatgagataattttggctattcatggtttatggcctgaatggttaggatggacctctaataataaggagagtatagtagtgttcaataatacataaaaggtgaaccactcgcacaaggtaactataggagccagagaagaggttgccaatataattgtgaatatgatactcaataacctacaatgctccgcagttacatcagcattgggagattcatatcgcaatagacctttctcaaagcaacttagcacaaggctaaccattactctaatgaaccactaaaaagtttctttttttagtttatctgccttttttaagtagaattgttcattttctttattggcatattttaccctttttttgtctttaatgtgtttgtaatacttgagggggggtgtcacttacgaatattatcgataaggtcgtcttaatttaccgatggttgtttatgatataatgacgtgataatgttggcgtatacggaagaagtgataagatctatggaaagtatactagcgtaaaccataattcaacgggttggtagaaatttattcataagggcatccacaatgtacatgaaaaccagtccataggaaataaaaaattccattcagctatcttaacacattatgcaactagtctatagcaaagaaataacaaaagttgtccatagcactatgggtagtccatagacaataaaaaatcatagttatgccaggtgcatgcatgctgcagcctgcagcttcagctccggctgatttttttttgcctttagtgggacccaccttaattgcacacattgtggtggtttctaaaactatggactcccaggtgtgggtcccacatctatggactagtttgctaaatacattggtgttgccctaagggtttgaggtatgacgtggggaatgagatttactcatcgtcggtttgtcgacttgctgattaatggcaagacgacgataataaagatgtaggtagcgtcatcattgtagactatgagataattttggttattcatggtgtatggacttgatgattgagacgaacctctaatgaacagtagtaagaaggagagtagtagcattcgatgatatatgaaaggtgaaccactcacatgaggaaaccgtaggagccaaagaagaggttgacaatataattgtgaatatgatgctcaataaaactcgcctgcaataaattcagcacgacacacagcttaacctcttaaacactacaatgctcagcagctacatcaacctttggagattcatatcacaatagatctttctcaaagcaacttagcacaaggctatccattacttttacaagtagcatcacatgtaaaacttaactaacaattaaaaaaccctcatgtcagccactcttcatttccaaattacaagcaatggctccacattccctggaattattgctccttaaaatagcagtactatactactatttttttcctaactcacccaatataatcaattatgccataataagtggtgctccatttgttgtcaagttagtttaaggtctcatctcatgcctttttggatgggccttctctgctttagtttttgtcttctcttttcccagatgttaagaaaccatagcaaaaccagctatcctcacactttttttctctttttttcccttagcttccatgtccttttgttgtgtacacttgtgctagctgtgaaccatacctaggcccccacacaagacatggtagtatggtacttgttctgttggatactcatgtgttgtgagcagcagtggttttcttctgtctagaagcaaacatggcctgtactggcaacatacttatgtgctttctttgctaatggtcatgatgatctttttttattatttgggggtcgctttaacttaatttgactttaagcagatacagatacatggatgagctttggattgtagtgcctttcttgtccatgcagaattgcataatagaagctgaaacatgtgtgatgaacagaattatactactacttgtttgttgataggcctatttctaggaaaaaaaatgttattttttgagtagctagaatgtgatcaaatagtacatgatttaattgattctatggatataatgataaatactacatccgtccataaggaatcctattttttttagagactacgggtaaaaaaaacatgttgccttattaacgagggatgtttagggggtggggaagacctcttataattatagaaaaattctaaaccattagatcccttatatttgtatttgtagatagagggaacatgatttaacctgtgattgtaaggttaaccctcactttctatatatacaaaccaaatttgtattgcgtatcacgttatgcatatactcaaattttatttttaaaaagttacagggcagattaaccatcacaatactcacattagtggttgcagtgccaagggcaccaagattagatcattagagcatccaatttgatcatatcaacataagtacatgacagggacgaccattaattttgatttgatcttgtgttcttgtacatatgtgggaatgcacagaggcagcagccataaacagctgatgcaaccacccacagcatccaccgactcacactgtagtgtatactgtacacacacaccatttggtactctacctgatcacctccagctctttcttcctctctactcctactcctactagatcagtgatcagtagcctaccctgccggctgggtcactgccaggtggggcccacccagaagcatgagctatatagcagattagcagtagcacctgagctacttcacctccctgtctgtatgcatgatcatgttctgttttgggcttgtggcctgcattggcggtggtggccaatggctcatgcagtagttgaagaatttagattattggttggattattgctgcgaattatcaacttgattacaattatctatatatatttcttttaaaaaaactccaatggtggttacagtaaatctgtcccacattaccctttgaacttctaaatatattacataacaactacatttaaatgaatagtcacaaataaaattaaattgaggtgagtataacttgtagcaaaaaggtggatgacacattgataaaaaaatatatgcttttatttattttagacaataatattatgataacataataactagtttaaaataggtggtctaatgcagaaaaaaagaattttaagaaaacgcatttcaaagcgtggagcaaataacccgttttgaacttttgataatccggtaaataagctgaactgaaattcctatagtaacaggcagcaggcagagaaagacagatttcgctgggttgctttgatgattggttggttgggttggctgcttgatggtctccatcaggtccacccagcatgcagtcagtcatcagtgtgatcgatccatccttgatatgagaatgagatgctgctgctcatcagtggtgatcactagtgctgctgccagtggacagcagcaacagcaagatggaaatttcttccatcctgttgtaaattcttcttctctgattttatctgcaaccatgagtatatgctgctgctgatgccaactcatgatgcagcacatgaaactacagcttctctgcagtcagaaatcgaaatagtgatcaacagatcaggtactattaaccagcaggatttgcattgtttggctacatgtgcagagtcttaaatttcccggctattcttgctcgagctgaaacctgataagtctgtccgtcctaaaatataactgacttaataagaacaagaaaactatattacttcttgggtgtgtttagttcacgctaaaattagaagtttaattgaaattgtaacgatatgacggaaaagttagaagtttgtgtgtgtaagaaagttttgatgtgatggaaaaattggaagtttaaagaaaaagttgggaactaaaccaagccctaattgagtattaggttactatattttaaaatggagggagtacttacttatctgaaaataattcagtttggaagttcagcttagctctcatcaggaagacggcatgtaaatgcaggtatcatgattcatgagcaaagaaggcagttgacagaagacagtgtgtgaagaactctgcaatggcaacagcaagagcactgtagtaggtcgctgcagattactatgcacgcatcaggcttcagttcagacagcaagcaggcaggaggaaacaggtataaatttcatacgagaaaaagaggagggaagcagcgagaagagtgaacagtggaagggaatcggcaacggcaagtgcagtcgcattcatctccaagagtaaagaagctagataggcagcctaccttgctacgaacatgggcagctgcagaagcagcaatggcggcaacgcatcagcagagcagcagcttaagaattcagatcaatagcgagcactgttcattgcgtagcgtagttcagaaactgaagctcactactcctccgtggtactctccgcctcaaaataacatcatttttcactcatctcacacatatcaatacaaagaaaaaaactatagtaccctcactttattaaatcctaatgcgtcaatgtaattatttcatactttattatttttaatatttatcccctatttttataaacttatttcataaattctgatgcaacgattatttaaaattaaatttattttgagataaacaggagaaataaaagatgaacttattgagtatggaaccggatcctctgacgtagcgctcgctacgtcagagggacgtccggcagcgctcgtccatccgttcagcatccaacggagttgagcgcgcacagcacacaggctcggcccacggcaaataaaaaacggcccacatcttcgcgttgacgccacacaagccgctgcggtgcagccggtggtgcgccgcgccgccgccacaagtgagggaggggaggcctatgccgccgccgccacacggccacaacccgtgcttcctgatgaagccccctctgccaccgccctcttccttgaccctgtcccacgcctccgcgtcctccctcgtgccgtcgtgcgggagcctcgctgcgctccggctgcgtggaggtccgattccagatcgcgtatctgacggcatggcagcattcgctccgctgcagttcgtcctttgtcgttcgtcccagaagcgcgtcgcccagtcgttcaacccatgtcgccagggaactccggccgccagaatcgccgctcaatctcctcgagttcctctcgagctggtggagcgcgtcggccgtcgatgttccccgtgcgtggggcacgcgatgtcacctccagcgagggcagagtagaaccgatcgaagatgacgctttctttccatttgttaaagaagacatcaagagagtgtaatgtgttaaccaagaaaaggaatttgcggccatgaactgaagagaaaacgagtgatttttttatttttttcttcaatttgttcctcgtctagctcctcgacggcgaggacggactagtattccagccgaccaagttgaagatcacggcggggttgctcgatccttacccctaggaccttggcttcctgctctgcttcttgctcctctagccaaacagcttggacacagacaaattgatgtgaccatggctactacggatacatccgttgctcacatcatggatgaacaacaagatatcaagttcaagtcctccaagtgctggaatccgattcggccacctactacactgctgacttcaaacggccgccgaatctccatacgacctccgttttcggccggtgagtacttgatggaaagctctcggagtcctctttccaatgcatcaagcctcattgccaaattccatctcagtcagcagcaactgaagaaacaaggtgctgcgacacctgtaatgggcctatgggcttgtaacttcatttgggaccccggcccaggtggggcccatgtggggtgcgccccaagctggtggggcacgaccctaggcacccctaggtcgtcctcctacccctatatatagctagttaccccttcagggtttctgggttttgatgatagagatagctacttgctaccggctcgcagcgcgcgtgttggctaaaccgcccgtctgcctgtaatcggaaccccaccatattgtgttttgatagtgaaactttcatctttatctagcaatttcagtgcttgttctacttgttcttgcttgttcttcgattgcttgcaggacgagtgccctcgtggccgggttgacgcgcaccacaagttcgcggtgaccattggaggtggtgtatcggttgctaaggcgtagcgtctttggacagttgtagtcgggctgtgaacgtcgtcttcatccaatcgagttatcccttacctctcatcgaaagatcggaccacaaaccctagcgggttcccatcacaaatgctacccagccgtcgacttcacaacggcatacttaacaacagcagaaccagcggcgcggtgaacgacagcgagcaagtagcgcacatgctgcacccatttttccctgagcgagtagcgagcgttcgatgcttgatggacggcggatcgacgggctactgccctctgacttagtttttcctaagtcagaggatctggttccggaagcaagggcaaattgtggggccatttgtcagtgtcacaaggtggctagtttcccttgtttgcaatatgtttgccttcttcttcttcgggttctttatggccggacatatataggacatggttgtattcctactgaataatgatagcccggcatatataggacatggctggctatattcctgctgaataatgatatggagtagctagtaatctggattcttcgagaagatgttccctagtttctttgcattccatctaattagttatgaaaaaaattggtaagatagattagtatgtgacggggtatattattttgtaaacatttaagtttagattatacaagttaaaaaaatatgaccgtgagtacacatatactagtttgagttaaatttgttgattttattacaacttgtggggatcaaattttaagttacatattttttagatcgatatattacatattaatctatcttatcattcattttatataactttttggataatatacaccaccgaggagacatccccttatgcatgagattaaaacctatttccgtagtaaccttcactatttcgtgttttcaatactcctatatgacaccgctaactttattcgatagacggttggtcaacaacatgatacccggagaattgactacgtacgaatgataatagatgaaaccagcatgatatgaactgcaatgatgatccatcgcctcgcctgaagaaagcttaagcttatataacctgggatggatgaatggatggagaggacagaatattcctctcctcgagccttttgatgtcctgcctgctgctgccattctaccaaattgccaatcagcaatatgcaggcatgcttgcttgcatgggcaaaaccatagaggatgtcgagctaatttaaggtggtgtttggatccggggacttaattttagtatctgtatttagacactaatttagagtattaaatatagattacttacaaaactaattacataaatgaacgctaatatgcgagacaaatttttaagcctaattaatccataatatgcgagacaaatttttaagcctaattaatccataattagagaatgtttattgtgctaatcacggattaattaggctcaatagattcgtctcgcgaattagtccaagattatggatgtgttttattaatagtctatgtttaatatttatagttagtgtccaaacattcgatgtgatagggacttttaaagttccagtcccatctaaatagggtcttaagctagcggcattcatgctcgatgagccagttgaaaatgaagaacaatgtatatataatatatgtctgatgtctccaaaagcttcgaatgtccacgtgatgttgctgtagcctgtacaattttactacgtatatgcctagtaatactacaaattatacaatgtgttttgagtttatatggaccttgggatcttcaacctcttagccaagacaacgatgattaccactctgctgcagacacacacactcacaaactcactctcactgtcgattcttttcccattaagataaatatatattttacctccgttcttttgtggttacgatataaattttacctcggttttagtgtgctttttaactgaaggtgtattttgtacgaaaactttttatatagaagttgctttaaaatatcaggtaaattcatttttcaagtttataataattaaaactcaattaatcatatgctaataacttttttgtttttcgtgccttaacttcatcttcattttcagtagaaatgaacatcatctcggcgtgtgctttcagctgttcaactcatttcgtatgcttttgtactttcttagaataataaagtggtgtttaacatccaactttgcattcctattcagattacaatgaggatttgagaatcaaacatgacacccctcctgtaaggtagaagcaaacctggctaggttgtgagcatcaaagttacaatacaagcctgattttcctaacaaaatttacttttgcagaatacttctttcttgc

SEQ ID NO: 22670 - DNA, 9958 bp, Oryza sativa
tttgtgtgtatgaattatgatgggcccatgacctggcccgaaagacaggtaggccaggaatatgggccggcccgttattattatctacccagtttggattgaatgaaactggcaactcgttcgtcagtgtcagtctcgagacgtcctaaaatcaagaacgaacaatcaagcagagatcttgtattgtatgcacatatatatataggccgatttttgtacccattctcaagcttcttttcattgattattcagaataccaaagaagatagaaacaaacttttgtatattgtgatgccaagttttctcttgtcgaaagattgaaactctgaacatttaggacaacgaacatcataaattaagaaaacattactacttaccttcttgttagcatttggaggagaatcttgttgtggcctcttcatttttttttcctcaactcatcatattcataccatactaccatcctccaaatgagcattcagtcttcgaccagatgcgcaaaatttgtctagtgtttgtataattttgagttatcaacagtcgcgatggagatttgagaagataaagagatctcactccagtccaatgcactcatcgcagccatgatgaatgatgcatcagaggagaaggaagtttcaagaatgtgactgaattcttgctactaccttcaaaaaattcagaacttcttcgaactgccaccattcgccattggatcctgaatttgattccaacgtttgtaaccgcctccaaattctttcactcaaaattaaatgaaacaaagatcattccttactacatttattgccaagctccggtttcgagtgtcaccatggcccattgttctgctgcctgctccctgctgctgcagcactgttcaggccttcaaggtccaggctagcacattgaatcctcaaccattgtggctgtctcgacactcataaacccagcagcctcctacatcagtagcagcagcagcagcaccatggtgtaccagcatgcagtacagatcaaagtttcaaaggcacacattactcatcactattcaatacgccattgttacacactcatcataagcacaatcatgtgaaagaagctagtcaagtcaggaaggagaaggttcaggccactgctcccctctgtccgcaaatataaggtatttggggtttctccatccatccacaaaaatacctttgaatttatcacttattggtagttgaatcggtaggcatgatctttcccgataagtaaagtatcaggggcatcagaggaatttcaccttaaccttaaacagtgctaaacaatttagaaccccttaagtcccatcatttcgcctacagctgactatcagcttaaaaaataacttgtgagcaaaacttttatacttatcttcttagtgactttaaagccaccactgaaaaataaactacaataaaaaaatcaaaatcaactataaaattaaaattttaaattttagccgtgactgataagctaaagaacaaacgatgaacaaactttatgtttgtggaccaagggagtaattaattggtattggatcatgagccctcatgaaaaactttgctcagatggtgtttgttaccactggttaaagtagctagcagtagctgtagcacttgtagaccatggtcattgtagcagtaccacattgtgctgagttgtgccatgtgtttgcttctggaagatgagggagtactgcatgatgcatgaatgaatccacagtgctcacattcatagccaggttaattccagtaaaaaaaagcaaaagaaagattgtactgaattactcaccacatgtagcctctgaaaaccccccttaaatccccacaattacaccataattaacattgtccatctcatatgagggacacatttttctttgttgtcccattttttgcagtgaaaggctgtgtttagatccaaagtttgaatccaaacttcagtcattttccatcacatcaatctgtcatacacacataacttttcagtcacatcatctccaatttcaaccaaaatccaaactttgcgctgaactaaacacagccaaagttgaggagttagtaattggtatgcttaaattgtgttgggtacagagtttgcagtcctgcagatatatttaactgaatgcatgtgcaagaagaagaagaagaagagcagtatgtagattggcagattgcagaggcataggtggaagatgtgtaaggttctagaagcatctagaagccgaagctgaggtcactaggccatcacttctgctgcagaagcttcttctccttcttgtgcagagatggggaaggcgggtaggtggctcagaagcttcctgaccggcggcaagaaggacaggaagggcaaggacggcggccagccgccggcgccgccgtcgccggcgccgccgtctgccaaggagaagcggcggtggagcttccggaggccgccggcgcaggccaccaccaacacgtcgtcgctctgcttctccgacgtgcacgccgtctcgccggcgccggaggcggagagctcggccgccgctgacgtcgccgaggagaacgaggccgccgcggccgcggcggtcaggattcaggcggcgttccgatcctacctggtacgtataatgatacgccattgatgacgccatcatctgttcctggttttgtgcaactcgatggcgtgtgggggggtgcaggcgaggaaggcgctgtgcgcgctgagagggatggtgaagctgcaggcgatggtgagggggcagctggtgcggcgccaggcgagcacgacgctgcgccgcatgcaggcgctcgtcgccgcgcagaggcgcgcgcgcgccgagcggctgtgcctcctcgacgacgacaaggacaagcacgcgcgctcgccgcggccgccgacgacgaccagccgccgctcgtcgccgcagcaccaccgatcacggaagccactggtaagcgaagcgtctccgccaccgcactctagctcgcgacggcgatcatgggagacatgaggagaagatgactatggcattgcaggaggtggtggataggggatcggaggagaacgtgagggtcgtcgaggtggacaatggcggcggcggcggcggcgcggcgagggggtgcgggaggcgcagcacgtgcggcgcggcggcggcggcggcgaagggcgagctctaccagaaggtgtcgccgacgccgtcggcgttgacggaggcgagcgcgcggacaatgagcggccggctcgacgactactccttctccgccgcggcgtccgaggccagcgggcgccaccacagcgttccagcagccgcagtcgccggcggcgaccacgcggcggcgctgcagcagctgttcccgaagaactacatgtcgaacacggagtcgtcgcgcgccaaggcgcggtcccagagcgcgccgaggcagcggcacgaccagccgatcagcgccgctgcctcgccgtccccttcgccgtcgtgcggcgagtggacgacgacgccgggcgaccgccggcgcagggcgtcgctggacccgcgtgacctcgccgcccccgcctccgccgccggcgtcggcgtcggcgcgcgcatggagcggtgcgcgtcgcaggcgcgcgccagcgccagcgcgagcgcggcgtgcccgtgggcagtgaggatggacaggtcgacggcgtcgctcgccggcggcagcgacggcggctcgtccgccgccaccgcggtgaccgcggccacggcggcgcgcgtgacaagctgacacggacgaacacgagctgcatgctactgtgtgaagaagcgatcactctcttctctcgaagtctcaagtctgaaattttttttttttcagtggcttgaacagatcaacagtagaagctgacaaccttgttgcttctttgcttcttgctgacctgaatgagccttgtttcttttcagtgatctgaagttctgaacagtgaaattttgttgtgtgttgtctgtggcattgtgcaagttacagattgtgtcagtgagaaacaattgtgtgagtttaattcagatttgtttcttgagatagtgtggaattgcagttattctctgaggtgatattttcagttatggccttgaaaaatttatggaaactgggcctgtttcttttagcatccattcctgcccaaagtgactgaagggttttaatttatgagttgtccatttacaatgtttttttttgttattttcggatcctctttgatgtagtactgcaattcaccataattagactactgttacttgttaccgtaaatgcgatgtgcatatgatttatgatatgtaaaatatattgacaggttttgcactagccttatcctaattgtggtatatcaagatgtatcgcaattctatatacatctcgcgcgttaggttttacactagtcgtatgtctattttagtcattgaagatagtcattattgttcatacatatcagcgatctcgctatgatttagaacatccttatagccatcttttaattaaccacctaagatgtttgctagtatagcacccttatcacctttgctcaacccacaccccctttacaacatcaccacctttcatcacataatgatgtaatgataaaagcacgggcacaaaccataatgcaagatatagagatgagcgcactatgatctaagatagacgataatttcatccaaatgtgaaagactcatgtataagtctggttcgaatgctttatcatactacaataaagaataaataatgtaaccatagctactacgcaagaaaacgtataaggtatatctatgtacctatgtcatggtgcagtctagcattaccataatttatttttcaaatggccggatattatcctgagatctatatatgctagattgatttcaattacccccatataaaaaaatataatttctactacgccctctgtttcatattataaatcttttaacttttttcctagctaatcattgttaaatttgaccaattttttagaaaaatttagcaacatctaaatatatcaaattagttttattaaatcttacattgaatatattttgataatatatttgttttgtattgaaaatactactccctctatttcaggttataagacgttttgactttggttaaagtcaaactaccataagtttgactaactctgtagaaaaaagtagtaatatttacaacaccagtatagtttcattaaatctataattggataaattttcataatatatattatgtcttgggttaaaaatattaatattttttctacaaaattaatcaaacttaaaatagttcgactttgactaaagtcaaaacgtcttataacctaaaatagatggagtactatatttaagaaaaatatggccaaacttaaaaaaatttgcctaggaacaaaagtcaaacgactcatataacatggagcacgaggtaaaacaagagggggctgaaatgtgataagttatttttacagggacaataagctgagttaccccgatgggaggagaggcgagggccgaggggtataaaagcaaattaaaaaaaaaaggaggagaagggggagaggcctcgcgtcgcgtctcccacgtatcgtggtccgcgaaacccgagtggccggagaagccgaggcgaggcgaggcggttgccgtggcgggcgagtgacatcgtcgtcgtcgttgtcgtcgtcgtcgtcgtcgtcgcgcgccccacgaaccctatcggatcgggatcgggatcggagaggagaggagagggtatggacgaagcggcggcggcggaggcggtgcagctgatcgacggcgagggggagttcgcggccgactccgcggagcgcttcatggcggccgcgggcgtcgccggctgcggcctctcctacgccgtcgtctccatcatgggaccccagagcagcggtacgtacggacccatcccatccctcgcgccatgtcgagatcgcctcatcgatcggccgccgcgcgccatgcgtcatgattgggtatcgatcgatccctcgcacggcacctgttcgatcaaatgtttcggcgcgcgcgcagggccgctacgacgctcgtagtatacaaacatcagttttgaataatctttgctttaatttgtttggattggtagtacatcagtacaatacaaatctgcatttgctactagtggagtacttgcatacgtacgtttgtgtttctagcaagttattatggttgcattttttttttcgtctcccaatactgattgatggatgcatgaacgtactctttggctaaggtgtgtgtaaaggagccacttaattgtacacatctttcatcaagctctgcctctgctgacatgaatggatattataacccggcaaaatgaatggatattatagggtgtataagtctcgcataatctgttctccgcaatccacatagatgacagcatctaccgtttttcatttttcttacacgcctacctttcatgcatggaggaaagacccctttgtttttgtcttttctgatacttgactgtgttatactccttccgtttcataatgtaagactttctagcattgcccacatacatatagatgttaatgaatctagacacatacatatgtttagattcattaacatctaaatgaatgttggcaatgctagaaagtcttatattgtgaaacagatgaagtattactcttagcacgcattctttggctaatagtaccctgacactggcctttactacaatgtactattagcttttagctgacatgtgtgctttctgtcaccaatatttgtgagtacatgattaagaaattaattagtacttgtttgatcatcataacataccttttattttgagcaggaaagagtacgttgctgaaccaactctttggaactaattttagggagatggatgcgttcaggggaaggtagtcccgttttgttcctccacatgattataaatattcgtactgtcttatttttattttgttttttgaactagttacttttctttgctaggcagtagtacgtatctttgcttgttcattttcctgttctctgattgctgaactggatctctcacaggaactcatagtcacactattacattttgatttctggtagggaaataccatgatatcactgatattatgcctatgtctttaggagtcaaactaccaaaggtatctggatagcacgatgtgttggtgttgagccgtgtactgttgtgatggatttggagggtactgatggaagagaaagaggagaggtatgcttgcttaacgcgtatacaattcaattcccatgttcaatatatcttctagtgaaccttttggagtggccgtgtgcacttgtagaaagctgttctgtagaaatcggtaactagcccaagatatggtttcacagaacaataaccaaccactgacaattggatttttccctagcccgagatctttaaaagcaaagtttggatttttccctaccccgagatctttaaaagcaaaagttcagttagcattagtatctcctttcctcctgcaatgatttatctgagcaaattaagtttgcaatatttggtttataagtattgcgttttcattgcattgtcattttcttgtcttctgtttatatcttccaattaatgaaaatgagcttaacctgcttggctagctcctatgttttaaaatgtgcctttacatgtattacgagtttaagcaacttgagggatacatgagttgtttcttcagttccttttctgatacctgtgtcttctgccccattttaggacgacactgcatttgagaagcaaagttcgttgtttgctcttgcaatttcagacatagttctaattaacatgtgagttactcaattgttcaactctactactgagctcatattatgaaaattcctcatagccttctaggttgaactttaatatataattcatcaacttcatgactttgtattaccaccatatgtatgtcgataggtggtgccatgatattggccgggaacaagctgccaataagcctcttctaaaaacagtatttcaggtatttatctgttttttcagataacctttgccacagcaatacattcttgatgcatttgtaacatttggacaactgggtttgtaggtcatgatgcgtttgttcagtccccgaaagacaacactattatttgttatacgtgataaaaccagggtttgcctctttgttctttattctttcttgaatatatttactgttatgttttgtgcaagctgtttggaaatataatcattgctccatttacttgggccaatctcagacacatcgttgttttcatgtagactccacttgagcatctagaaccagttctgagggaggatattcaaaaggtgatgccatcatctattgtttccatctttgttacaacatagtttcctttctctagtcctaatattgtcacagatttaatcagatatggaactctgttgataagccagaggcgcacaaagacacccctatcagtgaatttttcaatgtaggttttgtagttccagtattcaatctttgaaacaaagatgaaggttttactgtttatgttaacatggtttgtcaatatgaaggtgcaagtcactgcattgcccagttttgaagaaaaagaagaacaattcagagagcaggtaccttttcacttgtactctaatgaaacagttgtctggggacaacagaacgttttcaaacaaaaatagggaactgaaaattattatttttcaagcaccttacttttacctctgccaggttcaacaacttaggcagagattttcaaattcaattgcaccaggaggtcttgcaggtgatagaagaggagtggttcctgcttcaggatttttgtttagttcacaacagatttggaaagttatacgagagaataaggatcttgacctacctgctcacaaggtacacttatatctccttctgtgcactaaagacttatactgggtcagtattattacacttaccattaaggatttaaaatctataatattgtctgtgcactttagaatacaattgaatatactatgcagaatacaccaatgaatccccactttctgaacgaaaagactaatgccacaccatctgatgtatgctaaaattgtttctttcaaatgcattgtggaaacttttgttgtcaacagtgatcagtaaaatagttaactgcgagtttaaatctgtatgatatacctaggtgaagtaacatcatcaattcagtaagagaaaccactctagcttgtcggttattgatttattttcatttgtttcattatacaaggtaatggttgctacagttcgatgtgatgaaattgcacacgaaaagttttcctgcctaacctcagatgcagtaagaatctcccacttgatctattgacctgtgtacaatttccaggttcattaatttgtttgtgtcattctttaggaatggatggaattggagagtgatgtgcagtcaggtccagtacctggttttggaaaaaaacttggctatattgtggacgtccacatgcaagagtaagcccctgcataatataagttgttgacagctcacagttgtggtttgttcagtgtgattcctattaccttcaatttagcaagcaaacagtataagtaatataaacttggtaacataaatgcatttgatgtttctataaatctaccagtagataggcatatgcatcgcaaacaggaaatgtcttaaaagttctcaaacacttaattatgatatttacggaagaattaatatagagatgttttcctctgtttcgaattgctatttgcaaattctggaagctagaaattggtcccttgttttgtaccaaatccaatattttgtggtgacggtaagtatttgttcatgaataaaattgatacgtgaattatttttaggtatgacaaagaagccatctatttcgatgaagctgttaggacagca

SEQ ID NO: 22671 - DNA, 7927 bp, Oryza sativa
ttaacatgcaatttgcagggtactcttttccagattatttttgtgtaacaattcttaatgtggtactggtgaccttgaggaaagtgatactgccatctgacttgtttttctgttgattctgttgtagatgctgtaatcgagcaggcagactgggactactctaaaatactagagaaggttcggcgcgatgttgaagaccacacactttcaattcgtgaaggcaagctatcagaattgacaaatcatgctaaggttaagtatggcaagctaaagaaagccctttcttttagcaactcataactaacctctcttctgcatcgatttagcatgtgctacgggatttggttaccacatggtactaatgcaggtatattatacatgcaggagaaactaagaaaagcactagttgaacctgtagagtctcttttcgatgctgcaggcccttcaacctgggcatcaataagaaacctttttaaacgagaaacggaggctatcctgccagagtttcagaaaaaccttgctgggtttgaaatggaaagtgcaacgtcagaaggaatggtatcaaaattaagggattatgccagaagtatcgtagaaaataaagctaaagaagaagctggcaaagttttgattcatatgaaggagaggttggcaaaatcatctattattcgttcaccataccgatcaatttctcgcacttctgacaaagttgcttgccattgccaggtttacaacggttttcagtcatgacaaggattcaattccgagggtctggacagggaaggaagatgtccgtgcaatagcaaaggatgctcgatctgctgtataggacttgaacccttctaagttctaatgggatgacatagttcttcctttgattccccttctttgttaaatggacttgcactcgtgttgcaggctctcaaacttctttctgtattggctgccattcgctgggatgagaaaccggataagatcgaaaaaatcctcacttccacactcctagatggttctgttacaccgaagtcgaagggtgcaagtgcttctagtgatccacttgcttcaactacttgggaagaagtaagcttgtgttaatttttcgcgctgctgtaaatattagaagtgcataaatcatggaaccatcacgattattgaactcttgagcaggtttctccaaagtataccctcatcactccttctcaatgcaagtcactgtggaagcagttcaaagcagaaactgagttcgccattacacaagcggtttccacgcaggtgtgtatccataatttgggaggatctttatgctttcttccaaaatttggatcacgtacatggtttgatcttttcctatttgatcaaagagtcttattttcatttgtcagttccttgaattttcatctttttttactccagcaagctcacaagcgcggcaatggtaggctgcctcctccttgggccatggtggcaattgcagttcttgggtttaatgagatcatgacgcttcttaggtatttgcttgtactatacatatcaattctatacccactcacaaaacaatataacattatatcttcgtttcttcttgttttgcacaggaatcccatatatctattcttgctatttgtgggttatttgctggtcaaagctttagcagtgcagctagatatcaacagagaattccaaaatggcgtggtaaggttttgaacattcaccgtgaagctaacctatagtattgatatgctattgcaatagtatcctatagagatcaacaaatttcccggtactatctgattatgtgttgcatcatagattcatagtggagcatgtacaaggtcattatctattgaacactttttacgaaatttgtttcctatgaggctatgaatcgggaaggataaattgtttattgaacactagtatcctattgctagtgtataaattgtttcctatgctacttatttcatgaatatttagtgcaacctcaacttagaggatcttgtgaaaaatatatagtggcatagtttattctacagagaaagttttcttttgttaacatagcaatctgcttataaaaccttaattttgctctaattttgatgaaacatcaggctataagcgctacacattggtgcagggattgaaattttggttcgaaatttccgaaatttcggtaaattcggaccccccggcatgccaatatctcggccgaatttttcagtttttctcaaacttttgtgaatttaatcaaattcagttaaattgtgtcgaaatttcagaaaattttggcccaaaaatttttgttctaccgaaatggccgatattttagccgaaatcgaaattgaaaaccctacattggtgtgtatcagcaattcagtattgtcttctgagttagaatgttatgccagtgcctcactagtgttaataagtttgcaaaaaaccacattgatccttttctccactaacacaacaattatgctgaatcttatatattgcaggttcctgggatcatctctgttacagcaaaactaatccccacactacagaacattctaaacaaagttgcaacagagcaacaacaacagcaagggcatcaccaagatgctgctgcagaagctccacagcaacagcagcaaccacagccgcagccacctcctctactcctgagccccagaagcccaatgagcgaactgcggaggccgctgcacatgccattcagcccggtgcgcaaggcggtatcgccttcgccatcctcatcgtcttccaccgttacatcgcccaggaacgctggtgaagaccagaagcccaggcaaatggtacagcctgacaacgaatccaacaatgcttactctatagtttgatgatcttgggtgttcagggtcagctggtggtttatactgtccaactggaaattggaaggtatgagcatttcgttgtcctcatttgaatgcataggtacactgattgcagcaatgatccatcgtcagtagggtatcaagacagaataattcaaaatattttgtctcgcaaaattttgtaaggagggtggttaatctgtagaatggacagaacaattgctactgaacaccatttatcagcatgtatataggaaagattcaactgcaatgcctaggatatggtcaatcaaaaagaaaaaaaatatatatatacttctaatgccacttggataaaatagcacatgcaaaggtttgtttcctttcaaaatactctatcctaggtttgaatttgtgctgtcaagacagtgaccatggcctgacagtacattatctagggaatggtgagttaaaaaccttggttacatgactagtactatactgcatgtgtgcatctgttgattgtcaatcagtctggatacttacaaagagagacaggggacactgttgtggacatggggtgttgcctgctctgctgaacgcctgcaagaagccacgacattgcccccatgccgacggcctctcccgagagagatccatgcatccattgttttcttcttcctccagtcctgttggcagcacagataagtggtagattttggatcatcttgtacaggcaggtgacaattgtgacaatacaagcagcatggcacatgcagagattctgcatttgtacaaagcctctactggttttgattctaagcctctactggttttgattctctcttctcccctcctctctgcatgactgcatccatcaccacatggtcatctgctgttttgtggagtagttaagtactctccccatcgtttggcctggcttattagagactaaaaatagtttatgcataaattgtttatatgtgtgctctcagcgacttagaagccagtattgaaaaataaactacgataaaaagaaacatcaagatccgcttataaattaagttttaaaaatcaaattttagctacggttgataagctaaagagcaaacaattctagcgtttgaaatttatccacaaatataatcatttctagagtactattttcccaatctaaccacacatgattctctgtatttatcgttacattgcttggtgttatatctcataaagctagtaaactcttagggaaatcagagtaatttcacctcaacctttatatctgttaaaactcctagaaatgcttatatttatggacagagggagtagctagctgtgactgagatggcatgcaaattcaaccacagggtatggcttacagctcaggtagttaggcttagcttacaaaggccacagggtaggtacatggtatgtgatacatgatctgcacagcatccatgcatgcatctgggtaacatagatttctctgttcttatgattggagtgagctgagagagagctggatcagtatagtgtaatgtaatgtaatgtagtcagagtaagatgaatctggagatcctggcataggataccccaaaccctgctcaaagaaaataatcctggagaccccaccctgcctgctgccaactggatatccttaaccccacatttatatcactacatgattgcaggtgccacatgattacaaaggttctaagatcttgcaagatcttcagcttaacttacagttctactactacaactcctgctgctgattgctgattcctaatagaaagtaaaaaactggaaactagctagagctagaagtagattttgagttaacagcaacactgagatggtgctgcctcccaacagctaaaagtctcaaatcctaaatattgtttaccactacctgagctaatattgcacatgacaaaactggcgattttagacgcgcctgatacaaggtggcgctatgatgccgtctccttgaagctctttgtgagccagatggccgtctccctgggagacgctttctccggtccgaatggcttcagcagaatgcccagctcctcatacctctcctgctgcagcagctgcgcgctgaactccagcagcccttccaatgcctcggcacgctgctggaacgacgaggtgtcgaaccgctgctgcctggagtcattggatccgcggctcgaggcagcagtggcgttgcggcctgaggagtcgctcccgttgtccccatcggtgcgtaacacctggatcgtgcatttgtccttggtgattgaccggttgataaagggaggagtggaacatgagccatggccaggagagagcttgttgtggatggggagcaaggggtcctcagacgatgccagtgggaattccgcaattctgtcgattcgaggggcattcacagagacgtcaggggagtctagttgttccagaatgctgatgctgcgcttggtgggtgtttcatatgttgacagcgggagtgatgctcttcttgctggtcgggcaattttgtttggagttgtttttgagggcagctgtaaaagtggaagaaattggagctcaatgaatattggcacattcatttcaacagacaaataatgaaagaggcagcataatcatgcaaaatgcaagctcgtgctgaagccataaatagcataaagaaacaactgcatcatgacaagatcttaataactctaaaagaccaaaagctgaataacactaatgtagtatgcactgagcaagcacatgctataattgaggctattgtagtttctaaacaaatgaagaacaggttcactggtattattgagtgcacaaataatatagaaaaaaaaggcacaaaatggaatacctcagagcggtatgttctgttatacgatgttttgggaggttcaagctgatttctagctgtataagtcttggctggcaagctcttgggcgtccttaggatgcttgatgtctttgttatgatggctttactggtaacctcatccccagcctcactactgtcaacagagagccctttgacactctgggtggttgtgtattctttgatgctccgtgtagagctaactgaattccgttccggagatggcttgctaaatgtcacagtcctctcatttcccagagagttcctcctggccattcttctgcgtgcagaatcaaccacgtcactaggaaatgtcatcttcttaactttgtcagtcaaagattgatggattggaagtatgttgcgagtaggactagatttcaattggacttgcagcacataaggctgaagttgtggatgcttgagtagctgtgcagcctgtacaggaaatttagtaaatatttataccacaaaacaaataggagtatacatcagcaactattacaaagtagtaactaggatatagtataatggacttacactaggtctgtgctctggacttttccgcagcatgctcttaataagtcccctactgcacgcagaatataaatttaagaagcatgctctatccagataagatggtgggcaaaatagggtgaaacaacaaaaggcaactagttcaaaacttacaaggcaccagaatatttagtgggtaatggtgagactattgatttcgtgatcttgttaatcagcgcttgcatgtcctgcagggaaatgagaaaattagacccttgtacgtttcataacactgcattactattagcatagatgtagtatctaaacatatgctcaaataaaccatcacacagtaaaagtaaagaaaccaaaacagggacttacaaaagctttaaatgcaggcctgagcgcggtcatttcatatatacaacatcctgaaacaaagtaataaaaatgagagttcaatagtaagttttccatttagggcaggaaagtggtttctcaaattgaagtcatatatacctagagaccaaatatctgacttggtaccatatggtatatcagcaagaagttctggacacatgtaacttggtgttcctactacctgtgttgggagcaatatactactaagagtgacatcgaatatgtactggaaatatgaaaagtgctacaattacttacagaagatgccagatcatcagaagtcaatatttttgcaagcccaaagtcacctgcattggtttaaatttggaattgcaacattaccaggattgctaaacccatacataaagtatgatactttttgggactaagatacataccaagtcttatactttggtccctggcaatgaaaatattggagcactgaaacgaatttttagcagctttagtatatattatttccatgccatggaaatataaatactataaggtactcccaagtttagcactactactgaccttgacatctcggtgaagaatgtggtttgcatgtaaataatctagagccatgagaagttgcacaagccatttgcaaagcttctgaaaaaaaaatgagaaaaacatttcagtgcacatcccttgtttgcagcaaagcaatttttaaggtatcaaaggaaatgcaaggtcagaatccacacctcctcagagaaatatgtaccattagctctttaatagcttcagccctgaaccgattatagattgtgttagctaaggaactaaagttcaagaccaaaataaactattttaaaagaatttcatcaaaggaacacatacatgtctcctcccttacaatattctatacaaatgcagacatagcaaccctgaaaaatccaaagataaagaagtgagaatgaaacaaatctattccaccctcccaacttcataacattttcttcagtccttttcaacaacgttctccacccatgaatctttgtactccacgataaacggattcctgaccgtcgcaataagttgcatctgcatgaggagcatttccacataaatcagtataaaaaaaaaggaagtaccgcacaagagcaagaagacatcacatcattttacttcacagtttcagatcagttcagcaccagccaaactaaacacactagcatcatcatcatcaccaccacccaacacaccaatttatgcagctcatggtgaacacaaggcattccccttgaaaccatagcttact

SEQ ID NO: 22672 - DNA, 7962 bp, Oryza sativa
ttcctgcaccccacctcctggttcgcagagcggcgggtgcggtcggtctgccgcgcaagccgaatcttcttcagcacatacctgcataaacacacacacaaacctccaacatgatcaaaatggctgaaataacagtgagcttcaagaatgccaaaaaaaaaaggaaagaaagaaaaatgagatgaacaatgtcgagtcaaaagctcacttcttcttctccagcttgtgcctcaccaacaacgccgagccaaacgcccctttcccaatctgctccagcacctcatactgatccatccctttttcctacgagagacgcccccaagaaaccaccgcgaagatccaagaactcgcttccccccacccaaactcccgatcagcaaaggatcgatctttgggcccccgcgccgacgccttcacgcgcgcagatctcgccgcatttgatcggaggagagccaaggcaggggcaccgagaagagaagaacacgagccgcgaaattgaaagccgcagcgagggaagaacgaaaatgaaaagaaaagaaaaaaaagatggggtttttggtggggttcaatcaaactcgcttactcccctcagctttatatagcctccaaaaagccaaagcaaatgaggagcaagaagaagaggccaagctcctcaagctcctcgaggagagagaaagcaagagcaatgctagagagagagagagagatggtgatggcactgaagagagagagagggaggaggaggaggaagaagaagaagagtgagagatgactgaggagagagaaagagggggtgtgggccccactggtctagtcaaattagtgctctcttttttttaatttatttttttaaaagaaaatattttgggtcttttaggttgcattgatccaattggtgtttgtgaagagaacaaaaaggaagtcattagtgtgagtatggctacactaatgatatggtaacagtgtgtgattatacaaagtacctacttgtggaggtgtgggtaccactgattttttttttttttgattttttggatgaactgagaggagaaggcatgtgatcagatgagaaatcaaagaacaaatcagtacggagttcgagcctgcttgattttaaaatttggggggtttgattttatgactagttttagagatttcttggtcacttttgttgtccaaatctctttacatgttttcgttgcttgaaaagaaacaccaaaatagcataatttcattaaagacagctactagtttttttccttttctggaaactgattctatttagctagttgaattgtatatgcatttttctcttgacatttttttaacttttttttaaaaaataggacaaaatccgtatcatttgtctatgatgttagggtgattagtgatggggctcacactatacacatttgttttataatgtagccatttctcctgcaactactactaacaccacttgcagcattatactacttcacaattacactatcaaacaaagaagtgaaacattttataatccaactatccaagcagtgttagaggcatctgaaaagaaaaaaaaacacatgtacagaaagcccattggatgtagcctttgtttggcatcttctgaactcaagagaaagttcacagataacagattcattcagatatggtagtagtgtagatggagaggtgcttgctttagctggaacaagttcagaggtgactttgggtcattgttcattttgctagggtccacacgtcagtcactcaaagtcaggtgatgttaccgcggaggattcgcttcgtgctttagctagatagaattagatttttgaagcaaatcaaatcaaattgctcagttcctttcatcctttaatttcttgctttctttctttcatgtgtgctgcttctgcgatctctgcttttggctgcatgccatggctcctttctctctgcctgacaccagagcattttgtgcaaagcaatgttccatccattccatatatcttcttttgacacgcctgcaatgctgcttggtaaagcagatcgatcacattgatgtttattgcaacagaaattgttatgctctttgatcagttgctctcaatgtttagttagtacatgcattgcattttacaatcactgtccatttggttggttaagtcaccatcaacctaggaaagcacctaatgtacccatccctccttttccatgcatcaaaagtataggcaaattaaacaaaacactttcatgcttaccaaattgtatgggatataactagtgggaatcatggatgaagcttaattatctgaagcaaagaatagcattcaagaatctcatcattattgtttctctaatttagttgctttaatgtgtcctatgtaagccatttattctgctattttggttctctctgtattatttgaaccctataaacacctccagatttattgcctgtttgaaacatagaaaatttcacctagagttttgccttatgtttgcttattagcttatcagccgtaagttaaaatttgaattttaaaagttagttttggattcgattcatagttatttcatcatagcttattttttagcattggttttaaatgttaataacacagcttatttaaaaaaatagtgaaaaaataaataaaacaacccaaaaaaaatttatgggtaatattttttaagtaaaagttttaagaaaaaactcaaatgaattattgatacgatttgtgaaacacaagtaaagcaaataaaaccgtattattaagatatgtatatatcgtgtgatgtactgaacgtgtgtacgtgcacgagatgaaaattaaaaatccgacaggtaccgaactgggtctcacatggagggaacagtggaatccaatgcgtctatatatatgtgccaattaaattgaatataaaagtagaattagatgcatctaataatgatatgtgatagatgtggcagcatgagaaagtgacccatacttaacccctactattactatactttgagttggatctaatcctagcatgtaaaaatatcactctagcaaaaataaagaaattcagaatgtcaactcactcgagtctgatccaattgattgttagttttgctcttaaggtatgctcctatatacgtgcattttgcatctacacccttcttgaaatacacgttttttcatagtggtagtaagtagatgttcccagtgaaaatttgattgtgataatttcttatttgcccctgcaaaatacacacgatcaatcatttatttactcatgacgagtcactgacattgggtcctagatccatatgtcattgagagaatgagaggaaaataagggatcgggttaattgtagaggcaaataatgattttatccaaatttaattgatccactacattgaaattgagggtacagttacaaataaggcctctaactttttttcccttttgctttatctgcttctaaaaagagccagaaatattcctgattccattgccatgcagttccatcacaagctttttgtttgacagtttgactgcatctcctatcaacctttttgccttcgctttgtttggcaaacgggataacgtacagtctccttgatgcaaaaaaaaaaaaagaaagaaaaaaaagaaaaaaaaagaagaagaagcatgcctaggtgactggcatgtgggtcccaccccaagcttctaaacactgttgcttcgctatgcatgattccaaaagcactaatgcaaaacagtgagcatgcaattgagtagcaagaactaaaagatatatggtcggtacactgaagaaaaacaaaccttcaaaaggataacaatgtctctgtttcttgcaaagaagaaaaaagggtgctgatcatgatgttaacttcctactactgttgacttagaatctcaattatgtccaagatatcactctagctagcttttttttaaaaaaaaacaaatcctgaattgtggtgtaatattataggatgggtgtattaataattagctaattcatttaacaaaatatttagaattttatctccctatatacctcaacatttcttttccaaaaagctaaattgttaaataacagaatgatggaatgatttagcgatctctattcaagagcaaaaaggaataaattaagtacataatataaactttaaaaataaatttataactttttaaaagaaattcagaaatgaaaaacttttgcgaaaaccacaacgttaaggagctcaggcccattgatccatttctccattcctttagatagaacaaagaaatatacaggctggagctcgattccaagaagcaatccagaaatcaggaaaagaaaaaaaaagaaaccaggaaagttaaaaaagaaaagatcaggggaaaagaaaaaaacagaaagcagatcgagaacacgtatacgccatgtcgatgcatgccgtaatttaataactgcagccaaaaggatagaggatagagttgatgtcatgcgtcccttctgaatctccgaatgtgtctgaataagtttttcagcgatgcatcgcgctttttgcttacctgtttctctccaacctctttcttggcgtatcatgcgaagatattgattcaccgtgtttactacttatcataaactagatattaatccaccgtgtttactactcacaacacaacgcgcgaagctttcatctgatagaaatgtatttttgtcaaccctgcaatcttcgctcgacattggcatttgaagcatctaaaatttgttcgcaaatataaataatctagaatacctcttgtccctacaattacctcttattaaaatttcttcccatctttactacttatcaccctctcacctcatccatcgatccctcatttatcgaaggccaccgattttttttctcttagcgttaattcaggttgaacaaacataaaaatgcatatttataaacggagagagcatatatatatatatatgtcagcgccatgcaatgtcaaggaatgcactgctgcaactgcaaacaagccttgtattttttttttatatagccatttaaattggaaacttagtcccacgaacatgccaatctaaaatttcgctcgtatgaagatttaaaatcaaaaccttaagatgctactgaggtcactgcaactactaaactatacaccctttggcaagcatgccattgcaagcctggatcgagtcagactcaggggatgcatacgccattgcaatttcgattgcgattgacgtactgtttgaagagagaagactgaaacggagccatctccgccattactgcggcgaaagcagcagcttcgtcatgcagagatgcaggggcatacgtgacggccattaatacaaggagatgaaggtcacatgctccttgctccccttcgccagtctcgccggaactgacggcctcgacggcgaccggccggagcggcggagccattcatgctgctgtacctgctgcatttgcatgcgcatccctctctacagtctacacacgtgttgctacatctggtctaaggagaagatagaagaagatcgaatacgtaaaatgagataagtcatcagcacggaattagttaagtattaattatcttaaatttaaaaataaattaatatgattttctttagaaaaacatactatcttcgtcccaaaaaaaagtgcaaccgtggatatccatgtccaacatttgatcgttcgttttatttgaaaaatttataaaatttttttaaaaatattagccatacataaagtgctatttatgttttatcatgtactagtaacaatattaatcgtaaaagtttttctaataagacgaacggttaaacattgaacatgaaccgtgtaaaactacacttattttgagacggagagagtaccatttcgcagtccaccagggagtgcgcatgcggagaacgagtttttctcccaatccccatgacttgaaacaagcaaaatgagcatactacatcatagatgctagtagctagcaaaatgagcaccaataaaagacgcagtaagcatgaatattgttactagtagctagccatccaaagtggatgaagcagatactagcaattgaaattctatgggtaggcttctctaataaaacaaatgaatctcttccctcccgatcagaaatggagccaactgattttgaacattgttttgtttgattcatgtgatgtagtacctgcaacttatctccttgttttgttggtatgcacgtacagtacggtgcttttgtactgtattttagttggttgagaaaatgtgatcggataaagttggggaaaaaaagatgggaatggagatgctatgagtcacgaattaattgtatctgttctcaaccgatgcaggcatagctgtgtacttcgtacaattgtacatcacatttgtcagactgcagagctactgatggtgatacatcacatgccatagtttctagggcatcgccatcaattcatcgtccatatgtactccagatgccagaagtcatcaggtcattttaaaaaaaaatactatgtgcaacctatacaagcacaattttcttatgctccataatagtggtaaaagatgtggtcacagttgatcacaggaatgtagaatatggtgtctaaattttgaggaatcaaaatctgcatttcacaaacccagacaaaagcttgtatacaatggaaattgcaccacttaaggcatatataattaaaaaaccagatcagcaaaatttgtgtgcctcggtgtacaatacagatcaacagcttacaaaatctggcatgcaaatctaagctctcaccacgctatgaaaaatatcccctttgcaactgtaagctaggaaagaatatgaccacaacaggggaagaatttgggagccattcactgtccatttgttgtttattcaagccgtttctttgaatatacggggaagcacttcgtggatgctaatgtccaggagctcaggactcctgcagaaatattaaagaagagatatagtacactatataaaagctggagacacccacaagaggagggaatagacattgatggttatctaacaggtcgggaaagcaaaccctaagtcatgaatgaatggtgcaaagtttatagctgtacaacaggtacaacataggtcacaaaaagtgctgagcaccacaagatggcgcaaaaagctggaacatagatcaattatatcctaacaaaattcatagcaggagaaacatgccagcacaatgcaaaggttttctatttatgtttactactaattccttgagaaattgaattcctcaaagtaaaatatggaaatgcagatataataattttgtctcatgaagaaagggataagtacctgcataatactcgtcccttttcagttgtgctagggacaaaccatatcttccgcagaattggtgactcaaattgcacaaagaaaccatcactctggtcaagcttccattttcttgatccctgtcctttccagacctgtatataacaagatcattgttagtctatcattttcattctagcaccaaaaaaggaaatcttatgcgctgatttaacatgaacaaaagaaaatatattagagccaagcatgcagcaacacaacatcagaaaatgataggcacaaatcatacagggcatggtgacacatgaaagaggggagagggtgatttgacctgagggtacgagatggcgctcttaggtgctaccatacaagcagcctttgagaaagactcctcggaatattgccgcaaaaatgtgaagcaactgctgtgagtgtggggtgagtcaaaggcctagtaaaaaaagaaaccagataggtgttaataggagacaatgtcatggattcagaatagaagccgtaacagaaaattgaagatttacatatgtaaaaaataactagatcctaattctgttaaagaaattgactattataaatttcaagatgtctgcctatttatgaattgtt

SEQ ID NO: 22673 - DNA, 16175 bp, Oryza sativa
caataaaacaataaaatatgaaggtgaagatcattatatcgagcaagaaatgtcaaatgtcaaagtacatatgcccaacctgaagaagctatagtacaccctacccaacttaatctaatctgtagaactgtagatcgattccaaatctaattaaaaaaagcaaacccattccattcccatgcatcaactaattaaagattgctagaaggagagaatatatgcaagaagttgggcgatttgggatcgatgccgccaccaagaaaaaaaatatatatttgaagcatcagagaagtgattaaaacagcaagtgaacacacaagcaaacgatgtataaaatggcatggaggagacgaggatcagtgctatacctctagctccgacgagaggccggtgcggcggcgagacgacggcgatgatctccacctccacctcgtcgtcgtcgtcgccgtcgtcgtcttcctcatccaccatcatgctgaacctgaggaactcctcctcgaactcacggccgtcgtactcgtcgtcgtcgtcctcctcctcctcattgtactccacctccttcccggggcggtggccgcgcggcggcgccatctccaccgccaccaccgacggcggcggcggcggcaggtcggcggcgacggtgatggcgtggtgattgtcggggcctcctccacacatggctggaattaatggatcgattggattctccaatgccggatggagatgttgcagcagcagcagcagcaacagtaacagtggaggtagctagctagctgaaaaaagcaagagagctcactctctctgtctggcctctgccgactcaagtgaagaagagacgagacaatgtcaataaataataatggaccaaagcaagcaaggcaaagcttcaccgtcacagctgcagattcacaagagggacacgtgatagagacacgtacggtgtgtgtggagtagcaagttgtaagcctattttctctgttctaaaatctatctaaaatatcaaatcacatcatatatatacacgacgactaagggtgtgtttagttcatgtcaaaattaaaagtttggttgaaattacaacgatgtaacgaaaaagttgaaagtttacgtgtgtagaaaagtttcgatgtgatggaaaagttggaagtttgaaaaaaaattttggaacaaaactcggcctaagatgcatcagatcccatttagatagtgatattttgagacgaaggtatcattacctaatagtagcgctactatagtattcccttcgttagaaaaaaaggaaaaacttagcctatgataaatgtgatcaatctcttttagtacaataaatctagacagataattgttcagatttgttatactagaaatagtcacatcatctagtttgagttttttttggacgaaagaagtatgtagaggagagaggagagtcttgagatgaaaagtgtgctatagatttatagccatttacagtacagggctctaatatattatacgtctgagagataaatcaaatattaatggagtagtatatatttatattaaactattatgtagatagtcgctctaaatattatgttagtttttagagttatttttagttaactactttcttcgtttgaaaataaattaatttataagggatatgataaattataatatatactactattaattaaatttgctctagtgcaagcagcaacgagccaacgcagcagcagtagcagcacagggcggaggcaacagaccagacggcacacatggctcaacttgatttgggggctcgcgcacgcacacacccctgcacactgttaagagcacccgtaatggttatctatatgctctctacaagagatccatgtcatcatattttcctacttggaagagattaaatgaagagagagagtaaaactatctactaacttagagatagtctatagagaaaaacgaggcaatggatgagagagctattgatacccatgtagacatactattgaggtgatttactattaatctaatctattgctgagatgtacatgttttatagagagcaccttactttaccattgcgggtgctctaatatcagctttaccttctactacctccattttttttaagtgtagttacacggctttcggttaaacgttagatataaaaattcactactatattttaaaatgagacgaagggagtactgacaataacaataagtaacctagctgtagctttatagcttgctttgccatgtgcggccaaaaccctgggcgcactcaggcaggcaggaccaacagtccaaggtccctattaatatagcactagttcggtatgaattatcatgctttaatatatatgtagtaactgttatccatattaattgtcatgctttaatatagtactagttcgatatgaaactaacttgagtgagattaatgacgtgtagattgtggtgccagtattattataattttgctcacataatagcatatatatatatatacacgttaaaataaaataaaatgataacataattttaaactctgatctaactcgatccaattgaccgattcctggtactttgtaattcatatcttcataaaaccaacgtattagatcgtttaacactagatctctcttcgtaaagtcggtattgaaagccatacggaattaacacggtagcctatcatctatattatcacctatcatatagagcttgcttgctttcaagctaatttttcactgccaaaaccttgacaaattttgacaataccaaatttgttataatagaatttgtacttgtgtgtataaaatttaacatcaaaccaaacatccatacaatactaatggagttgtcaaaaaaattaaatataattcaatgaggataaatcatcttgtgattgagcaatgtcttcagcctggtggagatcagagaggagacgtgcgatgacggcggacctcgggaggatagaaggggtagcagcggaggtcggggaggagaggaataagtggcggatgtcgaagaagagggagagtagcagcggaggttggagaggagggggagtagcgatggaggtcgggtaggagacacatgatggtggtaagcctcgaagtggatggaaggggcagtagcaatccaaatccacccgcccaaccatcctaatcttcttccctcttctcctatatattctatctgactacctccttcccctttcttgaagggtgacgctgatggtcccgatgaagaaggtagcagtgtcagcagcaccattggtggccttgtggaaggttgatatatggagctggactcaacaatagcacgattccatcggccatgcggcatgtggggaagaaggggaatggttgacggcagcaataagtagaggtggacctagaggttggttgttgcctcttcatccttgaccaatcgtcttgcaccatcgccaaccagatatttgctcccccaccccctcccttgacttagctatgttgaagaaatgtgggtgaggttgtcagatgtgcctcatttacacataggtttaaaaatagatttaattgtcacgttggatgccatctaatcgaaacagtacgtaatgtataggaatagaggggattattcgtccggtttgaaaagtttggacctatttagattactgtaaaatgaacctttccaaaatttgggaacgctaaaattttaccatgttgacagtattaccaagctttggtaggacaaactaaatatgatgttatcaaaatttcctaaacactaccaatgtttggtaacaaactaaaagcatctacatgcttatcaattttaccaaatatgatacggtttaaattggtatcaatctgaacgggtccttcagagtagtttgtagtttagtagcttaattcggatgatcgcagtagttaagggtaaatttagacatttcccttaattaaattgaaccatatatatgagatttactttgttgtgtttgtctctgtttcctcgacagaaggtacgtacggttgatgcagcaacagcagcagctgctggcgcggcacgtgacattaatctgcacccatcgtgattaacaacctgttgatccgtacatctccctttctgtcccaatcgtacacacagtaattaattaagcacactgcaagttgtacaagtggccatcaaagggaaatgacccgtgaagggcacctcgccaaaaaacaggaatcgatactgtaaacaacgaccctgcccagctggcctgtctgtacatactatatattcagagatttcatcagactatcaagctagccagtgtgccacacaagttacattgtacccccccccccccccatcgtccttgtgtgtatctgtgttcaatggtttatcgttcatcttattttaaattttttttataattaatgtttttattattattagataataaaatatgaatagtattttatgtgtgatttattttttttataaatttttcgattaagacggacaatctaattaatgttggacgcaaaaactcgtaaatgaatttattttgggaagaagggtgtattgtacatagtacagtactccgtactatgttaagatcaagttgagggtagatgtgaggatgagcatgaatctttttgcacgaccctacacgcatatatggatgatcgatcttatctatagctagttttgcacactggaatgaaacgatcgactaatactgccgctggttttgaacggttggcgtgcaaaccaggaacgaatttcaggggccgtttgatgcatgccaaccacacacgtttgccacaccttaacaagtaaaaatcacattactcacgatttgagtaggaaccgggactaaagaatatctttagtcctggttcaaaagcccgtgggtactttttgatctaaccgggactaaagatcatttttagtcccgattgaaaaagttattagggtgtgtcaggccccaaccggttaagcagtatactttttcataaaaaaatatatattactttaaaaatcatattaatcgatttttaaagtttctagcatcagtatgttttgcgtgcggggaaaaaagtttccaaataccctcacacttataaacgagtacacacatcctacccctacggacatttccgaaaatctggactggattattttgatattgataaagtcattaccaccgtctcgcagtccagacctcgagggtacgtcatcttcaataaaaaagataattagcagtaaatgtaagcactcgtcctcatgatagatcacctcagatcgagagagatgatagacacgtggggacagtagagtcagtactaatagcccgctctgtcagcccagataaaaaggaaaggtgaaaaaatcgtggagagatcaatcaatgagtaatacgattacagtgccccttactttgtgggtggctcgcccggaaggccaagagccaaggcccggaaatagacagactatatgcagagcgtgctggcaggacagcacaaggccacaagctagtggagtactactagtagtacgtccttgctctcgacaaactgggcatttaactaatactacctgtttattttttactcatttcacacattaaacataatagaaaaatcagaatacccctactttatcaaattttgaggaaactatgttttacttaatcgtctcgttaacatgaaataatatttttagatatgtagcatgtcttattaaaaaaataaaatttgattgaaacctgtttcctacgaatatatattcacctatcaaggttgaaatcctacttcctacgaatattatgcacacacatgtataagcttttaatatgactttagtaagatcagaaatgtatcactggtttttgtctttttaaacgtatgttactgagcatattcataagaaaaaattcatggacaagataacgaacaaaagtagtcatagttcttttcgtgcagggcttagcaggatgagaatcctaataataataatgatcacaatttcaatcgcaaaattgtgcgagagcaccgtagttgtccttcctagcccctcatttattttgtgctgatcaatcttttttcatccctcagtacgtcttcaagttgaccaagcttgcaagtttgtgggggctaatacactacacatgcatttatataatccaacaacaatcaagatatacatatatattctttacttccaatgatcatacttgtctccggtgatcgtatgattgatatatcgagttcgagacacaaaaatcatgaaacattaatctaacatggaatcaagttgatttgcatatatagtccatatatatcactaattaatactacttggtactagtagtaattaattaatctggataataatggcagcaaatatatacaccgtgtttagttgcaaacttttttttcaaactttcaacttttccattacattaaaactttcctacacaaataaatttccaacttgtccgtcagatcgtttcaatttcaaccaaactttcaattttagcgtgacctaaacacacccatagtttagttttcgataatggcgatcttgcacgtaattaacttgctcgatcgatcagaagctccagagatcatcgccgacgtgctcctgcccgtcgccgccgccgagcaggagctagcatctcctggatgatctcaggagcaggagctaacattattcagaagccaaattggatttgggcgttttggctaacaattaatgggcccctggtgaatctgagacggtaaactgtgtgagctagctagctgcattttgataaggaacatatatataggaaaactagctgctgcggtcggtataagtaaaaggaaaattggctagcacttaattggctgaactcagattatttatgatttgtattaggtatatattaactaattatatactacaatttctgttgtacagctagaatgccggttagttttttttttcataagagataaggagaattgccatacaatgtcggtttgaatttttcttttctttatatttttcttcaaacatagggaggatatgatggttacaataaatatctctgtttggatgactctataaaagggcttggaatacaatcttggatatgcatgaatttacatagtagtgtacgtgtatcctttataactcagagctagctcatgagatgagatcaataagaatgcaacttatcctccatagaacttcttgtgaaaataaaataccacttcctatctttcatattaaaagttgtttatataaaaatattgtaagattttcaatacaaaacaatcatattatcaaaatatattcaatgttaaatttaatgaaattaatttggtgttacagatgatgctaattttttttataaacttatcaaaccaaaaaaaatttaactaagaaaaaaatcaaacaactataaaaaaaattagaaacggattggagttctacacttctactagctatctcattgggaatgaagaagtacaatattccatgcgtggaatagatctatcaaattaaaatgttaatagtaattcactttgcgtttctaatggaactttcaagctgcaataaaatatggaggtgaagagatcctagttacaaatgtcaatgctagctagcatgcccatcctcaagtgtgtgtgtatcccaacttaatctaatgtgtagtagaaaggagagaatggccgatttgggagagaatttttttttaaggatgatcagaagaaaacgcatgcagaagaacctttaactccgatgaggccggcgcggcggcgagacggtgatgagacctcgtcgtcgtcgtcgtccatcgatcatgctcacggtggtcgtcgtcctctttcccgggacggcggccgtgtgccatcaacgcggcggcggcggcggcggcgacggggccggtggtggttgtcgggccggggcttcttccacacatctttcgatggatggagaggtcgtcgtcgtcgcagcggcagcggcagcagcagtgacagtactggaggtagctagctactctactgtctactctatggcctctgaagagggaggaggaagcaatatacagtactacctccgtccttttaagtttttatttatcaatatttgatcattcgtcttatttaaacaattttagaattattatttattttgtttgtcatttgctttattatcaaaaatactttacatataacttatcttttttttatatttgcactaatttttcaaataaaacgaatggtcaaatgttgtaaataaaaagtcaaaaacatcacttattatgagacttggagggagtactaaattaatggtgaccctaattaggagtagagaacaagggtcttgtttagtttcaaactttttttttaacttttaactttttcatcacattaaaatttttctacacataaattttcaatttttccgtcacattattctaatttcaactaaaattttaattttgacgtaaactaaatacgcctaaggaaaaccaatggatcgatgaaaagcttttgcttcacacaggcgccctagccacagctgcagcttcacaagaggggacacgtatacagagaggggagtagctaccagcagcagcagtatccgtggacacggacacggattggaccaaatcgacaagacgacacacaacacgcggctgatcatcttgatttgggacctgcactgctactgctgctagctttacccccatttctctcacctgcgagggcagtaacaacaatagttccaaacatttttgtttgaactttcaacttttacatcacatcaaaattttcctacacacgtaagcttaaaaaacaaaacaaactctctctttttcttctgctgccgaacgtagcctaagagattatgcagattgttaccaaaataaatcttactaaattttatcaatttagtaatattatcaagttttttatgatttctaacgtatttactgaagtttagtaaaaaaaactaaatggatacgcatcttgatcactttatctaaaaaaaaatggtaggatttgaaatgacatcagtctaaacaatctccctaagtatcctagctagcttaaggttgagtttaggagtgagggttgggaataccttcactcccgacatgcaaaacggagcaacggttagtgcatgatttattaagtattagctaaaataaacttgataaatggattaatatattttttaaagcaacttttctataattttttttaaaaaaatatgtaccgtttaatagtttataaaacgtgagttagaaaaggtgtgggaaaaacacaacctaagtttagccagtgccattgccatttccgcccaagaaacccttgggcgcacgcaggaccgccaaagtccaaggtaagtagtcccatccatctctcttattcactagcagtacattacaacctttaatttttaatagatgacgtcattaatatatgaaccatatttatttatttgtcttatttaaaatttatgtaaatgtataagatataaatcatatctaaaaaacttttaagtgataaaacaactcacaacaaaataaattattattaaaatattaaataaaagataaatatgtgataaaaaaatcaacggtgtcatatattaaaaaacatagatagtacatcagaaattacaatccatgcttaactataattacttgagtcggtacaatacctctacatcagccgggtataagggtattatgttacacatcaagtttgttctgagttggttccaaataaattatatgagagagcaaaattagaatccactagcaagttctagacttctagtacgttaaaatccgaagaatcatttgtttagctatgcgggtctaggtctgtgatccctcacatgattttgtcagcttgcgtagccgacaactaatctatggagtacattattactttctcttaattatgtacacttaataatatcatggttacaattgtcagacacaccaaaattaaatatggtccctctcggagcttgcaatattgggaagcatattcctttagcttagctagctagggcataatgctattcgatcgattttttcagtggcaagcagatatcaatcgttttgctagacttgctcggctgagctggagcttctctgccagttaatctctttgatgctgttaactttgataccatttttaaccttaccaaattttaataaagttgctaaaaaagtggttacatttagtttgctgctaaattttggtaactatataggaaatcctgccaaaattttggtaagttgccaaaattttgacaactatattaaaattttggcaatgctaaaatttgataaggttttttttatcaaagtgaacaggagctgagattttactgaccctagtagctgcgcagtaaccatagctagctacagctaatccgagcaaagggtagtaatatttcgattatttattaattgatttaattctctcaatttgaactcatcaaccccacatgtacatatattgagcttagcttcttatatatgttgattatgcgcagtttactgttgttgccgttgtcattgcacctccctccatatttagcatcgggattctctataatactgttcactaacatgtggacatgaggatctataagacccacatatcagtgagtgtgtgcagtacggcagaggaattgcttcccatcgcttagcttcactgccagcaagttcatgggcctttttcacaacctaaaatactccttaatttatcctaaaatgtactgcccatactatcccatattctccaatccggatttatatcttacctttcctgataaggcaaacaagtctttctacatttctctccttaattaataaccatgtcattttctaaaaattgttagtactgcatcttagtatggagggagtagattgatgagccttcatgtttcaagctataatgttccaccaccaatatatcaaaagtgtgagcctaaaccaacaacataaatttcctcgttaccattagccacgtatcacataattatgtgatcttgaagatattttaaatttcaagagaccattcaaactgtataacacctgctatcttgatcagccttataatataatactagctagatgaaggcagtttaacatttggtggcagtttaacatttggaatttgttctaaaatataattaacttattcaccagcattctctttctaacctacgattcaatttctgcacttaccttcccttctcaactaaccacaatatttactatgtaattttatctacctttttaattaataactaggacggaggtactatatatattagccaaacaataggcagctaaattatacacgttgtactattaattatgtcaagacttaggaataatatatacttagtataatttaatttaatcacatgagatttgtatatactcctagtataagtttggttgttttctgtcgctgttgcagaacagaacgtacgtacggctgctgcatctgcatgtgacaattcatctgcaccactcgtgttaatcccagtcatgtcctttcctctgccccaatcgtacactaattgaccatagtaccacaagttgtgcaagtggccactaaaggtaatgacccagcgaattgaagctcacctcgccaaaaacagaaattaatataaacaacgaccctgctggcctgctctgttccgtaccccgtcgcctgtaacaaaattacttaggctgtgtttaattcacatcaaaatttgaagtttggctgaaattgaaacaatgtgatggaaaagttagaagtttatgtgtgtaggaaaattttgatgtgatgaaaaaattagaagtttaaagaattattttggaactaaacacggcgttagcctagtactcctatcctaacatactacatactatacgatcttttagtgtgtgtttagttcacgttaaaattggaagtttggttgaaattggaacgatgtgacggaaaagttggaagtttatgtgtgtaggaaagttttgatgtgattaaaaagttggaagtttaaagaaaaaatttagaactaaactcggccttatattataatgctatgaatctaatatccagattcatagtatcaagatatgtcatatccgatactattaagttattttggaacgaagaaggtatgtatatttttctgattcaatgatattcagggggtgtctagatacagaggtgtaaagttttagcgtgtcacatcaggtattatatagggtgtcgcatggggtgttcggcactaataaaaaaactaattacagaatccgtcagtaaaccgcgagacgaacttattaagaataattaatccatcattagcaaatgtttactgtagcaccacattgttaaatcatgaagcaattcgtctcgcaaattagtcgtaatatgttcaattagtttttttttagcctatatttaatactttatataggtgttcaataaagttttaggatgggatgtaaacatgtaatcaattttataaataaattaagcaccatccatcaggctactccagctatatatagctagggcacacaagttgcattgtacggtaatactgtatactgacttacagccgaagtagtatgatgaggatgagcatgaatctgcagctagtaaattttgcacactggaaaacgactgctgccctggtttttgcacgattcaattttgtatgaccatgatcggggaaggtgacgctgtgacaagcatatatgcacatatattcactgctagtctgtagtagatataatagggctgtgtttagtttacgttaaaattaaaactggaacgatgtgacgtaaaagttgaaagtttatgttagtaggaaagtttgatgtgatggaaaaagttggaagtttaaagaaaaaattaggatctaaacacggtgtaggtagatgattttgtaaatttcaagctcttattactagttagtatattatatctttattattactttcattattactttcgttttggttgccgattattacacgatgttcgtcataacgacgtttaattagcagctgacgccctagctagctgcaggccttgttttgactttctcatcccacagcccggcccaaatagttctgatcctctcagatgggcctgtcaatagcagagaatttggcccatgagatttctctttcttttttctgcggggacggcccatgatatttaacacgtgtggttactgggccggactatgtattcagaagaggaccatttttctttttttttttgcgcaagaaattattttgtaccccattctgccaatttaactctgcattgaaactttgtccatccgagttcaagtcctagactcagctcacgtgctagcatgtgccaggacttgtcctcgttgtactatctttatgaataaaaagggacatttttttttcagaaaataatgtacccttcatttgtttcccccttttattatgtaaattaaatggtggtgcaaaagaatcttcatgcagataccatatgctgcttatatttattcagatatcagggggacttgtagcagcagctgaaagcctgaaagtgatcatatccatgatgtgtgtggaactgttcttgagtgacgacgacatgttgtcgctgcactttttggagcatagtggagataacatattcttctgtacttccaatgaggagaaaggaggatggtcaagttgataaactagtttaatataatgcaagagattatggtttcagatctaggatatctcatgctctggatctttcctggattgttggcactttcttcaaccacaatatgatcccttgataagcacaaatctctgttagatatatgtctaggaagttgatatgttcatcacttatccaatctttgtctttgttggagtatatgtagtatatccctattgtcatatgctactccctcgtttactgtgggcacactttttgaaccgttacactgtgtttttttaaaaattctctatataaaagttttgttaaaaaatcaataatttttttgagtttataatagttaatatttaattaaatggtgcactagcggtcccgtgcctaagtcaaatagtgtgctttcgttttcacctttttactgatcaatgaggttagagttcagaatggccagcttggttcagaaaacgagcctttataatgtcatgaaccaattaggagatgggctgaatttataggctacctgttttggcagtactaccggtttgtttcttagctggttttcaggtcaaatcacagtttaatttgccataactatttccaagttgcatctcctatgagttaaatctttggcaacttgtggcatcttgaaaatttaataagtaaaggtcactttgattttatttaggagagctatcatgacatgacatgtatatatgtgtgttcttgttcattaatgggtgttattgacagcagttaacgttgggtttcagattgtgaactgatcaacactctttgagcttcaaagtgtccatgtaacttctctatgcttttccagaggaaacttgcaattagctttagtataactaacaatttgcagttattaatgggtggatacaaaatagtactctgttatcttcacaacactttccaggaaataatggttttttttcttgtcagttcctgcaattggctgtatcatgtattttgcttgattaccagttgatgtggttgttaacatctgtagtcacactcatagtatgtcatgaactcaaggtgccaaggaacctgtcatttcagacccctgaaccaacggctgccatgaactctacctcacaaccttcactctcaccttattcaggatatcgatcaaatcattcagaaaatcagtcaacagaaagcttcattacattacatggaaaaaactgaactcatacatacatggaaagtgaccctcttataatttctctcctcacatacataaaattagtcttattcaaggtcattaattaacagactagtgtttcaaatgctaggatcaaaaagggaaatatgctcgtccttgatgcatgagcatttcctgtggtgtagtgctgaaacaagtccagacatgacatcccaattgattgagtgatccatctgagtctgaaatctgaacaaccattttatgtagtaacagaaggccacaagtgagccaaacatgtcagtgtattttggagtgtcttcatgctctaaatttaactcacttcattggtacatgaacatgtcagttaacaatagcagatactcatactacttggactgtgactgcagcttgtcttcttgttgaaaaggaaggaaaggattagttgcaggatagcaggtgatcaacaattagcttaagctctaccttttcagcccaatatgggagccagcttgatcaaacccaacatctaatgcccttgtttaagtagggtttgttatcaacttatcataatctcttcttggagaggttatagaatgataaaggcatccatgcagtgatggtggcacctgaactttaagccgagctttttcagaatgagagtaggcacacattttcaatatcacacaattcatccttgaattgatggtgacatagtgttactgttcatgtactgaacagagcaagatagtctctgaattgttaatacagaacagagcaagaatatactatcttttgttagaataattgggctaggcccaactataacattaaatctcaaaggcccataataagtgttgaggataataataccacctcaggatttaagcgagaaatatctcaacctaaataaggagttattggaggctccctgttgaccagttgaggtaggggtcggaatgccacacgcgcgcgcgccgggccgggcgtgggcgtggctggctggcggcgtgcgtgcgtgcgtcacgtcgctatccttttgcagccactaacccacgttcccacgattccctccgcaacagcgcgtccacgttctttctcctgatagataaggaggccgcgagtccgatccgtcttcttcgcttctttcccggtgttagtttcttcttctccgcgtctgagttgctctcgcttcctcgcttctgatctcttgcgcgcacgaaagattggaaagatcaatgccttcgaaaccacacccttagctgaaatctgcaccgggtaggcggg

SEQ ID NO: 22674 - DNA, 1642 bp, Oryza sativa
cttggattaaaatatgccgattaatgactatatttccaacaatccaaaaacctgataggtcattttcggtagttggctttgctgctgcactgaaaccacatgcttttgatggttcaaactataagagatggaaagcacgtgcactattgtggttgacagcgatgcagtgcttctatgtttcacggggcaaacgaagtgaaccacctctttctcctgaggaagaggctaagttcgaggcttcggattgcctgttccgtggagcattgatcagtgtactcgctgacaacatagtggacgtgtacatgcacatgccttctgggaaggacatgtgggatgcacttgaggccaagttcggagtttctgacgccggcagtgagctgtatgtcatggagcagttctatgactacaagatggtcgataaccgttctgtagtagaacaagctcatgagattcagatgctggctaaagaacttgagaacaacaactgtgagttgccggacaagtttgtggcgggtggcattattgccaaactaccaccttcttggtcggactttgccacttctctaaagcacaagagacaagagttcagtgtttctgatctcattggctctttgggtgttgaggagaaggcgagggcaaaggacgtgcggggcaaaaaggttgagggatgttctagtgccaatatggtacagaagaagaaccctcatgcatcccacaacaacaagaaagtcaagcctgatgtcaaacccaaggctgcaaccaattttaagaaaaaaggcaagggaaaggcaaagggagactgctttgtgtgtggcaagtctgggcattgggccaaggactgtcctgagcgcaaagacaggaagtctgccaacatggtcattagcgagggcggaggaacatcggggtacggtaaaatattacctacagttctctctgtttttcattcacctgattggtgggtggatactggtgctaatattcatgtatgtgctgacatttctctgttttcttcttatcaggttgggagaggttcctccttgttgatgggaaacgggtcgcttgcggctgttcatggtgttggtacggtcgatctgaagtttacttcgggaaagaccgtgcagctgaagaacgtgcagcatgtcccttcaataaagaagaatctagttagcggctctctattgtgtagagaaggttttagacttgtgtttgagtccaataaatgtgtcgtttctaaatatgggacttttgttggaaaaggttatgacagcggaggcttgttccgcttttctttgaatgacatgtgtaataatcataatgctgtgaaccatattagcgagaatgatgagtcaaatgtgtggcattcgcgactctgtcatgtgaatttcggttgtatgacgcgcttagctaacatgagtttaattccaaaattcactttggtcaaaggttccaagtgccatacttgtgttcaatcgaaacaacctcgcaagcctcacaaggcgtctgaggcgaggaatttggcacctctagaacttgttcattccgatttgtgcgaaatgaacggcgtgttgactaaagggggaaagaaatatttcatgacactgatagatgattgtactagattttgctatgtgtatctattgaa

SEQ ID NO: 22675 - DNA, 8066 bp, Oryza sativa
aggggtgatcttgtgcttatatgtcaatgacatactgatctttgggaccagcttaatgtgattgaggaggtcaaagactatctgtccaagagttttgaaatgaaggatttgggagaggctgatgttattcttaacatcaaactacaaagagaagatgaggatgggattacacttgtgcaatcccactatgtggacaaggttttaagtcgctttggatatagtgactgcaagccagctcctactccttatgatcccagcgtgctattaaggaaaaaccaaagaatagcaagggatcaactgagatactctcaaatcattggttcattgatgtacttggctagcgcaacgaggcctgacatctcatttgctgtaagcaagctgagccggtttgtctcaaatccgggagatgatcattggcaggctctggaaagagtaatgcgctatctaaagggcactatgagctatggaattcactataccgggtatccaaaagtactagaagggtatagtgactcaaactggatatctgatgctgatgagataaaagccacaagtggatatgtgttcacacttggaggtggcgctgtttcctggaagtcttgcaagcagaccatcttaacgaggtcaacaatggaagcagaacttacagcactagatactgcgacagttgaggccgagtggcttcgtgaactcctgatggatttgccggtggttgaaaaaccagtgccagctatcctaatgaactgcgataatcaaacaatgattattaaagtgaacagttcaaaggacaacatgaagtcatctagacaaatcaagagaagactgaaatctgtcagaaagcagaaaaactccggagtgatagcattggactatgtccaaaaggctagaaatctggcagatcagtttaccaaggggctaccacgtaatgtgattgacagtgcatcgagggaaatgggcttgatacccacctaaggttgcataatagttgaaacctgtgcattatgatcggagatcccgtgaatttggatggtgaaacaaactattgtgtgactaagagaagagacccttgaaaggggctcattttcatgatgtgcttctcttctttcatgcatggtaggatggcttatgtcttaatgtgatccgagtggcttttccaagcagagatgttgacctgcagaacatctcagaaggaacacatctatatgagttcgactgctagtcacagtctatgaggtttgggcgatctctagttactcatgaaaggcctggagtttgacttatatgctccaaacagaggggatgcaaacggcagcccagtaccagtcaaggttctgagtgaaatctgatcacacaaaactcacaattcaaggcatagtccattgttaagttgtggtctgatgtagctcatttcctaggtggaagttcaacttaacagtctccaccaaaaccctggtatatcaaacaggcacaacattgagaacatttcttatgagccttgaaatttggtggggattgttagaataattgggctaggcccaactataatattaaatctcaaaggcccataataagtgttgaggataataataccacctcaggatttaagcgagaaatatctcaacctaaataaggagttattggaggctccctgttgaccagttgaggtaggggtcggaatgccacacgcgcgcgcgccgggccgggcgtgggcgtggctggctggcggcgtgcgtgcgtgcgtcacgtcgctatccttttgcagccactaacccacgttcccacgattccctccgcaacagcgcgtccacgttctttctcctgatagataaggaggccgcgagtccgatccgtcttcttcgcttctttcccggtgttagtttcttcttctccgcgtctgagttgctctcgcttcctcgcttctgatctcttgcgcgcacgagagattggaaggagcagtgcctccgaaaccacaccttcgcctgagatctgcaccgggtaggcgggtgatcaggtttttggggagtgcttcccgcacgactgctcatcgccatgtctggagttgccgccgccactgctggcggaggtggtacgccgccgacaggagctggatccggagctggtgcgccaggaggtgccgtgaacgacaacaacaacggaggcaattctgccacaccatccagcggagggccattctcggggtataatcttctcctcctgctactgttgttagcgctattcctgttccctttgttagcgctatcgctatactatgtgcgctatgttcttgttcctgttctacatgatgcctctagcatgttatcgcattactggtatgttcctgttcctgacattcatgatgcgcatagtatgctactggttatgttaagatcaccctacactgcttatgccatgatcattgtttcaatttcttggattaaaatatgccgattaatgactatatttccaacatctttttcatattttttttaccaaagattgttttttcttaatcttctccattattatactcctatttgtctctgttttttgcactgataactggagcaaatctgggccgagcaattagtagtatatgcagtcaaatgaacggggaaaaatgagaagtacatgaaaggaactgattttgtgactcaccatttgaatgaggaagggagaaaagtatcaaatctggagcttgatgcatgaacagttgtatatatgatgaggaaaatggaactttgcatgccacaactgtagcctcctataacaaaacttttattgtttactcgttttttttcctctgctttcgtaatgaggatctgggcgtatacttcgaatcatatttcattacgcacataattgactatttctgactgcagcttgtcttattgttgaaaaggaaaggatgattagttgtaggatagtacatgagctatgatgttttaactctacttttttcagcgcaatatggtaaccagcttaatcaaacccatctaatgatttagtttttaagtaagaatatttgtttgagagatagtatagaatggtaaaatggcacttgaactttaaactgagatttttgggaatgagagttctatacattatcaaatatggcacaattcatccttgaaacgatgtgacataatataacagttcatgtcctgagcagagcaagctagtctggatggaaaatacataacagagcaagcatggtatcatttttattatttttttgtcaaagagaacttgaatactctctaattcaacattgttttcttaacctttttcatatttatactcctgtttgtctctcgtttttttgcattgagaatggagaactctgggatcagtagatgtagtcaaataaatggggaaaaaagagaagtacatgaaaggaactgattttgtgtgactcaccaagaagcgtgtgagaaatgggaaaaagcacacaaatcatgcatgaacttctagttgtatacttgtatatgaagggtaaaatggagcagttaaaagtagcaccacataaatatcatctgctatcaccaaactgtgttctttgcatcttcctcctcgcttttcatgatgataaaccagactaaattagctattagtatacttttacttggtgataaagagattggagaaaaactaataaaataaagttatcatgcaaaatcctaaaattattttagagaaaaaattgcacaccagcattcttccacgccggttgaattcaatgcatgtacttctatgcatagatagaatctgcattatgcgaagtagaccaacaatcgctgcccaaaagacttggtaagttaagacataactaaccatgttcatacatgtttaaatcacattgcatttatcacatgtgaatttaattcacaacaaaatcaattatatttatttgttgcagatgtacataagtgtgagcccaattggtcgatctatctacactcgaacatgtcaatggcaagacaatagaagtgtgacaggagtaggtcgcctccacctcgtatgtgatgaccaactttaggctgcaactgctcacctctcgccaccaaccagcatggtaccaagcgtcccaaatggaattcaccatgtctgccacttctacacgctacatgctacaactgcaagatctatactccatatatgcgagagctatagtttatggaagttagactttaggaaatgtatatgtgattcttttagataggtaggacatgtatatgtatgaacattacgcatatatttgttctttctatggactaaaagaaacaaggctaaatatctatcacaacatatgtatttgtaggtactaattaaagattgattctccacagcaaaataatgagatgcgtttaccctgtcaagcgaattaatagctagctagtatttggtctgataaatcctaattatataattttagaaaaagagaaaataaatttagcattcatacattactatattacaattacatctccaaactacaaaacagtcccttgccatttacaaacacccccctaaacttcacacaaatcctcacagctatgccaagccctaactacatcacctagctccattctcagctgctcccatccgaacccctgcacctcgccgccgttgccgtcgacgtcgacggtgacctccagccttagatcgacgagcaacagcggtgactgcctagagacttagtaagttaaactaagttactgagattaacaaattaagtacatttcgtacatgtttgaatcacattatctatcttttctttctaattaagtttgatacgaagtgaaattaattatatttgtgaatcacctgaggtcgttatttatttgtggctatggtatgtttccactgtcctatttgtcccctagttcaggtagaattcaccatgttctaactctgggtggatttgcaatataagtgcaaccgatctagatggtacaagtgcacaagattattatcagcataacaaatcaacaacgcatacacgcatggagctaaagattatggacatacaggttgcattgagtacgtacagaagtctggagacgtatctttttttttattttccatttctcaaaaattaattggtgcttgccttaacaccttattattagatttgtaggactgatctaacaccatatgccattacgcatataattgactatttctgactgcagcttgtcttattgttgaaaaggaaaggagggttagttgtaggatagtagataatcagctatgatgttttaactatactttttttttaatgttaaaaaaaaaactatactttttttcagcgcaatatgggaaccagcttgatcaaacccatctaatgattttgttttaagtaggaatatttttattataatctcttcttgattgagagagattatagaatataaaggcatccatgtggcaccctgaactttaaagtgagcttttttggaatgagagttgctacacaatatcaaatgtgacatagtataacagttcatgtcctgagcagagcaagataatctggatgataaatacagaacagagcaagcatggtatcttttttttcttaattttttgtcaaagagaacttgaataaactctagttcaacattgttttcttaaccttttccatatttatactcctgtttgtctctcgttttttgcattgagaatggagcaactctggcggcagtatatgcagtcaaacaaattaatgggaaaaaaaagagaagtacatgaaaggaactgattttgtgtgacttaccaagaagcgcgtgagaaaagggaaaagcatcacaaatcatgcatgaacttttagttgtatacttgtatataaagtgtaaaatggagccgttaaaagtagcaccacataaatgtcatctgctatcaccaaactgtgtccttcgcatcttgctcctcaattttcatgatgatgaactagactaaattagctgttagcgtgatttggtaatgagaaattggaggaaaactaattaaataaagttgtcatgcaaaatcataaaattattttagagagaaaatttcacacaagtagtaatctatactggttaagtcaaatgcatatacgtccatgttaagtcaaatgcatatacgtccatgcattgatgaatttacattctcgctaactgcccagagatttagttaagacagaactaaccacattcatacatgtttaaatcatattaattttatatcccgtgagctaatttaggtataagaagtaaatcatattacttctatatgccgtgagctaatttatgtataagaatcaaaatcaattatatttatttgtttgttacatagaccaagttagagatgttaataagtgtgtgtcccaatagcaaagataatcgattccacgttacggggctaggtcgcctctacctcggacatgatgtcaacttctggatatagttctttgcctctgttgccctcatcgccgccagcgtgctaactaaatgaaatcatcgccgccagcgtgctagctaggggtccaaatgaaattcaccatgtttgtagcttctccaggctacatactgcaagcccaaggttacatgttaggaaatttagaccatggaaaatgcatttataattttttagatctttaggacatgcatatgtacgagcattatatgcattaggaagaaggggtaattgtctacacatgtattttagatttgtaggtgattgtaaagattattctccccaaaagaaaatattgtgtttaatctgcaaactaagggagttaaggtagcgaaaataatgagttgtgtttgcgctgcaaactaagagagttgtagctagctagcacagtagcacagtacatagtaccttctcataaatcctaataattatatatctctactattataaaaattgaagatgttttgccggtattttagtacgtcatccgcatttgtgttggtttttaagttcattcgcttttggaaatacatatccgtgtttgagttggattgtaaattcgtttgcttttaaaaatacaaaaggggtcatataaggaatctctttaataaaactcgcatgctaaattgagatggaagtcggacttctaaatgcagctaataattttctaaaaaatatctaagcgaattcccacagtgaatttcattatagctaaaccgcacaaatataataagattaaaatagcattcaccacccgttgcaacgcacggtcatttttttagtaattatataatttaaaagaaaaatgttgagaataaatctagcattcatacattgctatattatacaattacatctccaaactacaaaagagtcccttgccatttacaaacacccccctaaatttcacacaaatcctcacaactatgccaagccctaactacatcacctagctccattctcagctgctcccacccaaaccccttcacctcgccgtcgccgccgtcgacgtcgccggcggcgacctccagcctcagctcgacgagcaacagcggcggcgccacctccgacatctccaccgacatcgcggcgatccccgacgacagccgcccccccgccagcggcaagcactccacccctttcttccccaccaccaccacgtacccgagcttcccgccggcgaggccgagctgctccagcgtcttctccggcgacgccgtcgtcgtgaaccgcttctcccttaggctcttgtcgtgttcgccgaacagcccggacaggtcgagcccgggagacatggagatgatgtcgaacgcgttcagcggcggcggcggcgccgcctggaacgccacggcgcgctctggctcgccgttgaggaggccgtcgagctgggagtcgacgctgagcgagcgcttgaaccacgggtggtgcgccgccagcgactcgacggcgacgcgggtgtccgggttcgggtcgagcaggcggctcaccaggcggcgcgccggctgggacacccaccgcgggagctcgtactcgcggcggtgcgccttccggcacatgtcggcgatgttggagtcgtctaaagggaggtggccggcgaggaggacgaagaggat

SEQ ID NO: 22676 - DNA, 6905 bp, Oryza sativa
gaggacgttctgcggcttcacgtcacggtgcgccacgccgcgcgcgtggcagtaggacagcgcgtcgacgagctggacgaacacccggcgcgccgcgctctcgggcaggcgccgccgcggcagcgccgccagcctcgacaggaggtcgccgccggtggcgagctccatgacgaggtagatcctggcgcgcgtggcgagcacctcgtggaggcgcagcacgtgcgggtggcgcagccgccgcatcgccgccacctcccggagcacgcgcggcgccatgcccgccgtgcccatcacctccgccttgtcgatcaccttcaccgccaccgcctcgccgccggccaccgcgcgcgccaggtacaccttggcgaacgtccctcgcccaagcatccgcccaagctcatacttgccgagaagcggctcgccgccgccgccgccgctcttcttcttcctcgcgtccatggcagccatggccatggacaccaaccacaaacaccttcaagatttggtgtcttaggtttagtttgttgaatgatgagttgtgtgtgtgtgtatgtgtgtgttgggtttatatgatggaggtgagttggctgtcttaattagtttggttagttaattaaccatcttagttgggttagttaaccatggttagtgtcatcttaattataattggtataaaggacacattgcaaccaatagagtgatgcaacattggagtagtttctgggtggagtgatcatgtgtagggggtttatgtgtaccaaagggtgtcgtctaaccatctgatatcgataaattattatattttataacatatattatttcacgcaatttgttcttaattaggcgttttctcgaacataaaccttaatttactatacatacggaaaaggaaaatatgtgtatgattcaactgtatcatactccctccgtattttaatgtatgacgccgttgacttttcgactaacgtttgaccatttgttttatttaaaatttttgtgcaaatataaaaatattgatgtcatgtttaaacaacatttgatgacgaatcaagtcataataaaataaatgataattacataaatttttttgaataagacgaatggtcaaacgttggataaaaagtcaacagcgtcatacattaaaatatggagttagtactatttgtggttgttttgaggtgtggggttgatgtgtccattctggtggtggcattatgttgcaaattggccattgatatttgcaagctggtgggccatgcttgagctgcagctgctaccatagtgttgacaatggccctccatgggccaatatatatgtatgttggcagatggaatctgtcaccaagatgcctttgcctgaacctcaagacaacaggaaaaaatatcaccaggtttaatttcctctaagtggccaccaacccactttattataatctaaggaattgtttggaatacagtgatcattctgcaggaattaaatagaaaaaaaaatcagtagtgcaaggtccctattttgtggtcaattctttgggcacgtaagttttcagttccatagatcaaactgcatatgtttgtatctgctatgtttggctcaatctgattcaatcagcttgattatttcatatatgaaggttcctgagtaatgaccaaatatcactgttgaaggaaaagggaaaactgaagaagaaagctgagaacagtagaggtaagagtgtgaaaacaactgacacatatcattgttgaactctgatcttttttctcgaacgcgcaagttgaactctgatctagtattagacttaatgagcaactaatcaatcacttctctccatttagctatcctatttcctatcagtatatgtctcacttggacagtgatacaacattctctgatagtagatcgcaggttaaattgttcctagaaatgaatattcagtttttctttctaattcttggatgcatgtgaattgtggttcagagtttcagacagcacaactttaagggatttgttggaatagcaaaatagcgtcccaaagatttgcagtcagtgtcaggttggtcgttttctagtattaattatagcatatttctgttttcttgcaaaaatttattaaggatttgttgctacctcgtatgtagttttgtgcaacttcctctcattggcaaccatttttcagataaactctcattggaacatatataccagtttggttgcttcagagcaactagtactttatgttgatttctttcattgaggaagaattaacaatgtttcaagcaaaagcttttggaaaagaagaagacttccattaaattgtaaaataaaaggtggcatatcctcattctttgattaatctctaaatgtgcaacaataaagatgctagggcaaaagcatcgtcttggctttaatctttacatttggctaaagatcaccactaatcatcgtctaaagaaagatctcttctgatatcagtatacattgcaaagcaagacaaacccatatttaaagcaaataagcaatacaagatgatcttctccacaagcactcagattttctttttccaactaatggcaaatgatttgtccttgctcactaactaatattctgagagctagacctgcatgctctgaatcccaaggataagaacagagtattaaattgagcacatgatcgattgaatgcatttgtcacatggcatttctaaatgcatactccgtccatcctaaagaaaacgagaaggatatgtccagattcgtaatcagaaattggtttttttctaggatgaatggagtaccaatgaattataaaacatggactagaacacatttcttgtcttcaatcttaccatgctgaattgatgctacagttgggcctacaaatttagcaggatctgttgtttgtttcagacattaagacccatgctttggccagagcattgatcactgcatttgtccatgttgtttaattaacaagtaggagtagaatagaagctgattggtggcagaggtagatgagatattttcagagaaggcatcaagagtgccttatgtgagcaggcataaatgtatattccccagcttgattggtttgacaggtaaaattattctgctgttgattggctcatatgaacaactggggaaaacatatcacatatattttttgttatcttctcagtagaagtatcctgacaaccatagttgtgaccttccaagtttggccacctaagaaaatattttttattaggtgatatttttgcatgaagctttgagggaaaaaaaaggttttttgttcttttgtcagaagtatataatggatttaggtccaacctggctataaacatatgttctattttttagatacatctaacatttagttttcagccattccgaaaggcctatttctgtttgagagtactccatgccatattttgcgaatgtgaactgatattttttttatatcacccaatttcaagtgacaagtggaaaacaagcaagagagtgacccagaatatgtctcttgatctgtcgtccattcactgaaactgacaccaaggattcatatcacaacttttgtaggagagcatgcatcttccacttacaaatttttacataaaattgcacattcagtctctaaacttattcgcgagaggaatttctactaactaataaggttggctgaaaatctgagagatgttttcttatttgggtgacttactgatgagctctaaggccaaccaatatatatttgggtatattttgtgatcattttcaatgtccatttatggtgattgtcagtttctctagatcgccgtttcttgataaattgacatactggcaggtcatggttttcaaagcacaagtggatgacaaaagtagaaggcgactgaaaagtgaaaacaccagcacatctattgtccatttcaagaagttgtcttacctttcaagcaaagaccagccatgacatatatatctaccaaaatcaaatttggcgaaaattcacgcatgcccgtatcgaaaaacttcgtcgaatacaattgaatacactttgtccacaaccaaaatagttatactgaaaaccacatttgcatcagcccttccacatcgatcattgataacatgcttcctgaacttttcttcagtatctgaaattctgaactctgaactttctgaaccgaaaaatgttggacaaattagtcgacaggaaattgacgacagccaagcaacccagcgatgcgtcagcttccagggcggggccgaatgattggtgggccccacatgtgcgctgctgtccacacattccagtgggtgtgggcccgggcgtgacatgcaatgtgggcccgaggaaggtgccacgccagatttggattctcgaggagccacagccactagctaccggatctctgcctaacctgacgaacacaccaagaactactcgagcattcgacgaatatgcagaacaaaattaaggttgctgccgattgtcgtcgttttagggttttgattatactcctgagttctaaaattgttgtccttttagaatttaaagtttatctaaaataattatctttatagagtactaattatctcaccaatcacttccaatttaaatttctctcaaccgtactcccacatctaacaaaaaaaaatcatataatgaggaatcacatagtttttttcctgaaatcttaatctatgttaaataacttagaacaataattattttaaaacgggttgagtataatggttgcaggtgaagtgttcctgtcgtaatcactaactacactataacatagtcgtactacatatggatgcatgagagctagtggtcctaattggaaggtggggattaaaatgtgctagttaattagtgactagtcatattataaacatttggcgttttgctgatatttttgttaattagtttattaattatttaattactagggcattgtttttttgtgttgcaaactgaagttatatagccattgttagtggtgtggaaaatgtgccgctgaatggaattgttccagtctttataagaaaaaacacactaacaatttagtagtgttaaaatttgctttgattctgatactaccaaattttagtagggtataaaaaaccgaaacagtcgtaggttcactgtgtctttgatatagtgacctctccttatatatatgctttcacttacaccctaaatgcatatatatacgagtcaactttaagagttgattagcaaaattaattaggcagtgatcatgcatgcgtgaactgtaatctccgaagattacacatgatgatggccctcacaaaattcccatcaacgagtaggaatgaacgaatgaatgaagccatgcatcatcctgttggagcatagtatacttgactaccacatcaatgttcatatttaattcggataattatatatgtgcaccatatatagagattaaatatatttcagtggggtccttaagtttagaaaccaacggacgagaacgatctaatcatgtacaggtatatgttaactataatatataatactcaccatcaaggttaaccctggcccgccatgatctaggtctggatcgtggttcactgtcaatgattttctctcctttaattattagctaatttgatacctgatgtctgatgatatatgtattagagtgaactgtaatttgaaccatcttttattactaatgtttcactttaaaccatccttaaaaactgatcgaatgtcactttttaaagtttggatcgcctaactctcttttctgcgatattatacctatcgaggtgctccccgtcagttgttacaacaaccatgtctagccttccttctggcaaagatatagcgtgcacgtagatgaggagttcatcggtgtgtcagagccgatgtatttaggatcattgatgtttatagaagaagtcgtttcgaatggtttaaactgtaataatgataaaaaaaatctggtctaaagcgaaaagatcggttatttaaaaatgatccaaagtgaaacttaaaaagaaaaaagttggctcgtgctgcagttcactctatatagtatttggtggcgagcatgagtattgactatgagcaaaaaaaaaactatatgtatcctataaatataggtagagctagctggtcaggaagatgctgagatgatgaaattggttaatcgacagaatgtaagttaaccgattaattttgtcaggtttcgtcgtcggacgttggttatataggacttgcaggtacatagaattatatatatgctgttgatttataatctactggttcaggttctctcaatctgatgggattagagctagttgctggataactacccttgtaatacaatctgcatctgaaatatttctgcgtggccaagtcaaactcaaactgctatataattatgtgcaaaataatcctaatatatactctctctctctctctccatttttaaatatttaaactttttaaaatatgtttgaccgttcatcttattcaaaaaatttaagtaattattaactatttttctatcatttgattcattgttaaatatacttatatgtatacgtatagttttacatattttacaaaagtttttgaataagacgaacgatcaaatatgtgctaaaaagttaacgatgtcaactatttagaaacggggggtaatatcaggtctcggtgtagccagagaccctgtttaaagcaaggaccgtcccgtagatattttaggccctgagctgtgcggaattctaacgatcgaattttaaagataaaaatgaaattagtacaatttggaggagtccagtatataattcatagcaacacaaaatggagcgaaacttagcaatgtattgtgcattgatcaatattcaataattcattaaaacactaaggtattact

SEQ ID NO: 22677 - DNA, 21251 bp, Oryza sativa
  unsure (1)..(21251): unsure at all n locations
tatctagattcattaccatcaatatgaatgtgggaaatgctagaatgacttacagtgtgaaacggaaggagtaaaagatagggacaatgttagggcacgacgacaggcagccgatcgagcacaaagtacggtaaccgtcaagagtggtcgagcatcatcgatcaagaaaacaaaactatactccctagacaaagcctcctaaggtacacttagagctttgttcgaccaaataacatccaaatctttttacatacggatgttcttttagtccgcctacaattaaatagacggtccgtaaaattcgtttttgtacgtagttgggtgggctagcatgtaccaattgtactatagacattgacccctgaggccctgaagcgatcataggattattttcctattatatgcataatatgaaaaaaaataaaacatatgctcctagatagaagatatataatgctgtaaatcatttccattattaaaaggtaaaaaaaggataattgtggaagagcctttgctggcggtggctagaaggggcttggcctcccccgtgtcttgaaattttgcgctgattttactgcagatttagcaaattttgtttaaagaaattaacactctcagcacgacagcaaggtctccagcaaataaattgtgtttggtggctccgatccgccacctttggttttctgagtgcatgtctgcatatatatcaggtggaaaccagtagagctcactaaaactaggatgtgggcctgcataagcccattcaaaacacaagctgcacctgatggggaataagtcaactttgactctcctaaatatagctctaatcatatttgtatcactcaaccgcaataccggatatctccaaccccaactatcgaaatcggtgcaacttgactttctcgttgattttaaaagtggtttttgctgacatgacacgttgacttggtccactatgctgacgtggcagcctagttacaaaaatacaagtgacacatgtaagtgaataagaaatagttttaaaaaaataactgtaggacccactggtcagcctccttcttccttctctaccttttcccctcaacaactccatgcccagtgtgttgctcatgtcgacagggctgacccggattgctgccttcctccctgttgacgtgcgggagagctatattttgagggacacaaaatggacttatgccatctgatggagacggagagaggcagagagctctctccacaggcccattcagcaccgtatcagatggaaggcccataatcctctgcagctcagttcagcccactagaggacttctgctcgagttctagtctttcatggatggggaaggtccactttagttctttcaattaagggtcgagaggaaagaaaaaaaaatggatggatgacattatgtagacgtacgatgctatttttcatatgtaacgtcctactatttttatctacatgtaaacaccatgtagacgtcacgtcagatgaagacaagtcaacatatcacgtgggtgccatatcaatcgacaccaccttaaacaactaaaccatcttgggacttatactggtttttaaagatgtgggttgcgttatattcagttttgagatactgagggatacgatctaaactttgacctatatttgagggatctaaagtaaactttttccttcatggttttttggctgtctcaggcccagaaacaaaaatggcccagctaccacctgagtttggaattcccgtgagttttgaggtactgtagcaggcaggctcgctctttgttcgtttggactttagaggaagcggcgaagtcaacgcgacgggttgacttggtcggatagatttcctgattttttttaaaaaaaaagaaagtaaaatacggtgaggcgcgcgcatggttgacgtgtcaccgtcggatcggccgtacaatcgatcgatgggtaaagtaaaaattggaacactagcgaattaaatttactgaaagtcaacggttgcaacaattgggccacacgatgtaggagccgagccgtacggcttggttcaggaatagatgatactccatttcaggttataaaacgtttttgactttaatcaaaattaaactattataaatttcattaattttgtagaaaatagtagtaatatttttaacccaagataaatatattacaaaaatttatttgttttgagttaaaaatattactacttttttctatagaattagttaaatttaaagtagtttgactttaaccaaagtcaaaacgtgttataacctgaaacggagggacgttggtgggctggtggctacttgtaattaagctggcggtcaatagtaagcaaatactagtaacatcgcaatatcttatttttaaaatgtatgacgctgttaacttctcagataatgtcttatcattcgttttattcgaaagtttagtatacatatgtaaaagtataagttaaaattacgttgaaatgaatttatggctacatcgtatacaaatatagaagtatttaatctgtgtctgaaatgattttctggctacattatgaaaagagaagattaagaaaatacgcaaaacgtaagacattagcatataattaattgagtattaactattttaaattttaaaaatagattaatatgattttttaagcaactttcctatagatttttttttcgcaaaaagcacaccgtttagtagtttgggaagcgtgcgcgtgagaaacgaggtgttttctctctcaatctcccggaaacgatatctcaaggtggactctttggataaaaaacctagttacagtcttacagatggctgcaacagctatgatgatatcctaaatgtgatcttttttttttagttgttgcattctcgatggttgtattttcgttggatcggttttgatggatatggtgatggtaagatattggtgaaagactctttgcagctaagtcatcctctgatattatcttctgctttggttcatcagtcatcgacggtgatgtgtgcacaattcggttgacactataatcagttaatcagtcacacatttcgaatattttgtttttggtttgagaatgacaatgactgcatatccaacttgtaagctattgtgaaaaaaaaagaagtgatcataatcacactaataaccataaagatgggcgaatccaacatgggtgttagagggattcaacttcgagccctccctaccccgttggatcctcatgaagaggagagggaagggggaagaaaagcagggagactgaaggagaaaatagaatatcggtattataagcatgttttatttctaatcaaaccgagattttataatttgcaaacattcattctacccggccctttttttaaagataaccttatagctaacctattatacatgttagctttaacattgacttatagtcagaagtggatcttactattaaacttgctcagctagctattgtaagcaacatctcttagagcaagtataatagagggatgtaagaaggctgaatgctaaggtggatgagagaggagaggagagagatgagaaatgagctgtaagcttacagtcggttcaaatctatgaaaccgataggtggaccgtatattatagtgaagagctaaccaccatatgagtaagctgagagatatgccataaagatctatgtagtcaataactgtctgttttattagtcttgctcttagttctatctcttgttgacacgtacatttttacagtcatcagccgactatactattaaacttgttcattagtacccgtccgcaaaaaaaaacaaatcctagctacgaacctggatatatgcgtgtctaggttcgtagctagaatttgttttttttggatggagtagtatgttatacttttggataaaagtggtacgcttttcaaatttctaaacagtgtgtttcgtgcgaaaactttctatataaaagttattataaaatataagattaatctattttttaagttcataataattaaaacacaattaatcacacgttattaccaccttattttacgtgaaacacttagggtgggttcggcaccctatttttccaacccctctccatcattttccgcgtgcacgtttttcaaactgctaaacggtgtgtattttacaaaatgtttctatacaaaagttgcttaaaaatcaaattaatccatttttgaaaaaaatggctaatacttaattagtcacgcgcagggtttaacttaccgccggtaaccgcgcggttaccgcggttaccgggcttaccgcaggggtacggtaatataaataccgcggtaacctccttaaatacaaataaatttaaaaaataatttgaatttttgataaattttgcacggttttgtacggtttttcacggttaccgcggttaccgcgcggtaaccgtgcttaccgccggggcgcggtaaccccggccccggcggtaaggtaaaccctggtcacgcgctaatggaccgttctgttttgcgtgattagtgttctgaatggcaacagcgaacaccgaacaaactcttaatctctatcttcatctccattttcattttcatgagattcaaataccacctaacctagctgaaaggatgggcgggcgtgtgggagcagtcgcagaggtcaaagtgaccaggaaaacccaaattaaggaacattggtgtacatacatgcagtgtccacggaacgggtctacgagggcggccacaaattaataaatttgtccaatccttgcacggatcgatgcaccactnnnnnnnnnnnnnnnnnnnnnatcggttgagccgcgggggcagtggactatggacctcttcttctttttattctttgttttcatggcttagaagacgtagcttaatcatatatattaatatataaaattcatctcacttaatgtagttaataatactattttttttcttatctcattaagccatatcattacaattatcactagccctggatgatcgatctatggtctaaattatctctcatttttcttctcttgtgaagtcatatcactttattttttttgatggttaatctatattatctccattattttccttctctatttgaaccacatcaccttatactttctttccaatgatcaatctatttactatttaaattgttataaaccacataattttaattgtctacagttttatttcaataaccgatcaaatacaaaaattatactaagtatgtaaggttacgtcgtctagatatcttacatgttaattatactatcatcacataaaaccccatggcaacgcgtgggatttcatctagttaaccaatactacctccatcccagaaagatcgtggttttgtatcgtttatcgccaatgtttgaccgtccatcttattttaaaaaaattatgattagtatttctgttgttattagatgataaaacataaataatactttatgtgtgactattttcttaaaaaaatttctttaaaaaattttcaaataagataaacggggatacggaaacttacaactgtactaggacgaaggatgaaggtagtaagacactatcatgtttagaggaggtttaagtattgtgttgtccagctgtgccgattggcattatgaaccgtctaacactgtactccctcggtccaataaaaaaccaacctagtatcagacgtgatactccctctatttttaaatatttgacgccgttgactttttaaaatatgtttgaccgttcgtcctattcaaaaaatttaattaattattaattcttttcctatcatttgattcattgttaaatatacttacatttatacttatagttttacatatttcataaaagtttttgaataagacgaacagtcaaatatatgctaaaaagtcaatggtgtcaaatatttagaaacggagggagtatattatagtactacgaatctagacatagtactataatatatcatatctggtactagatttttttttatgagacggatggagtatgattcaagagggtgcatcggcaaaaattgcttttgtatatatagtgccttttcattatgtgctaataattttatatatttggcatgtaatttttttttctgcgcgcctatcactgtcctcggtgcgtgcgtttgctgttctaatttctttccccactgaagattgacgacgacaccggtctctcgatcgatcaaaacttttacttttgacacggtaaatacaccggtcgtcgttcttccaacacgcgtgtcctccaatccacggcgtttgttcttcacatcagtctcgatcggttcattcattttcattactaattcctcgatctgttcccatgtcaacgatcgattcattcgagcgcgagaccgatcgagaaaacccggaccgtccgatcgatcgggtcactactagactggattttgttccatggcgtttttatgtcgtttggacgacgtcgtcaaaaccaaatcttgaccgtctagctgctgcgaccaaatcgcctactctctatgcataagtactcaatgcgttccattaaaaaaccaaattacctactctctgcttaatgggggattgtctgcagtactgcatcatactgttgatacagtagcaatgaccgacgtgtgaaccggacccacatgtcagcttctgctactgcatcagcagtattgtagaggatttgcatccctctctgctacaaccaaactatgttggttttctactctctgctgtgaccgaactatgttggttttttataagatggagggagtacgtagtagcagcagtcattctattttcaaaatgatctatcttgatcgccactagttaggctgagttcgttgcttggtgttggaaactcgtcccttcgcgcacataaaactgaagaactcactagtgcatgattaagtattagctaattctttttaaaagaataaatatgatttttaaagcaacttttgtatatattttttttgaaaaaacatattgtttagtagtttgaaaagcgcgcacgtgaaaaatgaaggagtcgagtgaaaaactttaacaaaagaacttagccttattactagtaatatgctctatccgttctataatataatcattattaaattcaggttgaatagaaacactattatgctcctcatgataattcaggcaagttgcaatctctgaattggatctagctgatcagtccaaacagcaattcattcatgatttcatccattcattgaactagaattttactgttgagctacgtgctcccaatccatattaattcattcgttcagtcaagccgcatatatgaacctacgtgtgtactgtggcagaaattctagtccaaacactcgcacgaatttaacgaaattctgctgctgccaatctctgaatcattctacaaccgacacctctgaaagtctgaactctgttcaaacctcaaatcacgcacacgtacacactagtgtaccgaagtatatccatcaatttccagggaaaaaaaacagaggaaatgtcagatgtattatatgaacaagtgaaaagaaaaacaaaggaataaaattcctgtatgcatgatgagtccctgtttggctctaacaaaacaactgcaggccagtaggtttgcaaagaaattaaagggcactgaacctgcaatacaacagctagtaaccaggagagaaaattacgtatatatataccctcaaaattaaatcaatcactttttaagtattaattattataaattaaaaaggaatttattttattttaaaaaatcttacacacacagttgtgctatacatttgtcgacaaatttttccttaaaaatttgggagatgtaaatatagtgtgatcgtaataattacatcgtaatttgcatgtaactacagtacaacttgaatgtaacttttaaaaatcttgtgataacatgctattttcatgaagcggaggtcacgagaccaaatcccctcacttacgtgtgtgttgtgactttttccttcccataaagcaaatctaatgattttaaaattacacgaaagttacatatcatgatatcaattaggagtacgcatctcatttagcagttaggaagcatatccatataatacaagagagaacagctaacccaaaactctaaaaaaaactcaggctaattaacacaaacaaattaaaaacattgtgtgaaggagcagagcagagcagagaaggctagagtgtggcgtagaggatgatgaattttgatgatgcgatgaattttgtaagcatatgcagatacagtggagagaagaaaccaagtgagattaattgagatcgatgaggtgtgcctcctccttgagatgcgaccacaccagctgttcacagcctgtggaacgcgtcgatcagcagaccaaatcgtgtattttatcatgctgcctcgtgtgccacaatattattgttaacgtaactgctctattatattagtatactattagttaattaaccatggatgacactctgctagattatgtttatttcttcagtgtctcaagaaaaagattgtgtactacgtatgtgtatgtttcaaacttacaagtaggaagttttgaattggttggggttgggcaaagttgttgtcttagctctgtgtttgtagatattagctaattgctctcatgtcactgaaaaatcgcaagttggattttttgttaaaaaaatagtaaccgtggcagcggtggaatgaaaggaaataaaagcaattaactatttcttttccttcatggcaggtcgctagttgccctcaaacatcgatgaaaataacttagtggattttagcattagtggtttccaaaaggaaaaaaagattatatatgagtagtacaaaatcacatttgctaaaatataatacccttttttaataatgggtagatcagcctttgcttccgcaaaagttacaaccaattattacagcgattatagcaactaagaaccgacaatatcaaatcagaaacaacaacatataaaaaagaaattcatggatgaaatataataccatttgtgctaaaataaccgtctttcttggttataaactgtgaacttgagcaatggtttgagagtaaatcatccgtaattctattggtcagagaagtagaccacagtcgatttaatttggaacagttcagtcaaacatctaccaaaaaatcttttaactagacaaaagcgttaagcgtatcacacaatattagttaaataaacttcctttattaaaaccatcctaatccctggcatttgacacagccaaacagtagtttgatactgatacgattcacacatcaattttccaattttgcgctgctctttcctcacatattgatcacatttgccactttttgaaaaatggaattaatcaacgtaaaattccaattaattaactaagcttcctttaataattaattccctcctaaaccctagcattaatttgacacagccaaacagttcatactaattcgattcacacaccaatttttcaaaaaaaaaaatcttagctctttccacacatcatatttatttgtctcttttttgaaaatggaactgatcaacctaaattgtaattaattaactgattaattaaactgcatgaattttgcacttttgacctagctagctagcagcctagctaggaaatcaaatcaaaccaacaaataaaactagttgatggcgatggaatcatgcaaggagatattgaatttgaaccccctgatgaaaaagtcaatgccatcagcttcttcctcttcttcaattcctccactcgttttcagatcattttccatggcgccatggcgcctatataagcacccacccccctctctccccctaaccctaaaaacatacaccatccatttttccaagcttcattccaagccactacactagcacacactacatacaatcttcttcttcttcttcttcttgagttcttggaggtcgaggggtgggtcatcaatggcggaggtggaggtgagggtgaggcaggagcaggtggcggagttcagggagacgttcgcgttcttcgacaaggacggggacgggtgcatcacgctggaggagctggacacggtggtgcggtcgctggggcagacgccgacgagggaggagctcgccgagatgatccgcgacgtcgacgtcgacggcaacggcaccatcgagttcgccgagttcctcgccctcatggcccgcaaggcctcgcgcggcggcgagaacggcggaggaggagacgactccggcgacgccgccgacgaggagctccgggaggcgttcaaggtgttcgacaaggaccaggacgggctcatctccgccgccgagctccgccacgtgatgatcagcctcggcgagaagctcaccgacgaggaggtggagcagatgatccgggaggccgacctcgacggcgacggccaggtcaacttcgacgagttcgtcaggatgatgatgctctccgaccaataattaatctcctctctactatatatccaaaatcaatatatctctctccatttcattttgttttttttcgatctcttctttctttctttcttcccaatttgattagttacctaactaattaaggtagctagctatagctactgtcatttaatttggccttggttaattagttccttgattaatgtatttgtttgtatgaccaaatcatacatacatgtatgtccattaatttttgcatgcaaatggaagtatatacatatatctccaaatatatgtcaataatttttttgttgcaagagagaaattaagaagcaatcttttatctctctttttgtttcttttggaaaatgaaaaagaaaatgagagaggaaggaaattaaattgaagcaggggtaggtcaacttgagctagctagcactagctgtccctgaccattaattttccattttttaaaagtcttttagtgtactttttttttgttggtgttgacaagaaacaatttggcaattaatgcctgaatctttctagagtatttgacctggctattttgttttgttttgcttttgttcatgtcctcttttttggacagtgactttggccgtgttggctagtagtagctttcatacgagtacttttctataaaaaaaaacagagaaagagagagagagagagagagagaaaaagagggtcggtgaggcatatagaatcggttgtgcgttcaacggttaaatgttgtgaaaccatacaacacgcggttgtgcagcaccgtgcaataaaccaaagataaaaggaaaagaaaaaggaatgtttttttttagaaaagcaaaagggaaaaagatcaaaggagattttgttgagggactctatatgatcttccgttaacacctttagaaatactgataggatcatgtatcaggaatcataattagaacacgcttgttaaccatgaatggatccaaccaaacgtctttgaagtagaaggatgcgcgtgaggccaagtttagttccaaacttttaatttttccatcacatcaaaactttcctacacatataaacttccaacttttcggtcacatcgtttcaatttcaaccaaaccttcaattttgatgtgaactaaacacaccctaagttggctttctcacgcttgcttcctcgttggcgtcctactgctcatatgtgttaccatgagtttatatctaatattgatggatttgtgcaaattcgatgcaaaaattctaatgcctcaacagaacaggttatccagtagtggagccaagttctgtaaacagagatgctgctatcctttcaacatatatttaatttgaatttaaaagttcatgaaatttcgactgtttaatttaggtttctagctcgactacttatggccatatgtggccaaattaacttcggtacaacctgaggtagactcatttttatgtttgtttgatcggattgctgagcttgcaaacaaaaaaaaagttaaaaaaaatacttgggcgacatttggacggtgcatacatacagcagccggcctgtctgactgactgtctgtcacgcgcattgctgtgtacggccgtacatacgtatatatatacatacacatttaggccatgtagctcttccaaacagttcagctttttatctagattttgagaagctgtagttgtagaatctgaatttagaaaataaactagaagccagaagttgggtttttcagcttttccagattctcagaagctagctaccaattagctacttctcggaatgttaagctccctacataaatgtactgtacaatccctttttgtctgctccattaactatgcaccatccgatacaaaatcaatggccgtgatggacgtacatgtatatatagtgtcgtgtactagtgtggatcaacaccgaacccgtgatggatgtacgtcgtattgaagcagtcgccggtcggtgatgtgtactgcaccgtctgcacgtactgcactgcatgtaggagtaaatcgcaaaggttgacgcatatggcgcaggcggctgagtctctcttttttttttccatcctctatttgatcgtaaagttgttcttataagaggaaatagttcgaataaacctctaaattataaaaccagatatttaacatttcaaatcaccccctctcccctcaactaaaaatccaccccttatagaagtattgtttggagcgattttgttgttgaccggctgacgtagaattccaacatgacaaaaatagaaaagatagacctatcttctagaacccattacatcgtcctactatttcctagtgggggagatattgcaacgccgggaaactcgtgtcgatgaaattaaggagcgatgtcgagctcactttttcccccattgggaacctcgtggatttgcgccgatctcgtcaccaaagctcattgtgcaagtgtgaagaaggcgtgggacggatggcgtgcaacgaccaagcagttttttcgggtagtgcgacgaaggttgggcggagatggcagctaccggaggaggaactcgagctcagggcagccatggaggtgggtactaaaagaaagggagaagggggcaccattgtctacgcgcgtggtcaatctccttcatgttgccacctagatctagaaagaggaagagccgagggaatcaagaagatggtcgtggcacgaagtagagggagccacatgaatgaagaggagcagatgaagcaaaagccacagttgccttcctctctcccctcgacgttgcgtcgggccccgttcgcgcatgaggacgccatctgccatgtatctatagtggctagttgcatcgtcagggttttcatcatcggccttgctgagaataagtcgcttcgtggatctacatcacttctccttccggcggcttcctccaacctccgccatgctgtatgtacttacaacatatactatccaccgctaataagacatcgctgtaagatggcacaccaccaacttgatccctttctctcttaagcataatatagatatgaagatagaggatgtcaggtggccccactaccataccatttagtatgaatgaaattcagatttttatcgtcatgttggatagcatgtagggtcaaaaccgtttcgtatttttttttcgtggtcaaaaccaccttgtattaaaatagggtcaaaacccgtcgtgcctgattttcttataagggagtatcggagtacaaatcttttttttctttttaaaaaacactctttatatatattgtgtttttctttaaaaaatcgcaccgttcaaaaaaaaacttaggaagcgtgtttacgataacagaaaatgaacagcaaagcgttaattaactaggaacccagaaaattaatgaactgggccttattagttaactacgcgagatggttttcaaagcaaattaagcgtgtacgcaagcacatgcgagtacgtacgtacaggtacaggtacagctatactattgatgtatgtatggacggagctagagcgaaatagaggatggtgtcacttgcttaatttactttattttagatcgagtttaagctgatacgggtgcccaagtttgtattgagagggtgtatacatggtgaaaatatatgaggtatagctaaaaaattttcttgatcggatacctggacaccccctaacatatactagctccgcccctggatgtactcatgtacgtttacatatgtgggggtacagcagtacagtacagtataggagtggatgggagctggggtattgaatgaatgaattgatcatcggttggtcaaaatcaaagcatgggctaagctgtgtagatagcccggcgccggccttcattgaagcctatctctgcatatctttggattttcattcatttgcagaggcccaccacccttcaaaccatccacacacattcttcccctttcttctttctctaataattctttgtgctctagccatgacttggacaacaacaaatttatgtgcatactgaataatgctacagaaactaatactccctccgttctaaaatataaaaaattttagtaggatgggacacatcctaataatattacgattctagacagagagcatgtatccaaccaaagcttcatatctaaatatatttatagtactgggatatgttccatccaactaaaatttcttatattttgggacggaacatatatttagacaagtcagatatgtgtacatctcagcgtgacacgtacgtatataggttgtccaggccggccacatgtagctagacataatttggtttgccagcttgatatatacttttatgtgttttgtgggggattatacatatgttgatgagattaattgctgaaggagttggagcctggaggtttctgcacttgaatacttgatcagttcattgtctgaagaatgcatgcatgaacattcagtgtccagcttgggctgcaagctggaattaacagcttgcagcttgtttgatccagctgtagtacatataataatttgtactacagcatatatatccatgtattaattcaaaatgatttactactactttggagaaaacagctagctatatgtatacaaacacatgcacacactctgatgggatggtattgctgggattaaatggaataataattaaggagccaactctgttgagtccaaatgcatgcatgagctagccggacaaccactcaaccagcactaagctcgttctatctgcacttttcttttatttctagaataagttcactttacgttctttatcttagacattgaatttgaattacctccttaaatcgcaatactatacatatataacacatccctcaacttatgaaaccgatgtacccaagatcctagacaatgtaatgcccgattttagctaaccaaacgagtgggacctacgtgggcccaacatgttagtggcccactcttcttccttctctccccctcgtccctctcttacccatccctcttcaggccaggaggcaggtggcgagcggcggggagaagggtgaccgccggcaggaggcgggtacgtggtggggagacgcaaacacgggaacctaaccgatggaggaagaagagttggcaactagcatgtgagatccacgtggggtcccactcatcacatcagctaaaatcgtgtattataatatcgtaggacctcgggtacaccggttttgtaagttgagaaatgtgttatatatgtttcggttcaagaacgtaactcaaacttgacatcaaaatgacagacctaaagtgaacttattcctttattattccctctcgagagaaggcccgataggcggcccatcaagaggacaaactaattaaacctaggattactactaccgtaccttattaactactaacaataaccactatataatcagctgtaaaaattgtacccgtacttaccaaaatataacaattttacaattcaaaagttgttctaaatataacaaccttttacctataaagggtgtgtttagttgacaccaaaattaaaaatttgattgaaattggaaacagaaaagttgaaagtttacgtgtgcaggaaagttttaatatgatgaaaaagttagaagtttgaagaaaaaatttagaactaaactcggccaaaaggtgacttttgttcccaaagtaatcatactatacccacagtatccattttgtttttattatgtactcctatttaactagtctcaactcccatctcatatctcacctacctcaaagacaatgcatttcttcttcttattgctcgtgacaaaagctaatattctcatattttcacttacggttatgcttattaactaaaatttaaattttcaaccttaattagtttggagctgattttggagttttcatcgaagtttatttttcagcatttactagattactattatatatatatatatatatatatatatatatatatataaaagttttatttaaaaattatttttcatttacaaatataccgtttggcttattctacaaataagcaaaatgatgggggccttaaaacttgaacagagggataggagtagtcgttctttcttttcattttgcgaggatgcaaaatgtctctctttaatttattacagtagaagaatccctgcggtttggctagctagttcatggcagcaagcagctagatttaatggcagattgcagctagctactcgtagctggtatatgcagtactccctctgtcaaaaaaaaaaaaaaaagacaaaccctggatttccgtgtccaacgtttaaccgtctgtcttatttgaaaaaattataaaaaaaataaaaatacaagttacgcataaagtattaatcatgttttatcatccaacaacaatgaaattactaattataaaaaaaatttatataaaacggacagataaacgttggacacggaaacccaagatttgactttttttaagacggagggagtacagtacacagtacagtccagctgcatgccgacctacctaagctagctataccgatcaccatttaggttttgtttagattcaaactttggatacaaacttctaacttttttcattacatcaacctgtcatacacacataacttttcagtcacatcgtactaatttcaacccaaattttcaactttggaaggaactaaacacagccttagcagcagtaatattgtacatatacggcagacacactgcatcctgacctgcagtatactgtccctgcataaacatggaccttgagagtttttatatatatatataggccagtacgtatatacagataatacaatgcctccattcttcttcttcttcttcttcttcttattcttcctgctgttgatctagctactccttttcttgagtctgaagacgactgatctggacctgattcggccatgttcttttcagttcatgtagttatgaattagtccgtaatgtaagaataagaggctgaagtcgaggatctacttctaagaaaaaatatttacgtttcaattttcttgtaaataggttgtcagcgctagtgttatttaacgtcgagacattgaacctcaacaccaataacttggcaatgagaaaaaaaagatcaattcctaaaataattttgtttcaaagatctatttgtaaagcaagttatcaaaaaagtcaaaatgtagaaattgatcgaccgaagtctccgatagttgggacaagacccggcctgatccagtgtggaatttataattccgctgtgagtaaattttaggaatgcacattcacctcttgtatgacttcaaaaccttttcaaatgatatcaaagcctaatataatgtataatgtataatgttcaatttatccatatcaacaattatccatgttatatccaatcatgtatataaagaacaatgatattctgttccaaaatacattaacttttaggggccctttgatttggaggaaaaacataggaattttagaggattttaatcctataggaaaatttcctatgaagccttttgaaacaaaggattgaatcctatccaatcctttgaaattcctatggaatggataatcctatagagattttggagaaaatttagcaagagcttcaacctcttgctaactttcctttgagtttatctctctcatccaattcctgtgtttttttgtgtggttcaatcaaacggtcattcctgtatttttcctgtgttttgcaatcctctgttttatacttacattcctatcaaaattctacgtttttcctattcctacgttttctcaatcctgcgattcaaaggggcccttagctataaatctgaatgaggacgtaggtagtagtatagcttataccgatccagcgtattccccccgtcccataaaaaaccaacctagtacgaatctgatcatagtacaaaaatatatcctagctagatttgttttttatgggatgaagagagttcatgtaagcatatgttgcttcaattctttcatatgtttcttttcgttttgattccaccacttgttgaacacgaagggtgtgtttagttcacaccaaagtttgaagtttggttgaaattggaacgatgtgacggaaaagttagaagtttatgtgtataggaaagttttgatgtgataaaaaagttgaaagttcgaagtaatagtttggaactaaacaaggccgaaattgaatactctaagctgcagtaagcaaatgcaaatgcatctagcttggtgaaggccgagtttactctcaaattttttattcaatcttccaacattttcattacatcaaaactttcctacatatacaaactttcaacttttctatcccatcgttccaatttcaaccaaacttctcattttgacctgaactaaacacacccgaactacaagtagctgagttagctatacaagtggatcagtagctgcatgtaagatcgatatatggatgacaagaataggtctagctgatatgtactgtaagagagataggcctgcatcaggcggcgacaaggcttttgtttgtcatgcgggtaaagcactgcacggctaccgaactagccacactagctactctaccaagtactactagtactgtatttaagtatatacacacatacaatttgtatttgtatacatatactatactcttctcaatgccaatgcaaaattaatactcctaccatatatatgcaatgcatatgcaagccggaccacacactaatcgatcagaactactgttttctcactccagatctctatatacattcagttgtggagcaagcgatggcgatgccctggagaccgaacgatgaagagcgttttttttttcttgccagcaactaatttttatgactattttggtgatcgagagtggcggcaccatgccaccggcatccgataaagcccgcgattgaccaccggctagcccgagagtttgctctaccaatcccatacaattcataggttttcagccgtgttcgtctaaaccgtagtctatttttcgcgaacgcgtaaaagacctaaaccatagtctaaaaggtctagatcgtgtctagatgttagacgattgtgtctgtaaggtttagggtataaattgtgaatcaaaccgtttggtcatctaatttatgggttttcgatcggtttctgtaaaaaaaacgtgaaccctaaaacagttttcttaaccgaaaccttgttaatttgaacttattggttgccaaagttaaaactatactggtgaacggtgtcaattaaaaatagaaaaatgaatgagaattttgctatagctataggtatggatagataaagatagttttcctccggctataggtgctccttttcagtagaaagggcagtagttctaactgccaaaagccttatggcaatgtgcatggtgagtagtaaatggcaccaaggagtgaaaaaataaccttaagtagacctagctatctaccactacctacacatatatagcccctgctaggatctagagatgggaccaccacttgtgtagatcatagagcaggagctagtagtgacagagatatatagaggggtcctgcatgcctgaacaagtgaaggtggttatattgctacaaatatgtgtgcatggtctgtacctgattggaaagcaaaggatgcatgctatgctagggttttgcatttcttttgttctactccctccgttgagatttggcttgcaacgtttgaccactcatcttattcaaattacttttataaatataaaaaacgaaaagttgtgcttaaagtactgtaaataataaagtaagtcacaaataaaataaataataattttaaatttttttgaataagacgagtggtcaaatgttgcaagcaaaaactcaaaatcccttatattatgggacggagagagtacaatttaatgatttgtttcttgagtattcttcttcttctccccttggcctgtgggatgtgtacatgtatgtactctctctccgtcctaagagcaggtaagccagctgtaaacatattttaagaagataaatcaggagagagaagagcagcgggctacatatttgtagccagctgtagcacggactctaagacgcagtgtgtctatgacatgtgggactaggtattaatagtgtagtatgtaactattgtatgaatgagctattaaattggctatagatgaattgaagctagtagttgactatactattgaacttgctctaaaataaaccaaactcgtatcaaaatgtaatatgtttagtttcgttgaattagaatatgttacatcgtaatacgatattggtttattttgaaatagtgtgagtatatatggaattatgtgctccattttcaggaggagaatctttgccagttatgaacaggttgctcaaatcttggcattgatgagacctttcatctatgtgcatatcactagccagccagctactacctctcatcagcttttagttacagctactagtacctggctagctatctcaaacagcttgtgttactcctagctaggagtaattagcaatgctctaatcaatttgcattcaccatattttacataaatgtacctttaagcaatgactgataaaaaagtatagaagtaaactaatttatgatcaaaatttcataaatgtacctttaagccacctaaaataatttatgatcaatttttttatgtttgtgtttttagtagtttaaaagttagggttgaaaaagagactataatgaaaaaacaaaattcactctaaaataagtttcgtcttttacattttagcggcgtc

SEQ ID NO: 22678 - DNA, 9443 bp, Oryza sativa
accctttgtaccagaatcatcatacgaaactaatcgctgaagaagtgagaaactaattgtcagataggattgaaaaaaaaatctaaattttggacacaggaaaggttcgtcaacaacaaaaaagaaacatgtcacatccatactatttggtgcaaagaaaaaagaaagttactagcaataagcaggataaaagttatgatcaaacaatgcaacactgaaagatggcaagcactggtataattcagtcagaaaaacaatataaggtggattaaaactgatcaggtagaacagtaaagggatgaacaatacttggtggatagcaaaatcattgtacttcctaagttcttgggttgctctttccaatgaacattcaaaaccgaatgcacctttagggtacagtaactttgcaattcgatcaacatctttgtcactgtaaatgcgccttataagcaatggatggttcgcaatctgtggagcaatagaaaagaacaacttttgagaacaggtataataaacattttcctgaatttaaaagagtgaattgcgctttgggccacattttgttgccaaagtttcactttggaccagcctttgactgatattatcactttggactaggtaactttacacttcttgcactttggaccaccccaactttcttctctagctagtctaaccactcctctggaaaaaatatggcttgcgcagttcattgttgtgctagagtcgatgtgctcaagaaagtggtttggggtggtccaaagtgcaacaaatgtgaagttacctggtccaaggtgaaaatatcagtcaaagggtggtcaaaagtgaaactttggcaataaaatgtggcccagagtgcaattcatttacatgtgtgatatgctgctgaccttacggaactgcatgaaatagtttgatatttgtcgttttggaatcaacccaacaacattattagaaaaattggatgtggattttgcgctacgagcttgacaagcaccacggtattcatcaatggcatagttataagcttgaaactgctctgagtccattgttacgaaattaacctgtgacacaagatcactgtaaagttgaaccatgacaacgaaaaccatatgttgatggttaggtcgacgtacatgttgtatctttggaacaagttgctgcataacatctgatttcaaacgtctaagaataaatggccccaaaatggactttatacgtgaaattagctcatgatcttctgcatttaacagcttcttcagatcaatatctccagtggcaaatatatcaggcatcataaactccaacaatgaccatagctcctgtaaatcagttgaaaacaagtggtactttaagatgaaatgaactgaacttaagtagttgaagcgcatactccaaagaactggagacagaaagctatccgaaaactgttgctatttatttcatggctttccatgtaagtagtaattaaaaactgatgaacagcaaacagcattgagaacctgacatgcaatcaccatatccaaaagaactcaatatcggtttcaagtaataaggctaaggcatacaaggtcttggtaaagccagaagcttaagtggtcgttctaccaaaaacaagtgttagttatagatctttggttgacatgctgattatgtgcttcagccctttgctaacatgtggactctggttatgcaggattattcatgtgcgaaacctaaccaacatactcctgatttttacagacagtagtatgtcttaaattttcaaataggtggatggtatataagtattgcaaagaaccacagaacgacacatgcagcaggactaacttaaaccaaccacccatcaagttatcatcaaaacttacatgcaaatcattttggaggggagttcctgtcagcattagccgttggcgggcatgttgtgcgacagccataaggtttctccatcggaagctacccttatctttcagtacatgtgcttcatccatcaacacacaactccatcgccatcttttgagtgctttgcgatcatccttttgctgagcactacattacagataaaaaggaacttaaacttatacaaacatgaactatcatcggctctctgaaaactttggtgctaaacacaaaataaataaccacaaacctccgccgctcaaagagagagtaacaaacaaggaggacattaaatggaggcggataaccagctttgcccaatgaactcaactcctttgagtaggcagtccttccagcaccatgaaacatgatgattgaaaatgaaggacaccattttttaagttccctttcccaattttccaacacagaagctgggcaaactattagatgtggacctgggtcattatatagatgccgcaacagagtaagataggtcacggcctgtcatcacaagagcaaagatcaaacagcaatagcatgagttgccactgcaagtataggatcaaacaactcagcttcatctaaaataagccatatgaggttaaattctgacaatattttatattgaaccaaaagaaattcagaaaaatctattttgattaaaaaatagtgcataggtccccataataaaaaagataactccccatttgaactagcctagcttatacatcctgataagatgtcatttcactatacttatttatttatttattagttccctttccaccacatactgcaagatatcttacctgaactgtcttaccaagacccatttcatcagccaaaattgctgcacgaaaataacatataggttaatatgaccagtttagattctttggcgtgcagaaacaataaaacataataagaaaaagcaactagcatggttattaactcaatattacttaaacaacaaaacaatgattttgcagaaaaaaaatatttaacattcaactttaatcccttggtacattatagaataagcttttcatgggaaatacatgtggatctggctcctgtatactatggatctcctggtagttaatcacatgaatacaggaatgctgtttttttttctgttgacctaccaattttcattgttccatattcagagataccctaccattatttgggtctgcttgtcataaaattacaagaaaatcaaaggtgtctagaaatgtgttctccatcgagttcattttcattgattgaagattgattgcaatttcacataacggaaatctaaacagtataaaggaataacaaatagcagcatgtttccgaagacaaaaatggcagaaataacaggacgcttgcaagtaaatttcatgctatcatgctaaagggtggagtgaagtgaattactgaactgcatagatcaattttatttcatcgtgggtgcacttaaaaaaatctcagtcatatgcatctttactgacaatatcatctaaggcaacataaatgatcaaatgcaacagtttaaaaaacacctccaccgatatttttccggtgcaagagaagaagaaaattgacccccacaagctggtagggcttcagaataggctcaaactccgactcctcgcttgtgcatgcagcatccacatcatcctgctccgacacatccattgaatcaaaactccacaccttcaagtagactgcataaaaacagataagtacatacctgggtaacaattcggacactggaatcatctatctcagcataactctcacaattccttgtcgatgagccatacagctcctgtcgcaaatcagccgaaatgcgcgcgcacttgcgcaatgccttacccactacatccccctcctccacctccaccttcgtctcaccatagtccccatcttcatcgtcctcattctccaactccgaccagttcacaccatcatcctcctctgcttctaccccatccacctcagacgcacccacatccccgtcgctgtcatcatcgtccttaatcacgaaacggcgagcggtggctcgacgcggcctcgttggccttgggtctggatggtcaaaatcatcatcagcgagctctaaatcgtcgtcttcctccgagaggtcggcgacggcggttgccaagcgccgaccagcggtacggcgcggacgcgaggtcctcgaagaagggatgtcgaaatcatcgtcttcgagatcaaagccgtcgtcgtcgtcatcggaaaccgacaccgcggcggcggccttggcgggtttagggttgtagcggaaggactcgcggggcggaagggcccgcccaggggggctgtgctgccgctgcggacgattgagcacgcgggtgctcttcccggcgcggcgcaaccgctcctcctcaccaagttcgaaatcgtcgtcgtcgtcggagaggacgacggtggcggtggcggcggcggcggcggaggaggaggaaggcctggggttgtaacggaaggagtcgatgggcgggggaggctgcgagtccggctgggcgcctcggcttggtcgcttgaggacgcgcgaaggcttgaagctgtggttcgaccactcgtcgtcgtcgatctcctcgtagcctcgccgcatcggggcggcggctgcttctgcggcggctggtgggctagggttttggaggaggcggagccaagggcggaggcgaggaggcggtggtcggggagcgcgagaatttggggggagaaggcgaggggacggaaattttgggcggcctccgaggagtgggagaactggagcgccgccgcgaagagaccgccaacagatgcttttccggaagaagggtgattcgttataaactttcccttaaaaatgggggcgtatgattttctaaaggtttttttgaatcgttttcaaaataggggattatggggcggaaggcccactcgtcagtgtgttgttttggacattgtcctataatattcaaaatacactccattttgaacaatattttttaaaaaggaaatactatgcaactcctgtaacaagtgtcgcatgcttccacacaagtctcccccacgttgcactctctttctgagcctctcacacaccacacatgccacatgtgccaagacacgagaagtcaatataaggtgttatgtgtgtcgattttgatcatatttgtgctcatgtattctaagtgggtaatattgtgtgacggttatctataacatgtatgaattctatgttgcatatctatcaggcatgtcatgtactcataccatgtggaagaatatgagattttaagcctcgatcaaacatcgttgatacacgtagcataaactatagacttacttgtatttaagatggtgctgctaaaatatttgatgatacttattgttgatttttcgcgtcaacacttatatataccatcatgatacttccaattagtaccaccgtaaaactttatgatacttattattgatatttcgcgtcaacactttatgataccctgtaattagtacctccgtaaaacttagcgacgacatgatactcatgacatttctaggttaggaccgttagaaaaaaaaacgtgaaactcacaagctgctagagctcaactcgtcacaggctcaactagtcaaagatctaaatcgagtcgtttgagcttatctcaaagcttgcgagctctaccaacccgagcttaagctatttaacggaggcttgaaattttcgctagcttactctcaatctgcccacccaaattccactggcactccaaatttaatttccaccatatgcctatgattccacagacccagcaacttctaaatttccttccacatcccgtattctcatcgtatcaaaaacctagctcgatagctctcgtcctaaacaatgttggtatccaagattcacaattccaggtttctcctctgctttagatctagttgttcttcgtctcctccatgtgatctacatgaagaccatcatagaagattgcagtagtctatgacattgcttttggacggtacatatttaggaatttccagtaactatagcttttgttcttagcagcctgtgactacttcttatcgttaatttttgtcctatgtacttctgttaagtcaagggcacatggtactgtaacgttatttatccactcttgttatgaaagtgaaatcctgacagaagtcactgttgcaaaataaagtttacactattcaaagaaaatagtgttaacaagctttatacgaaacaaacttgagtcaagtcgattcttgatcgggttcgaacctatcctatttttgagtttgaaggtcattctgagctcggctcaagtctacaccaaacttaagttcagctcattgacaatttgacatgccatcatcttaaggtatcataaaattatgatcggtgacatgccatctatgccagcatcagtgattttttataagtatcatcggtgatatgaaataccgttaatatctatagatactacttcctttatcccaaaataaatatatacttttaaattagagaagtacacttcttttgagaacaaaagaagaactgtactccactaacgataagtttccttcctacaaggaaaatcaacattaattcatcgagaaaatctattctataccactgagtttgttcgagttcaatgatttaccatcgacattgtctccttctataatataccgataactttattaattgttctacaatacgccaatgggctgggctttcttttcaaaaatacccaaaatacccttagagacatacaagattaacaattgatttatctcattagaagtttcaaaaaataataaaaaattttatgtggcctcgttacacaacatggaagtttgtgtacatgtttttaagttttttctggtatatttagattttaaaaaaaaataatatttttatgtggtatatgagagaaaatttgtttatacgagagataataacgcaaaaatatcttatgtagtgtatgaaagatgatttatattaaaaacatcaataaaatgtattttgtatagcatataacaaatgagttatatattgtttaaaaaaattataaatgtaaaaaacttgaaacttctatacaaacttccatgttgtgtaagtaggccatataatttttttatattttttttgaaacttctaataggataaatcaattggtaaccttgtatgtccataaaggtattttgggtatttttgaaaatagtgtccaacccaatgacgtattatagaataattgataaagtcagtagtatattatagaaggagacaatattaatgacaaattattaaacttgaacaaaatcagtggtacaaaatagattctctctaattcatccgatcctgatccaacaaccgaggttcatcagatcaactcgccgctcgcagccgtcccagccagacccaaaccgacccgagtccgatttcagccttcaggtcaggccgcaccatataagggtctcagcgccggccgcgcgccgcaccggcatctcgttcccccaccccccacccatgtcggacgcctacaagaaagcgaagcccggccgcctcgtcttcaagggcggcgaggccgcctccctccacaagccgccgaagaagcacaagaagaacaagaagcccgcctccgacgcccccgccgacgccgaagccgacgcggaaggcgcagcggcgccctccgcggagggcgccgccgagggcggcggcgacgagtacaccatcgacgcggcgaagcggatgaagtacgaggatctattccccgtggagtcgaagaagttcgggtacgaccccgccaacgccgccaaggcctcccgcagccgcaccgtggaggaggccctcgacgaccgcgtgcgcaagaaggccgaccgatactgcaagtgaggtgagagcccttagaagctagggtttccggctccacggagcccggcgttcgatgctttgctctagtcggatctagctccggattcaattccaatcgagttctctcgacttattgtactgccgccacacatgaatttgcttgaattagcttgaatggtggagtgggttatgtttgatcgccgaattctggtttatacactgtggaatatgaagacgtgctgtaactgcaactaactgatgattaatgtgtaacgcggtctagttgcaatgttcctattagtcgtagcaaagctgtatcgtgtgcattataatccagaattatcgaaattgctggcaaattcaatatatggaccgaccaattctttgtatagattaatcaaaagcgaatattagggaaggacctaatatcaaataaatagaaggagtgaagcttcgaacccaggctggctagtccaccaccttgtggagctagcccgaagatccctgggtgcttctctgtatagattaatcacaaaagtgacttattttgtattgggtccctactcagtgtaatataggaacctattgataagattagagataggagaaagtcataacttgctagtttctgacccctatgatactgtttctgtgctcttaagttggtttttattgctattttgttttgatagtctttgaactgagttagtgttagtggtctataatcacaatcacaacaactttggtcaggtcgctcatatagacagcatacatagttgttagatcgataagtttatatggtggatgaaggtttcttatgtcatctttatatatcatgggtttctgagacacctgctgctgctgtatacctttcttccttttgggtgttgtatttgtttgattgcagaggctgttgattcaacattgatgcagtttttttttttgcttcgctttaagttaatatttcaactagtaattttgttttccctcctaggtccgtcccctctttagctgtctctctgtctcttaactctattattccttaaacacacaatcattttttccctcctccttagaaagtgtgttggctagattgtatagttcagatattgttttgtattagcttatctgttgttcatcatttgttctgttgtatgcaaaaaaagcatcatatggctcggaaaaagtgtgtgtatctctactcactgttgagatcacattgaatgtagcttaatatattttcctacttaacaggtgattcactcatgcgagttgttcacagttcttatggatgcaggagagtaattgtgctcattgtatcagaaaggacatacaattgatatagggtccagaattcctgatggcatgttgtaaatcaagctagtttagtgagtatttccttactagcgaacggaagggtgctcttgttcactcactctcacctgttttggttaattagataaaacactatatgcttggtctctgtgttgttaaatttgcatttaatccagttataagcctgtcaacaggctgcagtggtgtactgtattctttcttttgtgcgactattttttgttttcacctgcattgtccacagttatgatgtgatgggacaccctatgtcatacaggcactttttatagctctatgtgcgagtttatgg

SEQ ID NO: 22679 - DNA, 3859 bp, Oryza sativa
cggcgtcatatattaaaatatggagagagtacaaattagaaatttggaacaaaggctagtcgctacctcatcagcatcagttacagcttcacgactccttcaccacttaagtaattgattttctggcgcgattaagagcttggtatatagtccagttgggtttagtttgtaccaaaatttaggtttctaccgagaaactgaaacatctcaaagtgctcacgtcatgccgacgcaggcatatcatccccgatcagaaacccccaccaccgtctacaaaaatggccacttcgattttggtccaccaccataggaatataggatacacgcatgcacgggtgtgcactgcacccagctgcatatcgtcgtatatttcataacccgagaagcacccggagccacgggctggtcgctgcagcttctcctccacttcaccaaccagccgcggcgtgcggggaaactcatcggatcatacagatgcatgcactctttgccgtcgcccgtgacacagccttctcatcgtcgccggcggccgacgagcacctccccaacgagcacccaggcggtcacctctggaaccagagcgtcctgtgagtatatgcacatctaaacaacactttgattctcgtattattattattcagttaagttacaattgacaagtcagacgagacgtgcaatgcatgttttcagtagcagggaagaagagcatgggagcaacgacgacagcttcagggagagcctcgtttctttgcttgacaacacgagagactacgtgatggctcccgaagtgttcgagggcgtccccgtggcatgcgactacctcaaggggatggacagcgacggcatggccgcatcagctgtcgccgcctatagcctggacaacaacggccagcacgctagtgttagttcaatcgagcatggcatcgctagctcgccgctgctggcgtaccagctggggaagaacagcgctgtggtgcaacggagcatccagcagcaggaggttggatctcccatggccgcatttctgcagcaactgattcccactagtgttctcgatcagtctggtatagggtttgggggagtttgtctggacggctcagcactggaggcttcgttttgcatgagaacttctccggacgtcagctctttcagtggccacaggtcagcaaccgcagaagaattgatgtctacagacacaagggagcaagaaattacacggctggtaagactgaacaattgtaatgtatcctcaaataagtagaaaccggtgtgaaaaaaccttacatgtacaattcttgcaggcaagatcttgtagtagcagtggaagtgatcgtaacaagaagaaactatcagaggtaagaggaggaggcaaagcgaagaagttcagtcagagacttcacatagtacatcttctcccaaggtaactaacaatgacaaaatagtggattgactttgcaaatcgttctgaggagttggcatttgaagaacttgtttcgaaaccacacgcagcatcaatcacccaaagtgaagctgggggagaagatcacggctttgcagcagattgtgtcacctttcgggaaggtatgaccgtatgagatcattaaacgcacactttatgcttccaaactaatgtaagaagcaaaagtattttctcttcttcaattttggccgttaatcattacatatttcattttaacagacggatacagcgtctgttctgttggaaaccataacctacatcaaatttcttcatgaacaaatacaggtgacaccgtcagcacaatccttttttgctgttttgcacatgccccctgtgtgttttgtctcagatcgaagtttctataaagtagtacggagtagaagatactgccatgagcactgcagctgagcgattcactgtatcgagatatatggatcgttcatcgttgcaccgactacttcaaccttttgccttatttcagattacgcatttgggcatttggtatattgacctcttgctttgtgccttttgccagtggacctccaagtcatgtccaagtttagtatgtcgttttcgtgacactaaagaacataaagaaagtacatttgtactggcacaactattactgatttgccaaccttttctgaacctaataagtcatgctcccacagagataagctgacgaataacccttctatttttctgatttggtgcagttattcagccaaccgtatatgacaaacagcacaaacaaggtagtttttcctattaaaacgatgtattgcaaattctaaaagcacagcgaggccaggactgaatgacggagcatatacatttaccaccatcttttcttcagggtcatattcactggggaggggaagggaagaggaaggcaggtctggagcatgatttgaggggcagagggctttgcttggtccctgtttcctggacctctcaagaatactgtgatagcatcctgccggagtgctgggctccggcgtacaggaactacttttaccgatgagccccatacacattagacagctcacagccttgtctcacttactgcccgtgcaacggctacgttgggaagatttactgtttacttactctatgtttttcagtccccatgttatatgtattgctgagtttgtagcctagaacgaataaaaagagtgaagtgtataggcggtctctaaacttataagagtgtcatatctaggtccctgaactcttaaaatgtattttaggtttttgaacttgtactgcgtgtcatatatgtccaaatggatcccatctcattccatgtattgatgtggcatgccacggtggtgcatccatgtagtggaactacatgacagtcatatagaaaaaaaaaatataacgccaccatgtagtggaactatatgacagtcatatagaaaaaatatataaattagtagagattagaaaatatgttttttatttcttaaaaaataaaattaacattaaaaaagagaagcgatagagagggagagagagggagagagagagagagagaggagaaaatgatgctttatttttttctatatatgactaagggcaagtgctataatgcttcatgtgctgtctctaaaaatgacacataggattgggtgatgaggtggagagagaagtgaggagagatatgatgaaccacccctaaatcaagaggtagcctccacaaactctaagaaaaaagtgagagtactaaaggcattgatatttgtgtattaggggtgacctgttgtatatcttacatcttaatttattggtgaatgccataaataattttagaggtagcaatcacatctattatagtacttgccctaacatgtggatcccactaatatgtacttcctccgtttcatattataagactttctagcattgcccacattcatatatatgttagtgggtttgaggttatttggacctatatgatatatctataaaagtttaagaactgataatgcatttcaacaaaaaaaaagtttttgaaagagtggtatttgagaatgcggcatccgagagagtggtataaagtccaaaattccggtttaaagtgggttagagttaatttctatactttttagcaaaagaaaaaaaattaagaacttgataagattgtaaaagaagccacctgctaccacccctagctgcagcacgtgccacggcaatatctattccgtagccacggttacacgagacggagccattttacttccatctatacgacgcaacgtcatgccatggacgatgcagcggtgcttcagtcgagatcatctcaacgagcgcttgggctcgatcgccgcaggattgcgcccatccgagcgtgggcgccaggccggcctggcgcct

SEQ ID NO: 22680 - DNA, 9371 bp, Oryza sativa
taaaagtagtatgggaggtaactgacaccacagtgggcgtgatctcgggcttggggaaaataatttccccacctaccctcgtcttctcctcgccctcccctcatccatcgctttctccccctcccggtcgcccttccagtcgcctcctccccgtctggcgtcggctccgcccgtcctccccgtccggcgccggctccgctcctcctcgccgcgccgcaccgcttctcctcgcctcgccgcgcctcctctcgtctcgcgtcttgtgcggcggcggctgttgctgctgctccggcggcggcgagttgcggcgggcgtcgggcggcggcgcgggccctggattcggccaccaccaccggcctcgccgccgcccgctgcggagatggagaagaggcgggttgcgcggactcgggagcggcgggggcggcgggagtggacgacgcgacgccgacggtggacgcctcctcttctctgatgctccggccatctctcctctctcttctcgtcgtccctgcaaccctcctcagccaaagaaccacaagagagctcaggtagcaagcagatagaacgggtcaaggtagcttcagaatcaagaagaagaagaagaggtgagatttttattttgatttttattttctctctgtttgttttgcttttggcgtggttcttgtttccccaatcgagagcctcaccccctcaagaggctcatggatgtgaggagaaatcaaaggccaaaagaagaaggagttgtttttgtgtgatttgattcctctttgctgcagggaaggagaaggaggagcaagagcaagccatggaggagccggcgacggtcgggagggcgcggccgaggaggtagtaggcggcgcagagtgccacgatggcagccatggcgggaagcgtgacgatttttttttatctgtgatgatttttcttccttttttctttttcatcttgttgagtccgatctgtgataattgttgagtccgatctatgatgacttcaatttcttcctcggctttcacttctccagccttctcttcttcctggtcttctccaccacaacacttctcgagggcgaatcggggatttcttccgggggaatcggcgcgagggcacggggcagcgaagaaacgctgcccacagcgcgcgtgcctctgcgtgctcctctgccccgcgcctcggtttcttgccgcgcgtgggttgcgagagaaggaaccgcgcgcctcagttagggggcgaggtgctctggttgggcgcgctctcgctccacgtatgcacgaatccgacgtggaggggtgtaacaccggtccagctcaccgcactgtgaccagccttagagcaggtacaatagcagactattagctagctataaacatattttaatgagataaaagatgagagagaagtgcagcgggctacagatctgtagccagctgcatcatatacttcaaaacgcagtgtgtgtatgacaggtgggaacatatattaatagtatagtaagcaactattgtatgaattgactattagattggctatagatgaattggagttagtagtggattatactactcccttcgtcccaaaataagtgcagttttagcactcttcatgtctaacatttgaccgttcgtcttatttaaaaaagattatgattattatttttattattactagatgataaaatatgaatagtactttacgtgtggctaatttttttaaatattttttataatttttttaaataaataagacggatggttgaaacgctaaacataaatatttatggctacacttattctaggaaggatatagtgttaaacaaacttgctcttacctcgccgtcaacttttcccaagaaatggaatgcatcagtgtccgcgccacgcggtgaaaaaccatgcatccacagtggccggacccccttgtgctggcgagggcgtggggcctatgaacctgaggcggatcaaattttttttatttataattttttttattaaaagttttacaaaaataattttccattttgaaaattgacggaagtagtcgcctaccgccctttgggagggcgatttttaaaaatcgccctcccagagggcggcgaaaatgacgtggcagccggccgttcgctctcgggcgacggccgtcaacgaaatttgcaggcggcccccttgccgccctccgctagggcgattttatactgtgcggggggccgcctgcaaatgggcggcgggggggcatggaattttgcaggcggcccccttgccgtcctgggggagggcgattttatactgtgctctatatttttgtataaatatcaatagttataaaatctttttatattgaaaactatacaagattaaaatctccaagactggtaaaatacaattttattattttttagggcatatttggattgttaccgtacaaatattttgttagtgccaaaatataagcaagttttggcactaccaaatatttggtaaggtaaaatggcatttgatcatatttggtttgctgccaaaatgtaaaattgtagtgaagaatgttctacataatctcaaatttagattacgtattaacaatgaataggcttccattttcgtgtgtggtgtgctagtgggaaagaagatatgaagaggttgccttcagattgtcaattatatagcgtcgttttcactgcaatatatgtgaactcaatgagatacattattcattagatgtgacaagacgatcacgcgtgggcgtgattcactttatgtcaacaggcagcaccgaaagttgatagtgataactcgagctgccgcttttcatgtgtgctgttgtggactgtgcgcgctactggatctgacactaccgtgaagcaccgaaagtgtgttgtcgtgagcataagttgttctagcaccatatgaatgaaaagaactatgtagacgagacaaacacaagtagtactgcagtagtaatagcaaaagtagtactgctttacaagtttgtaagccaaaagaaacggtcacataaggactgaagaggtagaacactactgacgaggcctcttacccctgtccctcctaccctgcgccctaatgtgcccctgggagtacgtgagtcggtccaggggtacggcacggccaacccgtcctgcctgtacaggtgtgacctctggctgctcctgagtgtgcgcctctggagctcctccaagctgagaggagcctagtacgtcgtggtggtgtgcaccgtgcaagtcgtcgtcgtagaactggctagtaggaccagtcctaccggcgtgagacaaagaggccccagtaccgaagatcccggctgcaaatcctgctggacaaggaccatcagtttcgtacaagtatttaacagtagtaataaaaagtaaagtaccgtgtgggcgagggatcgacgctccgtgagaggaagagctggcgaacgcgcccgaagaggtggcgaacgcccctgcggagctcgcggaagcgccggtcgtgcctgcgaacgcgctcgaaggcagacgaggtcctgcgatgaggaaacgtgcagttaaaacatggtgacatattcgtgcaaaagctgaaacaaaaatgaactaatatctgggctgaactgtaccgtgcgaaaccggtgctgtaggtcgcactgctccgaagctaggggcgctcgaaggcaaacgaggtcctgcgaggatggaacatcaagttacgacggggtgatgttttcgtagaaaaacagaaacaaaacttaagaaacctctgggctgagcagtaccgtgcgaaacaggtgccgtaggtcgaggtcctgctccgacggtaggcgcgcgaggccgtggttgtaccggaccagctggaggtacgacgtccacggcgctgcgacaggagaagacgcgcatgaccgcacgcatcttctcctgcatccggtcgaaggtcaccctctgctcaacgtcagtcaagtgcaaacctctgttcaacctcacttggactgcggtgatatcggcactgatatcccgtgcggcatcagcctatgcaagatggaaataaaaaatttagtagttgtcctatattatgcaagataaatgaaataattgtaagaagtaatacaaattggacgtaccgccacgaagtagtctcggtcacggtgcgtgggatacgcgtccgtgacagcggcaacgtgcggctctggggcgtctggagtgaaggtcacacgcgcacgagtacgaggaaggtaccagcgaaggtactcacggtagttctcctccgtgtgtgggaagagctcgttgatcacctcctctgtagctaacacccagtcgtcaacgtactgctgtacacgtggagcccaaagtgcgcctgctagctgtccccgtcgagtcaacctatgaagagaggtaaattatatggctcgatgaagtaattatcataaaaatttaaaaatgaacaatccgaactcacgagtggtcggcagggaggacggtcggctgcacgttgcccggaaacacctgcctaagtccgaactgtctcatcacacgctgcgggcagtgaggctcaacgaaaatgtcaaacaccatcggcaggatggtgagccagtaagcctggtcgcgtgtgcacaaggacgaaagtcctagcggtgctcttgcagcgacggcctcttctgtgtacggctcccagatgacgtcgctcggctggagacggtcaaactcgaacacgaagtccgggtaaccacgtctcacctggacgtgagcgtaacgacgctgcaataaacatgatcggaattagacatgttatgtgaagaaaaaaaagaagacgactgataaacttataacgcagcgaagttgcactaaccccacgtcgacaccagtaagtccccatcatgggaccgtcctctggccactgcgcgctgcgaccaaccccgtagggtgcgctgtccaccactggtcgacctatggcaaacctctcggctgcccaaagctgaagcaacatagggcagccagcgatgatcgctcccgcgtcagtcttcgtgcacgcctcacagagggcacggtacgtggctgctagcatggcagaaccccagctccactgcggcacgtcctgtggctgagcatccgcgatggaccgtgcgtagtggaccagccggaagtccacagcgtgcccgtgggtgctagtgaacatcacccacccgaacaaccacaacaggtacgcctcaagggagcgtcagaccgagtaatcatcagcgtcagggtgcagaaggtccgcctacaattaagaatgaaatgttagtacaaaacactcatccggtcgcaaataagcatgtatgataataacaacttatttacttacagtgaactggagcaaccaagccttgctaggcccgactgtagagtacggaggaagggtgttggtcggtcctaggtgtggaaggcgcatcacctgctcgaagcgcgcagtgatatcctccttccacccaaaaacaccgtccacgggaccaactggtgctcccgccagcggtagcccgagcaggtacgacacgtcctgcagtgtcggagccatctccccacagggaaggtggaacgtgtgcgtctcaggtctccagcggtctacaagagcggcaaggagtgaccggtctgcatcccaccgcttcgctgggtcacggtcgtccgccgccgcctcaacaagccgacaaagtggtagaaggcctgccgcacgcaacctgtatagagcaaacttcaaacataagtacaacacaaagcaaagttgagttgaaatgtgaacatacgcgtaccaaggaacgtgacgggggtcgacacgcaaccactcgcgcgacgtgcgtggacggaaggtgccgagctgtgcaccctcgactgctgacatgaacgagcggtggttcctgtcaatcccacggttcaacagcgccggtgtgtcgtacgccatacctgcatcaaataggttgatcagaaacatataaataattagttcaacataagtaataaatgttcataagcgaattactaacacatattaaacaagagtacaaacaaacaaaagtgtttagtccgaacactcatcacgataacattatgatacaacaccgaatagttcgcaatactactagtacaacaatagtcggaggtactcattacaacaacattgaattgaaattacacgatagaagtatttagtccgaacactcattacatcacaacagcattttatttcctaaatcgaaagcattgttacaccatggaatcgcctgctgcgcgacgacgccttggccttgcgcgcctgcttgttgttccttcaccaggtggtcgcctaccatcacttgcctgtccagatggactagcatctgcgccgcttggaacttctacattcttcgggcatttcttgtaagtatggccgcgcagatcacacttgctgcagcgtaaagtcctcccacctgcttctgactcatccatatcatttctgatgcgtctagtttggcgtcgaccctttttcacccttaacttagatggatctggaatataaaaaacttgggcactcagcgttgtgtaaaatcctgagatcccgaacccatatatctcctcactccatgtatgaaagattgcttctttcctgaaataatttgagacgtacacattgggagatatgccacaatcaccggcagcagcaagaacgtgtgagcaaggaaggtgatgaagcttcggcttcatacaactgcaggtacatccaccatccgccttcaagacacattcctgcacggcttgcttgcgatagataccacgcctgctcctatcaacacacattatttcataccgatgcacttgtgtgccttgagcaacaactcgatgtctccgtgcctttttgattttatcttccatgtactttgtcactacgttgccaaacactatgttgttatcggccatggacggaccaattttcttgtatcgatccctaaagtacgcttgcgtgccgtgaaggatgaattcaacaatagcaaccaatggaagtacccgaactcctcgcattacccagttgtacacctctgccaaattggttgtcattatgccataccgagatccatcggtgtcgaacaatagagaccacttctccttaggctcattctcaatccactgagtgaaatttctgatggacgaccctgacctccttctcattgttggtgggtcgtcatgtaatgcaccaagaggtatgggaggctcgtcaccttcaactagtggtctgcgagattgctcatctgtttgcttcattgtcaactcatccaacttgtcccacaactcattaaatttcttctcttggttctgtgcacagagcctcttaaagagctccataagatgcttgttcttgaattgcttgtagaaatttgcacccatgtgacgcatgcaccaccgactccgaacatcaggccacttagctggaagtcccttctcatcccaaccgttctgcaagtagtcaatagcccgcaacatacccgcatgacgatcatgtataaggcaaacgttgggcctcatacgcaccactgcaatgtgcactctctctaggaaccagtaccagctttcagtgttctcactctctacaaatgcaaaagccataggtagaacctggttgttcccatcacacccaattgctgtcaatatctgacctcggtatttacctgtcataaaagttccatctatgcatagaacaggtcgacaatgcacaaaagcattgatgcaagcacccaatgagaaaaaggctctttgcagcacactctttgttcgatcatcaaccgatgtaaatgtatgtaggtcatagtacgtattattattcctctgggcaatggtggctaacaaacgaggcaaattatcataagaagcttcaaatgtgccatacctcatctcaatgatcttttgtttggctctccaggcctttgcatagcttatggtgtacttgaatttgttctcgatgtgcctaataattgattttggttcaaagccaatattaccaacaacactgctgtacatctcacttgccacaaaagctgaagtgatgtttcggtgatacttctccaccccttgtaagtagcacttatgctcggtcacaatgctaactttccaataatcattccatttacccttatatgcatggacacgccacggacaatcttccttcatgcacctcacttcatacacataatttgttgacttgaccaccctaaactctctctgcaaggaaactgcccaatgcttcaccgcctccttcatctcatccttatgagcataccttgcaccctcaattacctcgttctccttatactcccagggtacatgatcaccctctgatataacaagtccagagaagtcctcatttgcccaatcagtggccattacatcaccttcctcatcggatgatgcgtcgtcgtccgcttcctcattatccgaatcttccctctccatttcatcaacaattataccgactctctccccctcatccgccatgcccatagcctgctcctcccttggttgattttcctcattttgcatcgatggtccaacaacatcccctgcattgataggaccctctacatcttcggtttgcattgaaacatttatatctttctcttgtaccgacacaaatataacgaggggccatgaccgttcaaaagccatttccacataccgtctccaagcatcagtgctgtccatcggcattagttcccaaaaataaccttctgttgcacgactcactacaactgacactgacattgtgtagacttcttggtctattctaaatcctctcaacaaccaactataaattgactgaaatattctctccgcaggcctatcgatgcccttagatgtcattacaaaatctgacagatcaacaccatctggaccaaatctaatatttccttcaccgtgaactatctgaaatgtgaccttacttgacattgtgcctgatgaaaacaataactgcgttaacctcgcatttctgtactacgccctaagttacattctctacaatattgttctctaaatttctaaaattacgttacattctccagatcaaactaaactacatcttacaattaacactactgtctatgtctcaattcatactattatattctatgctctggatctacacatatgtgctgtgtgctacagatgtgctaaaatatatggaactaaaactaaaacgcaacatatatactcaaacataacatattagtacaaatgcaaaagatgtatgggagcatacctgtgatgaattgagcgaaccagcagggcttcgccgctccccttctgctgccctcccctctctctctttcgttttttttggatttttagtgaatataatgaaatttcacagaggagggactgggctttatag

SEQ ID NO: 22681 - DNA, 5280 bp, Oryza sativa
tcgcgcccgcgcgcgtcttccgctatgcgaaccgtcaaacatgaacgaccatgagccgaggcccgagcatctctccattgacaggtttcctagcccaagtactatccggatgggccagatcggtggcgctagccgaacaaatcacccaaaaagaaagatactcgtggtgagacgggttgaacttagaattgtgttgactgtgtgccgtacgcctaattaataacatctctggtttggcgttgacatggcggcgctcgaattatcgatggccgtgtgagtgttcaagcacgaaacggctaatgggcgatcgctcgcctggcgatggggtagcatcaattcgctcccccctctccccctccctccctccacctggtattttttttatttggctccgtataacttttctattttagtaaatttatacacctaaagtttatacatcttaattttacacatctaaagcttagaaacccaaagtttataagacaaaagtttatatatccgattcaaatttgaatttgaatttgaatttaaatattttttatatatagtatttctatatatctaaagtttatacacataaagtttaaaaatctaaagtttataagttaaaagtttatatatccgattcaaatgtgaatttgaattcaaatattttttaatatagtatttctatgcatctaaagtttaaagtttatagacccatttcaaatttgaatttgaattcaaataatagtttatagacccaaagtttataagtaaaaagtttacatacccgtttcaaattcgaatttaaattcaaatattagtttatagacccaaagtttataggtcaaaagtttacatacccgttttaaatttgaatttgaatttgaattcaaatattagtttatagacccaaagtttataagtaaaaagtttacatacccatttcaaaattaaatttttaattcaaatttttattgttgtagtaagagaaaaggggaggtaaagtagtaagggggaggggcgggtgatcgctggggaggggagataacgatcacccgtccattaggattacccattcaagcatgcctatccatcactggtacgtagtatgctattaattagacatcagtcatcagatttcatctcaccaagcgtttggttgtaagcgtgtactgtacctcttccataattgtttgttggttttattatttcagtttttattatcgtctaagtatttgatcttttagaaagaatttcgtaataagtggttgtttcttgtttaaagcaaataccggaattttaatactattatcttaaagaaaaaacttgtactgtaccttcaagtacgtcactcgattcataaacacgtacagtaccattgtgtacggtatgaaaatgaaaaaaagtaaacaatattactccatccaagcaacaggattatatgacccaacagaggccgccaaagttcggacaatcccgtacctagctccaacagtatgacgaaatctacaaattgatacccctctattccaaaaaaattcaatcatatacataaatctggacttatatgtatctagattaatagctaaaaattcatttttttaacgtagtatatagtatacgtacgtgacaataaagaaccaccagattgcacatgggtgtactatagcttaccacatatagaagtacaaaaataaactgattaacgtctaggcatataataattaggcacgctacctgataatagtaaccagactaaaaaaatcacgcgctacgtcatacgcgagacattgactcgaacgggtattatcaactcgcaagtcctccatccatcagcaggaaacaaccaaatttaatacaccatccgtcccaaaatataacaaattttagcccttaaaatttgtcctaaaatataacaacttctacactaacattatcttcctaaccaatcacaaccctccaccattcactttttccaccaaatttcactactcaaccaattacaacccttcatcattcacttttacctatcccttctttctatatagttaagacccaaagctaagttgtggtgaagccacgtcatcatttaattgtcagccgttggatgtaatctgaatggtcgcagatggtcgcacaagcgtgaagcgcccacttctgtagggtttctcggaaaaaaaaaactctatccgcatcgctcacgcctcacggccgatgccgccgcagctgtggtgaagccacgtcatcatttaattgtcagccgttggatgtaatctgaacggtcgcagatggtcgcacacgcgtgaagcgcccacttctatagggtttctcgaaaaaaaaactctatccgcatcgctcacgcctcacggccgatgctgctgccggatgcggcgcttccctctcccttctccttcgccccttctcctcccgcgttccccgtgtgcgccagccgcgagcccacgaggccattcgcgcaccaagccatggagcgccgctcatctgtttggagacagatcggtcgtgggagggcaagcgggtgcgacggcgatccgtgcagctcgatggtggtggggggcggagtcgcgtcgcgccccggcgccatccgccccaccatggtggctcaggcggaggaggcgaaaccctagcgtggggagatgaggtaggctttgatgcatctctatttcgattcttgcgtctcgtgattgggggtatcattcgcggagcggagagggtagaaggaattgaggaggggaatcggggggtttgggtggggggtggtgggatttcaaaaccctaggtgtgagttcttgccatttttcgctagctgtgtggttcaatgaattccgaaaccctaggtgttaggtcatgtttttgcaagatcttgaatccccagttgtgttagactgtaattaggtttcgtgtaagcaattttaggagatgtatgatgcattttgtgggtgacgagtatccctggggatagggcttcatcagcctgcaaacataatataaatgaataatcgatttgaattccctttctgtttaaccaggtgaccacccttgattggtatgtctggaccaatacgcacatagacattggaaatgatctaaagtgatttatgccgtaccaggacgctaaaagtgatttatcactgtaaaacttgaaccataagtactcaatgatctgacagcatgtaatcatgtcaatctggattagaaaaaatagagaaagtaaatatcaaaaaaagtaagcttacctattgtaatgtagataagaataggaagaatatcatcagcccctgatagtggtcgatcatttgacattgacacatctagtagcagcaagttattgatgacttggcaacagcttataatgcaaactaagcttctctgccataaacatcctaccaattgaagcagataaccttgctcggtatgtctactgttcaactcaacatatatttttcatatcttctgtacatctcttctctaatttatccttgcaatattatttcatatccagttacaacttatggatatactcctaaatttagtgtcacaccccgatctggcaccgccgtacaacggcacctgataggagcgtgtcgtaagaaaaacggcgcgaaccgcttcctacgaaaccgcgatctcagtaccagtcccaggacatagcgctggtactcacagtgacaaatatgaatcattgcaatccttaaaataaatagaggacttatttatcttaacttacgttgcagctcagaacagcccgagaaatacaaccgacgacgcggacgaggaaacaccaacaacagcagcagcagcggaaccaacggactaacacccagcaccacagacgacggctgggaatcaggacgaaaccctaatcttcacttcacttcacgacggaggaactatatatatttatatagagcaaggtgagtactttcgtactcagcaagtcacgggaatttaggtgtttaatgcaagcttggagagaggcaaggttgttttgcaaatcctttgtttgaaatccattttgaaaccactaagtgatttatttctttttgagtttggatcgaaaagagacttgtgtctcgattcgacttaagagacgcttttcaacaactcaaatggtaatgtaccgacctcccgggtcagatcattacttctcggctcccagagccatttcacttgattaagcggctcccagagccttattcattttctcggactcccagagtccagctgcccagcagtacaacaatccgcttccactcgggaagcctagtctatgatgcctgcagacatcccgaatcacacagattcgtttctgaccactcaggtcgtccatctgccacataggctgattctggttacgattcccacaccacaacaacttttcacaaagcacaggcaaacaaatctacgcaacgggaaccacctcacatccacccatgaccgtgggcacggctgttcgaacagttagttaacctctgcagaggggtacactttacccacaagacacgaacttactccagacactggccggtgtcagaggttcacgacaaagcctttccaaaccgagtctgggttacctcatgccacatagaaggatcaaatcctcacataaatataggccattttagttttcacaaatcaaactccaaccacctcgatcggtaatctggcaagcttcgcgttcttgccttaccaggaacccgggttggctccaaccgaccccgccccggcgttccccaactattggcatgcgaggttttctcgaaccgactagatacttagctaaggtgtcccatatcaccttgtggttgcactttgttatgcttgatgagtttcccacaggaatcgatccttatatgcgaatacgggacagcgccacgcaggcaccaccctcgcatcgcgagttttcacaattcattttatttttaaacacaccgacaccacatgtcgggttttcaaggcttctcaaacccatttcccaatttttcaacaatcaacggtgtatgtgggatatttggtatacgcgcttagagagcacgaataccgaagtaccgcaagggtggagcgacaaggaatcagggtagtacaacctacaggaattagtgcgactactgggtaggtccgtcggtttggcacgcaaaccgaggccaagtaagttaagtgtgtgattctaataatgcaagttgcaaacaaagtaataatgattttccaattataggagaaattgatcaaagggtgacttgccttgctcaaggtcttcacgaagcttcgcgaatc

SEQ ID NO: 22682 - DNA, 5670 bp, Oryza sativa
gttttagcagtccatatatatcttttctctatctcaaatctaacctaatcaaactatttaaaaagaaaagttttcatcgtacaacaaaaaaagaaaaaaaacgcgtgagaaaaaaacaaaaaaaaaacatgtgagacaaaatgtcagaaaaaaagcaaaagaaacgcttaaaaaaggtttccatagtctataaaaaattagaaaagcgcgcgagaaaaaatatttccatcgtccgtaaaaaataaaaaaaaccatgcgaggaaaaaaactattagaaaaaacgtgccatttctaaaaaatggtttgaaaaaaccgctcaagaaaaaaggtaaagcaccatttataaaaaaaggttactctgaaaaactgtgagaaaaaaaatgctaaattgatctatgcttgggttggataggatccatcgattttgttcatctcctactgagcttttgtttcgccatctattttcctgtattggaaaaagcaaaaaaaacacgcgagggaaaaaatgttagaaaaacaagcaaaaaacgagcgagaaaaaaagcaaaaagaaaacatgctaggaaaaaactgtcagaaagaaatgtgccatttctgaaaaatggtttgagataactacgcatgaaaaaaatactgttcataaaaaacaagccgctctggaaaaatatcagaaaaaacactgtttatagaaaaaacccggatcgaaaacaataggattcaacgcgagaaaaaaccattgtttctaaaaacagtttgagaaaatcgtctgactcaacacgagaaaaaaaacaccatttctaaaaaagggttagcgaaaactatccgactcaacatgagaaaaaatgtcgtttgtaataagaaccgctcctaaaaaccatccaactcaacgcgagataaaattgatggacgcttgggttggataggatccattgattttttttttccatctccttcatggcttttgtttccctatctattctccagtattgaaaaccatgaacgtctctatatgcaattatcagactatttttgttaagtatagctattattcttgataacatagatataaaaataatattaaaaaataaacatattttaaattgttatttagagaagagtgcacaatgactctattttgtgtagacttgaccatgcaaggcagtgcatgatttgattgatcatgttactatttgcacgaatgagattcgctgtggaggctagaaattcccacattaatcggagaaaaaaaaagaagagtccaagtagaaatgcaatctaaaaatagctgaaattcggaattaaaaataagcaatatcgaaagaggagtccatataagaccctaatacgagattaatcaaaattcaaaataaaaataaaataaaatccaaaattagaaaataaaaggagagtccaagtaggaatatattttaaaaataaccgaaattcggaattaaaaataaggaatattgagagaagagtccatataagaacccaatacgcgattaatcaaaattcaaaataaaaataaaataaaatctgaaattagaaaataaaaggagagtccaagtaggaatatattttagaaataactgaaattcggaattaaaaataaggaatattgagataagagtccatataagaacccaatacgagattagttaatattcggaataaaaataaaaataaaatccataattagcaaaaagaaaagaagacttcaacagaaattcggaattaaaaaaagcaatattgaaagaagaattcatataagaacccaatatgagattaattaaaattcagaaaaaataaaatgatatccaaaattagaaaaaccaaaagagagttcaagtaggaatacaattttgaaacaactaaaattcaaaaaataaaaaataaaaatattaaaagaacactatacggtattaattaaaatttgaaaaaaaaattctgaaactagaaaataaaaaaaatcaattaggaatacaatttataacccacagaaattgatgataaaaaaagactattgaaaaaaaagactatctaaacacatgacaagatgaattaagtaacaagcccataaaagagtagagtggttacggttgatacgacatataaaaactattagtaaaacaccaaatataatcctaatgatgattaaaaggaggacgacaggcaggccgtaaagcaaacgggcaaggcggttgccgggacttctagaaagtaaaaaaacccattgataatcatattcgatttttaaaatctcaatgataataaaaaggagaagcagtgtgcgggtgtataggacttctagaaaataaaaaataaattccaacgatagttatattcgatttttagaatcccaatgacaataaagaataggccgtaaaggagtatagtggcatcgtttgataggacttctaaatattataaaaaagaaacccaacaagacaataaattctaaaaactacaaggtccaatttttaaaggttcggaacttctaaaaagtaaaaaaaaaaacaatgataatcatgtttgattttaaaatctcaatcacaataaagaatggaggcagcggatgagccataaaggagtacaatggcaaagccgctaacggtttgacgagacttatagaaagtaaaaaatgaacccgaacgataattatgttcgatttgtaaaattccaatgacaataaagagaaaagacaatagttgggccgtagacgagtataatggtagcgtttgatgggacttctagaaattataaaaacgaaacccaacaagataataaactcaaaaaactataagatccaatttttattggtttcaaggaaaatgtacaaggaaacagatcaccagcagattaaacagaacatctacaaggaaacagatcaccagcagattaaatagtattttgtgaaagtgaaacgagtttagcactgtgcatttactattttgcatgctaatttgcatcaacttatgaattattgggttcatcatgaaggacaaccaaccggcccagtcttgcatgatgcaagctatgactgtagtgagtctgtgagttaaagattacagagtattagaattgagcttatggcactagggtaactttattggtgttaggaaacgagtgacaaagaaacgataaaaaacaatagataaatcacagaagacacaagatttaacgtgaaaaattctctcaaagcaggagagaaaaaaccacgggcgccgacgagcaatctattcaggatagcccactggcggtggaacaccaccaactccctaaattctgacatgtgggcccattattcatcccctcttcaaataggtgtgcagggtctgaaatttgaattagaaatagccagggtttgtgaatatgagtatttcttttctatttttagtggtagaccgagcaagcaaataaagaaggatatgacagaagtaagagggagcagctggtgtgacttttagaaactatataattagaaatatggtgatagctatttaataaatctcaagtaaaatcatacttaaaaatatatatgattttgtttaggtgctagctgcgcaaatgcgcgggccacccagctagttcctttcaaaagaaaagtattttcccaaggataacttcttcgccgaaaaatagaaggcaactgtattggttaatcgagtgagcaagtgcatgcatctcctcctcctggagtaaatattgcagcatcaacgtcactgcccgtgttggctcctggcagttggcacgaacgcacacatacatgcatctggtttcctgagcagaccgcggtcctgcgtctgaccgacgcggggccccgggatcgctgctcggcataggccgtatctcgcttatttggtcaagagacattagccgggtggtggtcatctgccaagatctgccggttacttgcactttgttcggctgcactgcactgcagtctgcacccaaccaaccagccggctatagccgctagcccactcgtcaagtggtcattcacacgaaaactatagcgcgttagttgtttgactcctattgatcctaccatcaacatgttgcaaacataatttggaacatgatggagttgaaaccacaagttgcctcgcgaccacacgcgccgaagaagtggcagctcccctcccattcccaattcgagccgagaatcatcgtgcacctcgtccataaaccaatccaaagcgacgtcaccacaccacacaagtacgccacatacaaggtagtaagtcgtgaaccaggcccacgttgttttttccgaggaaaagtccacgaggcttcgtggcttcgcgcttcgccttactacaagaggggaacgcgcacgaggcgagccacgcgattcccccatctctccgacagcgagcttcgtcgtcggctgtgcgcggccgcggcggcggcgctggtcgtgtgcttcccaaattctctcattccccagcgagcgatcaccatggggctccacaaggaggcgagctcgtcgtcgtcgcggctcgacgcggcgccgctgctgccgcaccacggccacggcggcggcggcgcggggcaccacctgtcgtcgcagcccaagacgttcgccaacgtgttcatcgcggtggtcgggtcgggcgtgctggggctcccctacaccttctcccgcaccggctgggtggccgggtcggtcctcctcctcgccgtggccgcgctcaccttccactgcatgatgctgctcgtcgcctgccgccgccgcctcgcctacgaccaccccaagatcgcctccttcggggatctgggcgccaccgtgtgcggccccgcggggcggcacgtcgttgacgccatgctcgtgctcagccaggccagcttctgcgtcggctacctcatcttcatctccaacaccatggcgcacctttacccggttggggattcgtcgccctcgtcgccgctcctcaccgccaaggcgatcttcatctgggtcatgctgccgttccagctggggcttaactccatcaagacgctgacgctcctcgcgccgctcagcatcttcgccgacgtcgtcgatctcggcgccatgggcgtcgtcctcggccaggacgtgtccacctggctcgccaacaagccccccgtgttcgcctccgccggacccacggagatcctctacggcctcggcgtcgccgtctatgccttcgagggcatcggcatggtcctcccgctggaggccgaggccgccgacaagcgcaagttcggcggcacgctcgcgctgtccatggcgttcatcgccgtcatgtacgggctgttcggcgccatgggttacctcgcgttcggcgcggccacgcgggacatcatcaccaccaacctcggcaccgggtggctgtccgtcaccgtgcagctgggtctctgcatcaacctcttcttcaccatgccggtgatgatgaacccggtctacgaggtcgccgagcggctgctctgccgcaagcgctacgcctggtggctgcgctggctcctcgtcatggtcgtcgggctcatggccatgctcgtgcccaacttcgccgacttcctctccctcgtcgggagcagcgtctgcgtcctgctcgggttcgtgctgccggcggcgttccacctcaaggtgttcggcgctgaggtcgggtggcccgggctcgccggcgacgtcgccgtcatcgtcgt

SEQ ID NO: 22683 - DNA, 7753 bp, Oryza sativa
aaaaaaaatcctttttatatagaagtttctctaaaaactcaaataaacatatttttcaagttggtagtaattaatgtttttttaatcatacgctaatggttcatctcgttttatacaccgtgagttcccacgcaacacctggaatgaacttagcctaagtctggtttggttgtatactaatcttaggttgtgttcggaaggatttgttcccaacacgcacagtgcgtatgaaaaacggaacggtccattagcgcgtgattaattgagtattagcttttttttaaaaaaaagatcaatatgattttttaagcaactttcgtataaaactttttgcaaaaaaaatgcactgtttagcagtttgaaaagcgtacgcgcggaataggatagagaggggttgggaacccactgttccgaacaaagccttaaagcgttttcatgcgctatggtcatctgcccatccttggaaattttccttatgtaaattgctcatcaaaaaatctctacttgcactcaacttgataagttgataaggaagaaaggtgcatgtttctttgagctgtcaatggttgctacatctctttctggggcacaagtaataatcttcctctggcaaagatgagtgctaaatgccagtccaatgggatagttcccttgaaaaagtggccaagcatagatgaattgactgctgtttccatcataggacttggagcaccccatttgggccatgctattgtaatttggaaaaagtccactttagcccattatgtctttgatcttgcaaaaccgtttaaataaggttctttggcagaatggaaggctggttttgctgacgtggcaaattgacgcagtccactcatgctgactagacgcttacatggcaaaacaaatacagccccacatgtcatcctctcctcctcccctctctctctttctctctcccccctttctctccctctcatctcggcacccttgtgctgctcaacaccgtgttcgaggacatcgtctggcttcaccgcatctccttgtcacgctctgacggtgatgacgacaacttgtgtgggctcctcaacattacgcaaaacgagcttgtacagttgtattgttcctcatctgggaccacgtcgcgcgcctgcacaccaacgagggggaggctagcggcgccagggacgagtcattgttacccattggtttaccggcttttaaaggtagcattagtcttgcctgtttgccactgctactattgaaagatgtttttcaaccatgaaaattgtgaagacatttttgcgcaatcgcattagtgatgaaacacttgagggattgtgttgtttgctatgttgagaaacaagaattgatgaaagttaccaaagtgcaataatttgccgatttgagatcttaaaggcacgcagacaaccatcttgaaatgtattttttttcacattctcattctcaatacatatttacattatgttttttactaagtgatctcttctcttttctagacaaaacaatatgtggtattggaggtttttatcctttcttgttttgtaatggtggattaatatttcagtgagcatttcattcctatgcctttttataactctacgtggtagttaattatatactctatatgtcatattggttatcaatattgtgtgttctctagagctatgatatgcataggaccccgaatcattttcgttctaggtttgccactagacgggagggtggaggaggaggacggctggcgttgtaggcggcaccgcatctcttgggagagagttgatggcagcggccgacaggagaggtgcgtggtgactggcgaggagaagctcgaggaccggcggacgcatcctcgcccacctcaactcccaccagccgctcacgcacttcgcctctctcgaggagaaccttgtctcccactccgcattgctcgacaaggccttagccgccgcgacacctacacctccgagtccctcgtggtgttggaggcccatgaggccgctgtccccgcgtgcctcgacaagactgaggccgtgttgtccacggatcccccgctcactgattttcagggcacactccaaattgatgtgtggtttcatggacgccgccgcgcaggcgcttcatggcggcatgccaacgggagctcgtcgccgtttggaaagaggttggtccctcattgtcaccacgtcggtcgacccatcccgcctcatgcttgatgtctgtcttgcgaggtacccaacgaatggttgatggtggcgtcgtggtggtccagaacaaggaggatgtgggtgagctgtggcctatcgttgccgggggttcgctcttgttggacatggagcagcggcggtgcaacggccgacgaaacggcggtggaggaagcccgggccgtggcccgacgggcccatggtctctacttccccgctgccgccacaccaaacttctcttccttccccctcctagcaagttgctcgctgacctcctccgccgctgtcgtcgggcacgccgtagaccaaccaccatctcctcgtcctccgattgcccgtgcgcctcattgtcaccacgtccgcctccagctgccgccaggaccgaaggatggggagggagataaggaagaatatattgttttcattgacatgtgggtcccacgtgtttttttttgccacactagcgccacattggccaaaaccaccctcaatactgccttgggacagaatgtaatccggttttgtaagattagagatatgttatatatggtattccggtttagggatggttttaaaacttgacgataagatgagaaatctcaaatgagctttttccttgtaatttcattgcttaatgaaatatgcattatctagaatttttggcctttcctatggatcatgcatagatggatgttttaccggttctcttttccatcttgtcagctcttgggtgagtggagctggacgtgtttgggtctatgtgctctaggaatcaacgaaaaggaccacacattgacagtttcttcatattccttcttgtctttgtcatgtttgaacaacctgagttgcaaagttaatcagaaagttcagagcagaacactaaccagaacttcaggatagagcggagagcagcactacagcgcacaaccatgagaaatcagtgatatctatcgaacacgtacttttagtggtaagttgttttgttattttgaatattctgttagataaatccggcatatatataacacaacgtaaatgctatgagaaatgaaaatgaggaattttacagtactttttaaggatgataaaattactcaatggaaatagttggatatctgatatccccaagtttacaccaccatatgtttatttgattcaaccatagagtcacttgatttgtaggactgaaaactattttactagaccctgcttaactcaaatagtcaactattttactagaccctgcttaactcaaatagtcaaattcaatacaaactgctactactgaaaaagtttaaagctgtatttttttttgacacggggttattcttcgatcaccttgtgatgtgagcaatgaagtcctccagatcattgcgcgatgaacggacggcatcaccgagcgccttcgcgcgctgccgcaccgccaatccttcatcggaggccatcatcttcttgatcacctcctgtatagtggccgccggcaaaacctcgccgtgcttctcccatggcctcactaggagacctgccttgaagtatttgcacaccagctccgcgtcccacggctggtcggagtgcatgggccacgccagaatcggcttcccgtggctcatgctctccatggtcgagttccagccgcagtggctcatgaacgccgccgtggcgccgtgcgccaggatctccagctgcggcgcccacccagtgatcaccatccccgtgccttcggtttgcttggagaactcggacagaagcttggcgtgccgggtctcgccctcgccggtgtccgtgaatatgttgccgcggtcggcgtcgcgcatgacccagatgaaccgctgcttgctgccgcgcagtgtcgctgcgagctccgcgacctgctcaactcgaagagagcacgtcgtgccgaacgacacgtagagcacagaatccgggggctgcctgtcgagccagtcaaggcactcgtgtcgccgcctgccctgctccgacgagcccgtgttgagcagtgggttcaacggaccgattgcgaagagcttcttgccgccggcagccagagtctcagccaaatcgtcgatgaaatcgccctcgagtgctcggctcgcgttcgcgaggatgccggcgccggacaaaatcgattccgacgctcgggcacgttcgctcgcgtagtccaggaactcctgcgtcatgtaggtttccaagggggcatgattgaggccgttctcacgcaggagccgatgcccggtgtctatgtgaagggcgagggccgacacggctacgcagctcaccgggaacgcctcaccgttgggcagccgcgccgcctcctcgacagcgaaggaattgatggtgtcgcacacgacgacgacccgacggtgggaagcggatagctcgtcaaggagcgccgagagcggggcgcgcgcgtccgcggtgtacgcctcccagaggggcatgaggtgggaggggaagggcgtgtcggcggtggggtcgggaggcggagagacgtacgtggagatgccgaggtcgtggaactggacggagaggagggccttgtcgtcccagccgtgcacgcgcgcccgcgcctggcggagctgcggcgccggcgcagcgtagtggaccgcgagcccgtgcgacgacgacgcgagctggagcgacaggtgcagcacctggttgaggtgaccctgcgccgggaacggcaccgccacgatggccaccttgttcgccgggttccccttctctgccattctccgtgcctctcaatgcctgaatgactgagctgaagtctgaatgaagcctgaaaggtgttaactgttttaacgactaacgaaacgtaattggccgctgcccagtgcccactagctacactagctgcccactagtacgtgtccacgaaaaatctatcgactgaatttgtggctgatttcagtcaaattttttacaccgtccgatcggcatgcatagtgctaggcatctcatagcgtattggatctactttaatatttgtgcatgggccttccgttcagctaaagcaatgagtgggctatagttagtttggcccaaagtttttcatttagcaaaggactaagttcaatttaggtcccttagcttgacatggaatctgattttcatcctaaactgcaataccggatacaacagtccctcaactatcaaaactcaaaactagtgcaaataaggtcctaagccagttcggatggcggtttcggctgatgtggcatctacgtggctgatttgacttggtcttcgtcctatgtgacggtgatagcaaaatatcaaaattaaaattaaatcaaaaggtgggacccacatgtcatcgagtgtttagttaaaaatacagtgggacccatggccacccatcttttctccattctttttctctccccctttcctcgttgtcatcactgtagagacaacatcgtggacgccgctgcgagcgaggagacggcgtcgacgacgaggagtaagctcgcgataccggaaacgcggtcgctggcagagctctggggcggagcagaggggcgggcgggtatcgtggcgaagcaaagcggccgtgggccacgggcggagcagtcaggcggtgggggtggtccccctggtcgatggtggcggcggttgggtctagcaatgacgagggacaacgaaaaggcacccaacatcccaggcagagtgcggcgcgacgaaggggacgaggccggcatgagcagattggcttgagcggcggtggtggcgggtccccctggagcaacatcgacccaccaccgcgggagatgcggtgaccgagatccggagaggacggcgcagtggtggagaagcaatggagttgggggtgccgaagccgtggaggacgatgccagcgatgactcggatggagcaggggtggaaggcgggacgcggtgccagggacgtcgtcttccatgtcgtgcctgccgacgcggccaccgtggcaatgacgatggacgagggcgtggggtgtccacccgacgtggatccatggctctcaaggccatctctcgctgctcccttccctccgcggcggcgtagccctagatagcgttgtcgagttcaccatcgactagtgcgcttgctaccccaggtccaccgaaggcctctcctccgccgctcaccacctcagccgtgtgccacctaccgcatatggggaaggagaaagggaagaggggaggaggagaagggtaggctaaagagtagagaggggatgatgtggaggaagtgggtccactaacatgtgggtcccactattttttgttttattatttgactgatatgtggacccacatattttgctttattttttaattattaaattttgcttcatgtgccacgtcagatgaagacggagtcaaattagccacatagacgtcacgtcaactaaaaccgccatgggacctattttgcatatgttttcactgttgagggacctgttgtatgtggtgttccgattgaaggatgaaaatcggattcgttgataagttaaaggacctttaacaaaaaaaaatagaagtgggttatgaaatactgggcctaaactaagagatatattatgtatatagatatcatattagataaagtctatggtattaatcacatggtagaaagattcgatagattttgattaaaaaatataggcgcatgtcgcatagatactccatttcaaacttaccatacttaatactcactccatctacttttgatagtcatatttcatcttgtcacacagaccaaggataagtaatactacttatcatccatttaaacatgctactagtcatttctcgtaaacaagcgattcattaatatttacatttctggatactcatgtagccaatcttgtgttgaagaatggagagtcatgcattaaatccaagaaagtcattaaaatgataagttgttgaattaaaatatatctatcaattttttttcagatttgtaaatatgactatcaaaaatagatggaggaaatatttaattaaccatacgctaatttttttcaaattttacgtgtggctcataaacttaagctgcgattggttgggccagctggcggctgctgttatgcatcttctgtaccgcgctagcagcaactcggttcagtcgtagtagtagaaatagccgagcacaaatgtactcttttcgtgctaaaataagtgaaaacatgagtgtccatatctaactttaatctttttctaagtcacacgtaaattactactcatattttatattatgatgacaataaaaattctaattataattttttttaaaataagacagatgttaaagttggacacggaaactcgtcccgtgcttattttggaacggtagtaccgtagtagtagtactccataagagcatatgtagtgtggcgtcggtttgttctgacaaaaaaatcgaacgaaatattggttcgatccctgcagtgtgtaatcgattttgatggggcccacaaaaaaaagtctaagtcccacctttcctctctccttcctcccgcgaccaggcggaaaatccgtgtgcgcctgttctctccctcgttc

SEQ ID NO: 22684 - DNA, 3624 bp, Oryza sativa
ggaggagagcaaatcaggtcaaccagctatggatgcaactagatcggatccttcgccgcgctcgtgtggctcgtgctcgcgctcatgtgggctgttgcacatgtcgccgtgcaatcagtatgccgccgcatacggcgctgctagccggcggccgtggatgaaaacctcgccgagggaaaacggaggccgaggatatgcgcttccaaggcgaggatctaccacaccaagggcatcaaggtgattatttttctgtaatctgtatagtcttgttctttctttctttttttgacacccagtcttgttctttcttgctgtgacttgatggctaaatttagttgacaaatgatttcatacgaaaagaaacaacatccagtacatagatttgtaatagaactagtagtacacttgcattgtgtaaagaaaaaacaatttgaaagggatacaatactcagtacatgaaaaaacaagactagctaactagtgctcaggttggttgcctccaaatttgttccatatatgctcagtcaagtcgttttttagtcgatgatgcatgtctttattccgaatagccacacctatttcaagcaccctatcaaatccatgaattggcccttgtccatatccattcagtggtacaggagagcttccctgctcatagttaaagtcagctcggccctcatatgaatccctctcatcctcgacaatcatgttatgcaaaataatgcaagcatacataatctcaccaagagttggttttttccacatacgtgctggggtacatataatggcaaaacgagattgcaaaacaccaaatgcacactctatatcttttcttgtcgattcttgcttttgagcaaataacttgtgcttctcatattgaggcaatttgaatgttttcacaaatgctgcccactcaggatagatgccatcagctaggtagtaacccatgtcatactcattgccattgactgtaaaatgaacatccggtgctatcccttgacgttgtgctgtgaacaatgatgattggttcaacacattgatatcattgttggacccagccacaccaaaaaatgcatgccatatccacaagtcatgtgaggcaacagcttcaagcatgacagtgggcactccatgatccccacgggtatattgtcccttccatgccaccgggcaatttttccactcccaatgcatgcagtcgatacttcccaacataccggggaagccccgagcctctcccacatgaagcaacctctggatgtcttctgcagtgggcctccttaggtattttggcccaaaacaatcaataatacctttgcagaaattaaccaagctctcaatgacagtggtctcagctatttgtaaattttcatcaagtatatcagcagatgttccatatgctaacattcgcaaagcagcagtgcatttgagtaaaggagaaaatccaactttaccaaaagcatcctttctttgctgaaaaaccggagaccaatgactaagagtttgcacaatgtgtagaaatagatgctttttcatcctatacctccaacgaaactgggtatcgttgtacattgggttttctaaaaagtagtaagccttcaaccgatcctcagcatcttgacgctcccttcttatatactttctctgctgggttggtggacctctctgttgcttcttaatttgataactaatgtcctcttcaatctgagtctcaactggatcattgatgtaatcccaaatcaagtcgaatgggataacatcaaagttgctaacctcagaactatcatgttgggagctaggttgtgtggatatttttgtcgatctggtagtatagagtggatgtgggcagctggtggagtagagtgaaagttgggaatgtggagatttggtggatggaagggatctgcacccttcttttgtagacaagcttcacaacggctagtttcacaacggctagttttataacggctagttttacaacggctagtttgcttatagaatattttgcctctaactttactaatttgattcaatgttctttttttttttttgcagattcaagtgttaggccaatataaagtgtacaaccttaggctagagattcaaaaactacacaatagcacacaagattgactcaaggtaacattgggctgcattctcattcatcacaacaattagatgggtacaatataccaattagattggtacattacaataattagatgggtgcattgccaatacaacaaatacttccctacactacttctcaacaccataaatttcattagataagaagtctagcatcttttcatggcgtgctttttgtgactcactgtatgatgaggtgtcaatcattaagagttcattgaactgcttgattttttccatcttcactttctctttgtcagcttcagcctgaatagcaatggcttgagcatgttctcttgcatcagctgccattttttctattgcctcagattttttgatttacatattattgaattgtcccacactttcatctgataaccgacccttccccaacttccctttccccttccccttccgccgctcttttgctgccttctgcccttgtggtcgacaacgttcagcatcagttgcttcatcagtgtctctgtttgaagaagaagtgtaagctcctgatgaagacaccttatttctcttattcataatgtcaacagcaacgtctcgattaagccatttaggttcatccttcaccactctccaccaatactcaaatgcgaagggcttatctgtttccttcacttttttgtattcttcatgaaccaactccataagttgctaatcagaacgtccactttgatatgtcttgcttaactctgaccaacatccatgaaactttgcaacaagtgtgctgattgaattccaatggttcttgcactgcatagctgttcttttccttcctttaggggcatatgtgttgtattcttctgcgacttgcttccagtaatgaggtcccttctttgaattgccattgattgggtcattggagttgttcaaccaagcacttactagtcgcagattgtcttctttcgaccaatgcatcctcacacatttattttcctcgtctgaacatacatcgctccattcctcaattccatttggatctttgcttgtattctgtgcatgagctattggagaagtgaccggagaagctgagtcctcacatcttgatccactaccaccaccaactccaaacaaagccgcagaacccactggtgatgatggaccagtagccatactacccccatgaaagttgccatggacaggaatatcatgttgatagcttgaagctgggaattgctggtaacctggtggaaatccaaatggattgaaattttgtgggtagtactgtggttgaaagttggggctgaacttgtcggtgacatgggaccggaagtatcatgactagaggcttgggcaggagcaatcgcccacgaggcctgaccccctcgggggggtcgggcccgagggtgatgtagccgcccccctctttgtcccccaaggggtcggaccgctcccgtttcggccccgagggctggggcgccccgaccccttgtggattttgcgccgcgtgtatgggtt

SEQ ID NO: 22685 - DNA, 4763 bp, Oryza sativa
ccgatttgtgaccggtctgacaatggtcatgtcgtcagcagacagccatgttcccacgtcgcgcctgcttccggcggaagtggaggtaggtatgggccgtcccatcagaaggtcattcggacagcagccatacaaatctccgtccattaatgaagagaagtcaagttggaaggaagagaggatgagtccccacacaaaagaaagagagagagagatggtgcatgtggtatccccttgaggtataaaaggaggaccttgcccacttagaaaggggggatgatttttaggagaaaaacgatcccggaacgatcgggggcgggctcgcactttgtagcttcttcatacacagatccaccaaaacacaggagtagggtattacgcttctcagcggcccgaacctgtatacatcgcccgtgtcttgtgtgtttccactctcgcgaaccttccacactcagaccaggagcttagaatctcacccagggcccccggccgaaccggcaaaggggggcctgcgcggtctcccggtgaggagccccacgctccgtcatctggcgcgccaggtacggggttctgcgtgtgttcttctaagctctcgcactctttcgtgtgcgccaagcttttcctgttcagcccaatggccgaacaagcaaaggcgcacaacctctctccgagcgttagcggtgacgatggggagccaaacccacgccgtcgagctcgtactccaccgccccctccacgccaaagtcctaggcgggaggaggcgctcgagagggtcgaaggatccgcgacttcgacatccacgggtgatggggaagggcggcgagatggggagcgtcgcctcctcgtctacggcgacggcagcacgccccagggcgcgctccaagctgcgggcgcgctcctacgtcacccgcccattgtccctgacccggagtctccagcccaacgttggctggacgacgtggccaacttggtcatgacggcacggcagcgcctaggtgctggtgggtggtcctctgccaccaagacctctggcgctgctaccaccggctccgtgtcgtcaaggcggagggcgcggcgagcggcggctgttgctcgccattcagccgccactccttcgttagcgcctccgacccaggaagatctgcgtggggggccggatgcccgcatcagtatcgagcgccggcgtaatggccggcgtgctgcccgcgcaacggaaggcgcctcctcgtccggagtgtcacatcaacacggacgcggggatcagccctccgtgcccccggttggtggtgtcggctgtagagcctttgtggcgagccttcggaacgtctgttggcccccaaggttccggcccaccatcgccgaaaagtatgacgggagcgtcaaccccgccgagtttctccaggtctacacgaccgggatcgaggccgccgggggtgacgacagggtcatggcgaatttctttcccatggccctgaagggacaggcgcggggttggctaatgaacttgccacccgcgtcggtccactcctgggaggatttgtgccaacagttcaccatgaactttcaaggcacatatccgcgcccaggtgaagaagcggacctacacgcagtacagcgaagggatgatgagtcacttcgctcgtacattcagcggttctgtcaagtccgcaacaccataccatgcatccctgcacacgcggtgatctacgcgttcaggggggggtgtgcggcacaaccgcatgctcgaaaagatcgcctccaaagagccccagactaccgcggagctctttcagctcgcggaccgagtggctcgtaaggaggaggcatggacctggaaccccttcggttccggtgtggcagctccggccgcccccggatccgctgctcagacagggcggcgtgacaggaggaggaagaagaggtcagcccataccgacgacgagggtcatgtcctcgccgtcgagggcgcttcgcgggccacccgaaaggggaggcctgcgagcgacaaaaagaaggaggccggcgctcccagcagggagcgcccaaccggcaagtggtgcatcgtccacaacacttcccttcacgacctcgcggactgccgcgcagtcaaaagtttggctgagcggacgaggaagtgggaggaggagaggaggcaggagtgccgagagggcaagtccccggcggttccttccggcaatcggcgaagtgaggccaaacagaaggcccccgccgaggacatcaatgatggcgatgatgacctaggtttccaagagcctggggccaccattgccactgtcgatgggggagcgtgtgctcacgtttctcgccggagcctcaaggccatgaagcgagagcttctggccgcggcccctactcatgaggcgacgcgccgggcgcggtggtcggaggttgccctcaccttcgaccagaccgaccacccaccgtgcgttgcccggggaggacagatcgcaatggtggtttcccccactgtttgcaatgtgaagctggggcgtgtcctcattgataggggagcagccctcaacatcctttcccccgcagcctttgacgctatcaaggccccggggatggtgctccggccgtcccagccgattatcggtgtgacgccgggtcacacttggccgctaggtcatatcgacctcccggtcaccttcggtggatccgccaacttccgcacggagcgggtgaactttgatgtggcggacctcagtctgccctacaacgcggtcctagggaggcccgcgttggtgaagttcatggcggcagtccactacgcctacctccagatgaagatgccgggccccggtggccccatctctgtccatggtgacctcaaagtcgcgcttgcttgtatggagcagcgcgcggaccacctcaccgccgcgtccaagcccgagggtggcgacgagaggcttggcacatccgcccccgccgccccgaggcagcggatagtcacatgcgacgaggtcccggtcaaggaggttgccctgggcgacggcccgtccaagaccacacggatcggtggtcttctggacggcaaataggaagacgcgctcgtctctttcctgcgggcaaacgctgacgtcttcgcatggagaccggcggatatgcccggggtccccagggaggtgattgagcaccgtctcgccgtgcggccgggcgcaaggccggtccggcagaaagtacggcggcaggccccggaacgtcaagccttcatccgcgaggaggtggcgcgacttctggaggccggattcatccgcgaggtcatccatccggagtggctggcgaacccggtggtcgttcccaaggcgaacggcaagcttcggatgtgcatcgactacaccgaccttaacaaggcatgtcctaaggacccttaccccctgcctcgcatagatcagattgtcgactccacagcggggtgcgaccttttgtgttttctagatgcatactctggttaccatcagattcgcatggctagggaggatgaggaaaaaaatgcattcattacccccataggaacttattgttatacgacaatgcccttcgggttaaagaatgtaggtcctacttttcaacgtactactcgaatttctttgggtagccaaataggacgtaatgttgaggcttatgtcgatgacttggttgtaaagacgcgcaaccaagagaccttactctcggatctagcggaaacttttgagagtctccgctccgcccgcataaaactgaaccccgataagtgcgtgttcggtgtacctgcgggcaagcttctcgggtttttggtctttgcccgaggcatcgaggccaaccccgagaagatacgagctatagagcggatgcgcccccccagcaagcttagggatgtgcaatgcgtcaccggttgcatggccgccctaagtcggttcatatcgaggctgggagagaaggcgctacccttatttaagctcctcaaacgctccgggccgtttacttggacggaggaagctgaacgtgccctcactcagttgaaggcgtatctcagctctcccccagttctggtcgccccggagccaaatgaacccttgctactctacttagcggcgaccccgcaagtggttagtgcggcgttggttgtggagcgcgatgaggacaatcctcattccgcgcacccccaccctgtgctagcttggcccgggagagagcagggaggagaggcccccgagccgaacggtggcccaaggcccccgacgaccggagcaggccctctgcccgcttgtcagacggtgccaggtgcccccgacccccaggatggcccgagggccactgcgggaaggccgcacctatcgccctctgaccccgaggctaaccctgtgccgactcgacccgggagagagtagggagaagaggcccccgagccgaacggtggcctaaggcccctgacgaccggagttggccctttgcccgcttgtccgacgacgccaggagcccccgacccccaggacggccccgaggccactgtgggaaggccgcccctgtcgtcctccgaccccgaggtcgtcggcacagaagacgagtgcaccccgcgaggccgcttggacaaagagcgccccagggatgtggcccctagcaaagaggatcggccccaccgaaaggtgcagcggcccgtctactttgttagtgaggccttcgggacgccaagacccgataccccaagcccagaagatgctttacgctattctgatggctttgaggaaactgcgccattattt

SEQ ID NO: 22686 - DNA, 4075 bp, Oryza sativa
cgagggactccttgcgggactcagggtggcagctggactggggatccgccgcctcctggtgttaggcgactcccagctggtcgttaaccaggtctgtaaggagtaccggtgctctgacccgcagatggacgcttacgtgcgccaagtacggcgtatggagcgccattttgacgggatagagcttcggcacgtgcccagacgggataacacggttgccgacgaactctcacggctcgcttcctcgcgagcccagaccccaccgggcgcctttgaagaaaggcttgcccagccgtcggcgcgacccgaccccttaggggagacggacgcgcctggcaggcccccgatgcccgtcggagtccaggcctcgggacccgaggggagcgctcccagctcccttagattgattgcttggatcgctgagatccaagcatacctcacagataagactctacccgaggaccgcgaagggagtgaacgcgtccagcgcatctccaaacgctacgtgctggtagaagggaccctctatcggcgcgcggctaacggaatcctcctgaagtgcattcctcgggaacaaggcgtcgagcttcttgccgatatccatgaaggcgaatgcggagcccactccgcctcgcgcaccttggttggcaaagcctttcgacaaggtttctattggccgacagctctcaatgatgcggtcgacctggtccggcgatgcagagcgtgtcaattccacgccaagcaaatccatcagccgacccaggccctgcagatcataccactttcatggccatttgctgtctgggggctcgatatcctgggaccgtttaggcgggccccgggcgggtttgagtatctatatgtcgcgatcgacaagttcactaagtggcccgaggcttatccggtcgtcaagatcgataagcactccacacttaaattcattaagggcatcacagcccggtttggagtgcctaaccgtattattacggataacggcacccaattcactagtgaacttttcggcgattactgcgaagacgtgggcatcaagctctgcttcgcctcacctgcccaccccagaagcaacggccaagtggagcgcgccaatgcggaaatcctcagaggccttaaaaccaagaccttcaacatcctcaagaagcacggcgattcgtggatcgaggagttgccagcggtgctctgggcgaaccgaaccacgccaagccgagcaaccggggaaacgcctttcttcctcgtctacggcgcggaagcggttcgcccatccgagctcaccctgaggtcccctcgggccaccatgtactgcgaggctgatcaagatcagcttcgcagagatgacctcgactacttggaagagcgaaggcggcgcgcggccctccgagccgcgcgctaccagtagagcctgcggcgctaccatcagcgccacgtccgggcccgatcactctgcgtcgacgacctcgtcctacgccgcgtccaaacgcgtgctggattgagcaagctctcaccaatgtgggagggtccgtatcgagtgatcggcgtcccccggccgggctccgttcggctggccacgggcgacggcacagagctgcctaacccgtggaacatcgaacaccttcgtcgcttctacccctaaagggggatcgggtgtcaggtttcgggctcgggccaaccccgcacccccctcgggcgtgcagggttggccgggggctaccacatatgcatattcttatttctcttatatctgtatttcaataaaagcattttcgatttcctaaaggctgtatctgtgctgttgtttccttttgaaggatcttgacttgaaataggtcactcgtgttcaatcctgccctcgggggctcgggtcggctaaaatcgccaaacggggcccagaaccgagccgtgccccggggcgtggtgaactccgggggggaatcggcaaaaacccacaatcgggtcacccataaccctcggtcaccacgctcccggcctggccagtctcgacatgtggatctccccaggcactagccccgacccgagccatttgaggactaggacctgggcacgagcccttgttcaagccaagacacaaaaggatcgcggcacaggcatcctcgtctcatacacacaacaaatagaattgacacaaaaaatttcctctttatttgattgcagattaaattagtctatacaagaagggggcccgaaggcctcggaagaagaaaagaagaaactatttaaagattggcgggggcctggtggcttactccgatgcacccgggtcgccagcctcgtcgccactgtcgcccactccgccgtcatcgtcctcctcgtcggagttgagggcgaacgcgagccgaggggccgaaccctcgaagctgtggacgatatggtcggcggcgtcccggacctgcgcgcgcgcgccatcctcggtcccgggagggaactcgtccagcgccgtccatggggagaagtcgggatccctggcttggtaactcgccagtacgagctccaccgctcctcgggcgaggtccctcgaggatgacttaatcgtcctctcgagctcctcggggagccgttggagagtcccggctatctccgagaggcgctgggcgaggccccctggttggcggcgtacttcgcagtccgcccgccccagaggcccgcctgccggccggcacggtctagacgggagacggcgtcccgaagcatgccgggccctacctcgcctgccaagcggagggcctcaacctccccggcggacgagtctagcgcgccctacaaatcggcgatggtgtgttcggcagctgcgaggcgggcggttaagtcgctttcgcccgcggccgccccgccgctgcgcgccctcgcgtccagctccttctcccgcgcctcgagctcagcggcccgctggttcagcgcggccctctcggcgcgggcaccttccagattacggcgcgcttgttcctcttgcgcagcctcgcggaggacaggctgtccgccagccgttgcgccgcggcctcggcctcctcgagagctcgctcccgctcggtgagcgcgtcctcgcggaggcggagcgcggactcttcttcggcacaggcggcttcgtgcaccgccagtgtgacctcccgaatagcaacggcggcctcgcgatccgccaggtccctctccacggcgcaggcacgctcttccagcgccatggcacgggcctcaagggcttcttcgcgccgccgggatgccacctcggtctccgccgcccgccgttctcgggcagcggcagcgtcaaggaccccccgggcggcgtcgagctttttccctagctccgcctcccagctcccgtattgaaggcggagggtgtcctgcgcctcattcatcacagtggtggcgatgagggcagccccccgctcctcctccacctccttggcgatctcccccagcaccttccgacgggcttcgagctctgagacgtgccggcggtgtgccttgcggcccacctccaccatggcctccaccgagcgacgcccctcttcgacacgtgcccatgcggcgtcgagctccacccgctctgcttgcaaggcctccatctgggcacttaacccgtccaacaccgtggtgttagcgacggccaaggcctgcagaagaggttctgcgctcagtggagcaacggaaggcgtggggaagagccgcctcgaagaggatgccgcgcggcttggcccgccgatggacgtgccggactcggggatgtcccccggacctggtttgtcctgagcgtcgcacgagggagtgagcccaagtgatgcgcccgcggcctcgtcgcgagctgcttcggaagtcgtcgtcgcctcggcctggcgaagtctggcctcctcccgagcggcttcttcagcttggcgagctcggacggccacctgggcggcctcctcggcttcccgtaggcgatccgcggcttctcgccggtcagattcccgcctccgagcctctgtggtcgccgggtcctcggcctcagactggccggacttggaatggcgggagggacgcaacgggatctcgctgaaacagaagaaagacc

SEQ ID NO: 22687 - DNA, 2149 bp, Oryza sativa
ctcgctgaaacagaagaatgaccagaagacaaacaagatggatgagtgaaattccgcgttgagggaatgaatacggccacgatgggcgtgggacgaacctgcgagggggtcggttaaacgaccaccttggaggggaaatgaggtttccccgggatggttctgtcccccccatcttgcggggccgtttcttcttccgctccccctcgagctgcgacgtcggcgtggccccctccgggcgcctgctgctggcacgcgccgccccgccccctcggggaggagatgggggaggggttccttcctgcttcctcttcccccgggcgtcggcagggcggccgctccccgggcccccgtcgcggggcccagaagcacgaccccctcccggggtagattgttcccccctgcggctcccgcccgcgccatcgtggcctcgaggagcccgctcctccgacgccccgaccgcctgcatgatggtcaggatggaggcgcggtctggatcgctgcagagggggacgactccttgaggaatgagggatgcctccacggagctgagattcagcacccgttggaccactatcttgaagtcctcaggagcccagtctcatctgactccctggtgggtcctcatacagtcctcggacccagtgtactcccaggcgccccgggcgcgccgctggagtggcgcgatccggcgacgaagatagtcgccgaacaccatggcccctgtgagcccctgggatcgcaggcccgccaggcggtcgaggacggcgtcgtagccatctcccagatctaccggcgcccgccagttggaggcctgcgctggaggctggctcggaagtcggaggcgcgcttcgtcggcgaggggggtgtagaaccagtcgctcttccagtcatcccacttcttgcggaggacgcagggaatgtagcggttcagcaccggcccccgcggctggaagtagcagccaccaaccaccgacggcggcgacaccggctgtacggtgaagaaccaccggaacagccgaagggatgggcgcaccccgatgaacatctcgcacaggtgcgcgaagatggccaatgtcattaccgcgttgggggtgaggtgcgccatctggagatcgtaaaactccagaacatccatgaagaaagaagaaaatggcggaaccagccctgccatagcaaaagggaggaagaagacggaccgccccgggtagcgtggcgccgggcatccctcgcccagcgagactatctcccggctggtggcagattccggcatgaagcggcgcggcagcccggcctgtctctcgctcacgatgcgggaaggcggcagcacgctaccgtcaagcggagcggagccccgtgccatgacgccggaagaagagatgtttgagagcgagcgcgtgtggcgaaggtagggcacaggaaacaaggagttagggcacaagcggcgaagacaaggggaataatggcgagaggaaggaagcaaatctcttcctcggcgactttatacccttgccaacgctatgcccggctcctcgtttctcgcgcccactatctgccccctcgtttctcgcgcccacgcttccactaatcccattcgcccgtttgcggtgcatgaggtggatatgcggctgtggcagtcgagatggaacatctcgtgcgcgcgttaattacgctcgccgaccgaagcgccatcaccatatctccaggcaaaacgaaccggctcgtcccgattcgcgtgttactcgagtaatgtggcagtcttgaagagaccgctcattattgacagccgagtaaccattgccgatgtgcgtgatttgcgaccgttgggtttctgcccaactgtggagaccggtcccacctgtcaccaggccttaggaagtggcgtcacgcccgaccgcttccctcgaggagggcgatcgccctggcataacgccgggggctactgtcggtgacatgggaccgggagtatcatgactagaggtttgggcaggagcaatcgcccacgaggcctgaccccctcgggggggtcgggcccgagggtgatgtagccgcccccctctttgtcccccgaggggtcggaccgctcccgtttcggccccgagggctggggcgccccgacccccttgtggattttgcgccgcgtgcatgggtt

SEQ ID NO: 22688 - DNA, 12879 bp, Oryza sativa
gtttggacgagcgcgtcacgccgcatgtatcgcagtgcagcgcgcttgttcatccgatctgtgatcagtcacagaccggtcagatcgtgggttaggtggcgacaggtggtctgacgcacgcctcgccccatcccgtcaggacgagagcctccaagcactcgtccctagccggagccggcgtgttagctcctggagatggctcgttggttccggtcagatatatgccaggcttcatcctaaccattacagacaagatattgtatgaagaagggcgaacatgcagattgttaaactgacacgtggtggacaagaatgaccgatttgtgaccggtctgacaatggtcatgtcgtcagcagacagccatgttcccacgtcgcgcctgcttccggcggaagtggaggtaggtatgggccgtcccatcagaaggtcattcggacagcagccatacaaatctccgtccattaatgaagagaagtcaagttggaaggaagagaggatgagtccccacacaaaagaaagagagagagatggtgcatgtggtatccccttgaggtataaaaggaggaccttgcccacttagaaaggggggatgatttttaggagaaaaacgatcccggaacgattgggggcgggctcgcactttgtagcttcttcatacacagatccaccaaaacacaggagtagggtattacgcttctcagcggcccgaacctgtatacatcgcccgtgtcttgtgtgtttccactctcgcgaaccttccacactcagaccaggagcttagaatctcacccagggcccccggccgaaccggcaaaggggggcctgcgcggtctcccggtgaggagccccacgctccgtcaaaactgatgggtgaaaaattcatggaaaaatagggtgagaaaccatgggattgctggttgtttgtgttttgaaaactatggggttgttggttggttgggttttgaggatctgaacttgagattgcagagttcaaaaattttgtaaaactagatgtggagttgttgtccatatttgagggtcaaatttgtggagaaatgtatgtgaatcaatctatgtaaacttgtgtatatatagcagaacacaacgccccaacggctagctaggttttacaacggtaacatgccaacaaatattatttaaatgccttctgttcgacctccaaactcaatttgatttttgctctgacacggctctgacacataccagccgactcccactatgtggttggttcggtttttttttggtctctaaatcgatttcaacgacacactacagatgctctaaaccatcagtgctagagtggtaggttgtcgtcttgtcgatgtctgcaataaaccatggcaagcgacctggctttggcggctctggtcggaggtcattgcagtgaggaaggagaaagatgcattggagcaataggtgtcgtagcagcagaggccgacacacaccccttgtcactgtgaccccgaattttaaaagtttttgttatagaaactaaaactcatttacttaaatcatgtaattcaaatagtcgcattcaaaacaaaactattactcaggctctgtttagatccaaacttcgaactttttccatcatatcaatctgttatacacacacaactcttcagtcacatcgtaccaatttcaaactaaatttccaactttgtaagcaactaaacaaagcctcacacacaaagtttgaagcccttttatttaaggtccggcgtgagcggtgcggtcgaattttattaagccaaagaaagtttaacaggagattgaatcatataccctccacatttagattgaaaaatgagggtatatgattaatttttacctttcggaacatggcgttcttcgatcatcttgtgatatgatcaacgaagtcctcaagatcattgcgcgatgaacggacggcatggccgagggccttcgcgcgctgccgcaccgccaacccttcttcagatgccatcatcttttcgatcaccgcttgtatggttgtcgccggcaccacctcaccgtgcttctcccatggccttaccaagaatccggccttgaggtagttgcacaccagctccgcgtcccacggctggtccgagtgcatgggccacgccagaatcggcttcccgtggctcaggctctccatggtggagttccagccgcagtggctcatgaacgccgccgtggcgccgtgcgccaggatctccagctgcggcgcccacccggtgatcaccaggcccgtgccttcggtttccttgcagaactcggacagaagcttggcgtaccggctctcgctctcgccggagcccgcgaatatgttgccgcggtcggcgtcgcgcagcacccagatgaaccgctgcttgctgccgcgcagtgccgcggcgagctccgcgacctgctccacccgaagagaggacgtcgtgccgaacgacacgtagagcacggattccggtggctgcctgtcgagccagtcaaggcactcgtgtcgccgccggccctgcttcaatgcgcccgtgtcgagcagtgggtttaacggcccgatcgcgaagagcttcttgctgctggcatccaatctctcggcgaaaacgtcgatgaattcaccctcgagcgcgcggcacgcgttcgcgaggatgccggcgcaggacgagatcgactgcgccgctcttgctcgctgttgctcgtagtccatgaactccttggtcaagtaggtatccatgggaatgaagcggaggccgttctcgcgcaggagccggtgcccggggtcgatgctcccggtggcggacgacacggctacgcagttacacacgaatgcctcgccgttgggcagccgcgccgcctccttgacggcgaaggagttcatgatgtcgcagatgacgacgacccggcggtaggacgcggacagctcgccaaggagcgccgagagcggggcgcgcgcgtccgcggtgtacgcctcccagaggggcatgaggtgggaggggaagggcgcgtcggcggtgggatcgggtggcggagagacgtacgtggagacgccgaggtcgtggaactggacggagaggagggccttgtcgtcccagccgtgcacgcgcgcccgcgcctggcggagctgcggcgccggcgcagcgtagtgcaccgtgagcccgtgcgacgacgacgcgagctgcagcgacaggtgcaggagctggttgaggtggccctgcgccgggaacggcacggccacgatggcgaccgcatccgctgggtttcccttcgctgccattgtcggcgtcgtccgagtgggagagcaagtaaaatgcctgaattggctggatgatgatttgctgactgcagaagtatgcgggcgtacagctataaattgtgcttggtggtgaccggtgataacaaagattggaattggctactaccccatactagctagccaacaaatcgtggatccacatgatacttgcgattcattgagcccggctggcggatgcaaccacgcaacttcggcagtgtctcgttggcagtagtgcctgtccagtgtagtagtaggctagtagaagtagccaagcgcaaagttatggtgcttttttttaacgaaaagctttttccccccggtttctccgattaaacggaagtcgcacaaacgcacggtaggcataccacacggctgtgttcgttccacctggttcccaacctctctcattcgttttccgcgtacgtttttcaaacggctaaacgttgcattttttacaaaatatttatatacgaaagttgcttaaaaaattatattgatccaattttttaagcaaatatttaattaatcacgtgctaatagaccgctctatttttccgtgcttggagggtaccgttcccaaccagggaaacgaacgcagccttaggcctggtttagttccctaaatttttttctcaaaaacatcacatcgaatcattgaacacatacatagagcattaaatatagattaaaaaaactaattgcacagttaggaggaaatcgtgagacaaatcttttgagcctaattagttcatgattagccatacgtactacagtaacccacatgtgtttgtgttaatgatggattaattaggctcaaaagattcgtctcgcggtttccagactagttatgaaattagttttttcattcgtgtctaaaaaattatcttttcacgaactaaacagcccgttacacacctgcgtgccccccccccccctccctcctccccctaaaaaaacacaagtacaaagagatgaaaaccaatgggtatatccttgttctaactcatgtaatatttgtgggtaagagaatatatgaatatgaatgaatcatagtggctgaagttacgcacaagtgactggacaatcataccaccgatgctttagaatgaaaaataattatagggaaataaagcatggaaagttgacataaatgattttagactcttaggggatgtcacctattttcttggatgtcatctaaataattatttttaataaaaaataataagtgtcagggttacggataaggtataccctctacccttggatgtatgctatacggcaatgcggtatatcggtgcatatacggatgttctctgaatacgctaaggaagtccatcacgaagtctgccaatgaaaaggttcctacccgtataggactgggttgttactatatcgtgcagggtccgatgtctccgagtcctacttggagaccgcctgacctgcgatataaaagggaacccccgggggacctaagggatcgaatctcatagcctacacaacgaccacagcctacgaagccgaagactatagtagccaagtcaccgggtgatctagtcgaatcaactcgactacgatctcgtcggtaccactgagttctactattccctttgtaatctgtggttatttccatataatcccatatcaactggattagggctattacctgctaaggggcctgaaccagtataatctttgtctcttgtttccttgatgtcgtactacgtagatcctcgtaccagcgtaccccaataccctctatatctggcctaccggtacccaccgtcgacagtggcgcgccaggtagggggacttggtgctcaaggttctactactatgacatcgagcttcgtcgacaacagagtcaacaccggccccatccaaggaatccctgcttcaacaatgctggtgtcgactcaagtcagcgaaatcgtcttcctggtttacaccacggtgccaatctcggctggtccatcaataaccggaactcaggtactcaagtcgaccatgtcgaggctccgcttgtcgcattggaccgccagcttcgcgttcccttagatagtgattgttcccttcgacccgggcatcttgagtacctgatacgcgtagtgagatgcggccatgaacttcgcgagtggcgttcttctgatgatcccttacccagacgacacctagcgttgaaacctatcctcatgtctctttacaccgtcttgacaaggcctccgaagaacctaagtgaacttcggctggggacgcccagagctgataaggccttgttggatccttcagagacgaaagaccatgtaagatctggtcgtgtaagagttctcgccgtgcgtattaaccaagccgtgtaatcggaaatggatttttccaacttcacggctaggggctaggatcagtgcttattcaactaaggcaagtcgagagtccaagagccttatctttcgagaggagttctccgacgacaaggctgggggctagggagagtgtataactcaagtgactgatcgaagtcgagaagtgagaagacactcgtgcacaccgcatccaacgtaagaaagcttagttagatagatttcctttctatttcacaagcattccttacagatcgcaaagaattccagaatatattacttttttcttaagatgtttgtcacaaatatataggcactaccaggaaggccaacgccaatccattgactggaagatcttctccgctagcggagccatcgacttcgctaggtcgtctatctccgcaagattcctccgagaacgggaaaacccttcgtgaaggaactcgaggtgcaactgcggacgatgatctcgtatacacgccagcacgtgccctccggcgtatcggctcgatcgatgacaatcctgcttcagggcctcgtcgatatgcccgccgatgccttcaagctgagcacaagccccgttcagccacgagatgtagccagccgctgattcctcgggatccccgcgaggtactcggaagctctctgcagacaacggccatggttgtgcaacaactcctaaggtacgagttgaaccataccttgcgaccttggagcgcctccagagcccggcccctcttcacctccaatatagtcctctcaagttcggcgacctcgaacttcgtcctccaatactggatgcgacggtcgcgatcagcaagcatactctcgaggtctgctcaacatgcaaacacctaagtcaagctaacctaagtcaagctaatcaagacagacgaggtaaaggaaagggaaccgtcaagaaccaacctaaagaagtcgacgccacgtccgtctcctcgggcagatcctggtctatgccgtcccacggcacgtacggctcgagctcaagtgccagagcgtataggcaattcaggctgcccgcgctgctggacatcctcgacatcgacatctctacaaacaacagacaaagtacccggaatcaaaacgccaaagaaaactaaggcaacgattgcacacacaaaagtagtcggaaccaacgaaaagttttacaaagcgcgattggttaaggggtacaggcaagcggcggccttactcttcaaaaagcgggaggacggactcccccagatcgctgacttcttccatcacatccttgcgcgcgtcgctagccgccccctgatccaggatcttctgaagatcgagtttaggatacgccagcctcacacacgcaaggacatggcacgccccggtatagctcccgttggacatctcctctccgatcctggccgcgtgcttggaggggatcgcctccatcaccatcgccagttccgcaaatgaagtcgtcagcgagaactcgttgggattcgtcgggatggtggtcttgatgccgcactccccggcgagctggtgcagaccagtataggtgacccgcagcgagccacggatttccgacaagttgttctcgagctccgacatacggtgctcgagcccttgccgttgtcgctcattgctggccaccagctccctcatcttctggaggtcctcgcgaacctccgccaagtcgcgcgttagcctgtcggcgcgctcattcgccgccgccgccgccgccgccctcgcctccgcgatctcgcgactaatgccgcaggcaccagcctcgaggatgcgccccatctcgacctggagctccacccaggtgagggaggcagccggcgggccttgaccagccgcgatatcgctagccgggccgctgggcgtcacctcacggctcctgggcacgaccacgacctcggttgaggccactgcaggagacacgctggagtttgctccagacccatcttgcgccgccttcgcccgcgccctacgaaagatggccatgtcggtcatcgcaacaagacgataaaatctgattaagtcaagagcctcaaatttcgtccacttacttctcgccgagtgtcaccagcctctgccgtcgcggaggcgggggagacgcatccgaggcctaagtaaaccgagtacgacatgaggacgacattctccgactacgtaaataaatgacctaggaagcttaccgatggagtgggcgtcttccggcggttgccaagcacagaggaaaatttcctccccgtcttcggaaccttgccgccgctggtcgttgcagcagcagcggcaacagccgcatcggacgcctcccgggcaatgttctcccgcaacgaggccgccgtctgatggtccacgagcggcccgataacgtcagtcagggggagagcctgcgcaacatgaagtcacgatgcggtctaagagttgaaagggaaaggatcgttgactacactcacgttgatcgcggcttcacgctcagccgcctccctctcgcaaagaggggtggggacgttgctcgccgtcgtgggaccgctgatcatcacctgggcaacacggtgctccacggttgcgccgctcagacctgcagatcgagaaccaagtttcgacaagtcaggaggaatgcacataaagggagaggaacctaaaatacaagaaaaataccccgaggagaaacccgggtcgtgtcctccggcccagagtagtcaaaggctgggtggactcgagcctagagcggctggatctgtctaccaacgaagtcggcagcgacttcataccctgacaacccccgtactcggaggtcatcaatgatatcgatgaaagattggagggatggggtcaaggtgggtttggtagtccaagatggagtcttgtctggttgctcctcaggaacaatgaagactgggtccgaatcttttatctgaagatagaaccacctcccccggcatttgctgcgagatgaggggcactggaaggggatgtatcgcgacttcaggccatcccgaagtcggaaaccaacacattcggacacctttttaggttccatccagcgcaactcatagtaaaagcggaagaggtcgagaaacggctctaccccaatgtaggcctaacagatatgagagaaaatgctaagaaaggctatggagttggggttcagatgaagcagagagagaccgtagaagttcaagatgagaagaaaaaactcggaaggcaggggaagaaaaccacagagaatgtagtcctcaaccgcaaccatgcggcccaggacgggttcaggctcagtacctcccggttccctctccatggtcccgcgaccggggagagcgccctcctcttgcaatttcttcaaggacgcgcggctggaggtggacttgtcaagatccattgccgagggggatcgccggagaagaagccgaagcaggcgaacttagggtttgtgtgggagcggagaagacaaagagcgtttggaggcaagaaatttctcacaaccgccggactccaaaatgtatttccaaaacgcccttaaataggcgcactaccgatggtgcgaattccaaggaaagaagagagatggccgccggagatttctgggtccgttgcgcgaggcggtgtgacatcccggcctagggcttaataggattactagaatactcatatcaacaagttgcaacttcttttccggaagccaatctctaaagaactccagggttaagcgtgcttggtttggagcaatttgggatgggtgactgaccgggatcctgggtgcgcacgagtgaggacaaaatgtgtagaaaagacttgtgttggtctgtgagggcagtctatgacttatgaaagctgccagatgtaagcgggcccggcctgggagaggtggggcgttaaaaagtggtatcagagccgactcttgcggtttcacggacacatgtgtcacagttgcgcaggcatggtgcgcatggctggtgtggaccaggagtagtcacacagcatggcatatacgctgtcactggacacacggacgttgccagagaggacgttcctggcctggggagttgatcgacgggggcgtcgatctcttttaagggggtgaggatgtaacatcccggcctaggacttaataggattactagaatactcatatgcaacttcttttccggaagccaatctctaaagaactccaggattaagcgtgtttggcttggagcaatttgggatgggtgaccgaccgggatcctgggtgcgcacgagtgaggacaaagtgtgagcaatttgggatgggtgaccgaccgggatcctgagtgcgcacgagtggggacaaagtgtgcagaaaagacttgtgttggtctgtgagggcagtctatgacctatgaaagctgccagatgtaagcgggcccggcctgggagaggcggggcgttacaggcggtttattggacttcaatttaaattcactcataaccgttggacttcgcatggtgttgtcgaacactctttgtctctacggtcctcacaccgagatcgaccagttgagaacgacaacaatttcgacatcagaagtcgcgattggttacatgagttcatttaagtagaagtcgggggctactgtcagggttacggataaggtataccctctacccttggatgtgtgctatacggcaatgcggtatatcggtgcatatacggacgttctctgaatatgctaaggaagtccatcacgaagtctgccaatggaaaggttcttacccgtataggactgggtcgttaatatatcgtgcagggtccgatgtctccgagtcctacttaaagaccgcctgacctgcgatataaaagggaccccccggggggacctaaggggtcgaatctcatagcctacacaacgtccacaacctacgaagccgaagactataggagccaagtcgccgggtgatctagtcgaatcaactcgactacgatctcatcggtaccactgagttctactattccctttgtaatctgtggttatttccatataatcccatatcaactggattagggctattacttgttaaggagcctgaaccagtataatctttgtctattgtttccttgatgtcgtactacgtaaatcctcgtaccagcgtaccccaataccctatatatccggtctacgggtacccaccgtcgacaacaagatatattaatatgtaatgtgttccacgtaaatttaaattcattgtttagggtaaccaaaaaaacaaataaaattttactccattcgttccatccgtttcatattctaagtctttctagcagtgcccacattcatatatgtctagattcattaacatatataaatatatatatatatatatatatatatatatatatatatatatatatatatatatgaatgtgggcaatgctagaaagtcttataatatgaaatgaaggaagtagctaatatgtgtattgaaaaatattagttaatttgaatttatatgtttgtaagagtgattatcacttattaaatatcatatcagatattttcaaatgcaaataggctgtactctccgtccggaaagcttgatgttccagatattctaagacaaattagcttatagtgtaaattaccgatccatcctccatttataaactgctgttagagttaatgagcatgcactcgattcaaatgagtgaaccagaatgatccaagggaaaaactaatggctcaaaaagtttgaaacaatcacctttttggaatattttgtgaggtcattctcaacccaagacactatatatagttttcataaactccacatcatcaaaaaaaatagtactagacactactcttctaatgtaaacaccactatccataaaatttaatgctacttatctcacatgatgtattggatgttgtgtgcaagatatgatttccttctctttcctcatttattcacttgcaacatcatttttttatcataggtgacagcctatttaatgctatggacactattctagtcattgggttgggaatggcatgagccgtaaaacgctattctttatagcaatgaggaagtatggcataaacgaggcatatcatagatagactaaaatagtttgccgagagtggaccgaccaaggtagttggatttatttccaacggttgtccttttttctttgggaaaatatgtagtgcaaatcacatatgtagtagaaacttggaaactgtctttggattgaaaaatggacgttcgagatttatccacgtcaccatgagtaaaaaaaattactttttactcataagcaaatctgcgagtaatttttttactcatggtgacgtggatgaatctcggatgtctatttttgatccaacagtaattttcaggttttcactgtatacgtggtttccaacatatattttcccttttccttctacctctggaacgaacgagcagcaggtgacagagctaggtaaacctgtcaatggacgaaagttacaggcaagtaaccatgtagcaaacgtgcgcaggctaccagactgagcgaccgaccacgtcaaggttggccatagcaacactgttttgccgagtacatacttccttgttcgtatgacccattgcactgggattaccttaccaatgtggcacggcaatcttattgcaagtagagtacaccagtgcatatgttagagaacacagacactaactctgaatatgttctactagttttcagaaaaaaaatgaatatgttctgaaacctgttaggaccgaccatccgtggccggtggcaggtatacccccacaaagagttagagatctacccaatcattttcaccaaatttgcaaccgacctgtacagttgtaaccattaatcattctaatcctatcttcttgcacaacgattgggggaaaaaaatcagtgcttgacacaatcgattcggggtggataaggtgagcactgaaagttcttcagatagtaccattcatgtggctatccaaaaccagcaagcactgactttactacgtttccaaagattcagccccaggttggcaacacaaactaccttccttttgaaaccgcatcatgtttagcaccttccatatactgtttccacctcatataactttgatcaagtttcaggctttcagcctaggatacacagaaaaaggcaatctcccgatttgcttcagttgcacgtcacccttggcgagatgacatggaggggcctcgaggaaaaggcacactgagacgaaccaaacaacaa

SEQ ID NO: 22689 - DNA, 1519 bp, Oryza sativa
ttggaatatgatatattatttaaaataaatgctcagctagaatcctagaaaggctaagaaattcttgctcgaaacaatatttgaacatggctgaaactactatttcttttctaaataatgttgtgttaaccgacactggttgacattcagcaagaacattcaacctttcatttgatgttccttaaacacaggtcctgattctgaacgaagagagcgaatcacgaattgtaaagatggttttgcctctcacagaagcctgccaaggaatggaacttgtttcagggcttagtgacccaaataagcacaaacaaagtgctcttgttctcttgttgaaatctggtcaaatttgcttatatgatgattcagagattgagcgctaccttcttcatgctcagtcaagatcgccactagcacttccaaactattcatctgtgaagctaccttatggtgatccaagcatcaccgctgcaaagttttataccagtagccctacagctgcgacttctttggatgaggcatgtatagatttgtaaattacacctatcaaacaactatgaatgctttgaccagatagcgtttttaatgggctttgaccaaatagcttcatattttgatgatggacaggactatttttcatcattggccaccaaatacccatggttcctttcaatgaaagataaacatcagacttccacaggttctgccgacattcataagaccagaaatctctatgtaactggacatcttgatggaaccataaggttttgggatgcatcatgtcctcttttactgcagaatttaatgataaagcaccaggtgacttaaaactccaattatttttgctggccactctctaattatgtattttgctgaaaattctctagttatgcattttgcacacaaattactacgttttacttcgttctaacaactcattattgttattgtttcagaatgaagagaatagtccaagtggcacccctattacatcattacagtttgatatgtcatccagcattctaatctgtggggataggagtggaacggtaagctatttcatggatataaggtgaattataatatggttttaatacacttccagtgcagtaaaactttttttcttcctgttaggtccgtataatcacattcagaaaggactccagcgataacatattctcctttttacatggtataatttactctctgtcttgctaatatcaacagttggtgcttgccttactatgtggttaggtgttcattgtccaaagaatttgcactgcgatactatctatgctcgtgctagctacataatttactccatcagttaattttgtggaacatggaaactaatggaaacatgtccgatcttagaacttcttgatttcaccatctggtccaaatacctttgttaatggtacctttaacatatttttcaagtgcttgtatgttattttaacacattcatcttttacatggactggtcagcgaagcaaggggagagctataatgtcagatgtat

SEQ ID NO: 22690 - DNA, 735 bp, Oryza sativa
ccggggaagaagagagggagacacaaggatgggggcggcgcagagctcctcgtagactcctcgtgctcgccggcctcctgggcacgttcggcggaagaacgagcgacgacggcagcgagcagccaggcggcagggggcggcaagggtgctgtgggtggaaacgggagggaacgagagggaggttgagacggtgagggggctcgggttttatagcggaagcgaggtcggttcgaggcgggagcgagcggcaaaggcggttcgtgggcgacgtggagacggcgacggcgtggatgcaagggacgatggaggcggtggatcggacggcgaaaaatcgggtcacgagcacgggtggggcaatatggctcggtcaaggtgggggcactggcgcggcgggacgtcgtcggtgtcctctgcctccgcgcgcaagaagacaaggacgggagagagagaggccgggcttagaagggaaaaagggagggacaacggtgaaaagggaagcctctcccttccgttttgggcggcgggcaggcaaggcgcgtgggagcggcgtccttgccgttcggctatgcgcgagcgcgcgggaaacggcgacaattttggggcggcgtcagcgggaagcgacgccgagagagagagaaaggagacggcgctgtctctcgctcccgaacaggtgcgacgcacgcgcgagagagaggcggaccggggaagggagaaacggcccagcgaccaagaggg

SEQ ID NO: 22691 - DNA, 690 bp, Oryza sativa
attcatagaatcaccagtagatgaggcagacagtgataaatcaaaatccagtgcaaaataggcaccattgagctatgcatattagaacggccaaccaaaagtgtctcgcttaaatgaagaatgaataaggttgacagttacagacatatcctcaggtgaaattatgtaccttcaagcattctatgacaagaacctcacaccaggagaagagatgccaaaatttctcccattgttttctcaggtacatcagtgctatcttctaactctgctccggactggagaattgcagcatctaatactaactttctccttgctatctcatatatgttttcatcaaccgaaccctttgtcactagcctgaaagaaaatgaaatcatcactgttaccatgttgtagagttcaatatttatgaatttatcatcaccacgtcgatatgaatatggtgatatgctcacaatctgaatcacaaaaaacataagtaaccgataaaatatccaaatgaacataattagacatagcacatattacctatagatagtgacaggtttctgttgtccaatgcgatggcagcgatcttcagcttgccgatccatctgggggttgaaatccatgtcatgtattatcactgtatcagctcctattaaattcagaccctggcctccagctcttgtggaaagcaaacatgcaaat

SEQ ID NO: 22692 - DNA, 685 bp, Oryza sativa
gtttgtcagtgaactgggaatacgcccatgaaagaagttgacaggcaattcaaatatctcaagattgggcagagcgctaccgagattggatggaacctctccacttagatgattaaggccaaggctaaggttaatgagagtagaaagattcaagaggacttgtggaaagctacctgacagttgattagaacccacataaagagtctgaaggttgggtaacttcgcaaactcattcggaatgttcccttctatgtgattatacacgcaactaagcacattcagtgaggtgatgttggcaagagaagcagggattgtacctgtcagattattgattgaaagttgcagctgttgaagattaggaggccaatctgcaggaaactgcccagttaggttgttcctgtgcacccacagaaccttgagctctgagcagtttgcaaagcttggtatgcttccttgcagtgtgttgccactcaagtaaagatactggaggcgacgcaaatgtccaagggaaggagggatttctccagagagtgcatttttgagcagtgcaagatacttcaggaatgttaggttccaagtgaaggagagatgtgccctactagagctcggtttgtaagattaagggaggtgacacgacctggattcttcagactgcatgagacaccttcccagctgcagtagttgg

SEQ ID NO: 22693 - DNA, 2040 bp, Oryza sativa
gtcatattatcatccaaaagaatattggtgggcttgatatcacaatggataattgtcccttgatggttgtggtgtaggtaagccaatgcatcagaaacattgaccacaatgcttaacctttgagctagtgaaatatagcacagatctgaagatgtttcgtcgtgtggagttgagtacaacaatttatgcaagtctcctcgtggcatgaattcatataccagtgctttgaagtcatttccacttgaatcaatgcttgagcacgccgtcaagacaggaaccagattgcgatgccgcacatttctcaaagcattacactctgcaatgaagctcttttgtgctccctttgtctctagactgaagactttgatagcaactacatttatgtcttgaaataactgtccttggtatacagaaccatatcttccttcgccaatcaaattggatgttgagaacccattagttgctctggcaagatctttataagaaactttgggaaattctctaccaaatgagggcaaagatatcgagtttgtcctttgttttcccttccaaatcaaatacaggaccaatatcactacggcaagtgtcaccatgctagctaatgggatcactactttcagtagtactggtagcttgcctttagttgtatttgaaggtgtgataggacattcaggtaagtgtaactccagtgcacctccacaaagagccaaatttccatcaatttgcatggaagttgaattcttgaagattcctttagttgggacctgacctgtaagatggttgaatgacaaatctatctgttcaaggagttgaaggtcaccaagtgacactggtattgatccacttaacttattgtgtgacaggttgagaaattttaggctaattaatttgccgaacgaggtgggaatacctccactaaaattattttggtcaagctcaacatgttgcaaattttcacagttactcaaagtattaggtatatctcctgacagattattggatgaaagctgcaaatatatgagctgcttggcattccctatttctgtaggaagttctccactgagattgtttaatgcaaacccaacttccgctattgttggaatcctgaagatctcctttggcacaccaccatgaagattgttatcagtaatggtgattgttgttaggaactgaaggtttccaaagcttaaggtatgtttccaatgaactgatttgtgtctagaagaatctctgtcaagtgtgacagattggaaagggaggagggaagataccctgtaaaactgttggtagacaagcttagtttctgcaatgtcttcagacctcctagccattgtggtacagaacctgaaaatcggttgtaatctagtccaagaattatcaggttgggaagatttgcaatgcctgaaggaaaactccctgacaattgattctgtcccaagaaaagatactgtagctgaactgaaaaattgcctaatgaacctggtacctctccttccatttgattcctcgctatagagattccttgtagctgagtacaattggctacgctatccatgaactcccagtcttgcttgctacgagcatggagctggttcatctcaagatttaaccttgtaagattggcaagcttgccaatggaggcaggtacaaccccagtaaagttattttcagatatatcaatcttgaccagattggaagcattcgccaacgaagaagggatgtctccatgaaagaagttgatgccaatggcaatctgcctaagattgggcagcaagctaccgatgcccgatggcagctcaccactgaagctgttcgtgctgaggctaagcgcaaccagcaccgacatgttcaggatcgcctctggaaacccacctaacagccggttgctgctggcgtagaggatctccaccccacttagcgtcgctagctcaccggggatgctgccggtgatgccattgaacgcgaagctgagcttcctcagcgccgtgatgttgctgagcgagggagggattgtcccgacaagtctgttcgacgagagct

SEQ ID NO: 22694 - DNA, 13036 bp, Oryza sativa
  unsure (1)..(13036): unsure at all n locations
ttgcccttggaaattgcattgccattatatcatctctggctactccagagcaatcagtggcaataatggatctgattgaggagcggtgggaagagctagttggtgagatgcctctgaagatatgttaccctgcaattgagaaccatgaatggagaataatcactggctgcgacccgaagaacacccggtggagttatcacaatggaggatcatggccaggttaaagttttccttttgcactgtgctaacttgagatgattctgttgctgatccttactatgcattactcttcataaaaattagtcatgtccaatattatggctgatagcttagatgtcaattcatcacacacaataataaataggtaaactaaagtttattctgaaatcgatcacataatactattcaacattcacctcttctgataatgactttgttctaataatttttattaatcaagtcttatactgtaagatccttaatgtcatacagaagctgtaaaaactaactttttgggggtagctaaggtgcttatggctatgaaattttgacttcttcatctgttttcatcaaattgaacagaaccgacagatccctttgagggttgagtgtggcacttttttttttcctaaagttgatccgatcttcgtgttccctagatagttggcgaaatgtgattctgatgttcacaaccaaagtcacctgaatcctcattccaagatcttaacgtttatgtgtgtgttctcccatctgcagttctcctgtggctgctgacagcagcctgcatcaagactgggcgtccgcagatggcgaagcgcgccattgagctcgccgagtccaggctactgaaggacggctggccagagtactacgatggcaagctgggacggttcatcggcaagcaggccaggaagttccagacatggtccatcgctggctacctcgtagcccgtatgatgctggaggacccgtcgacgctgatgatgatctccatggaggaagaccggccggtgaagccgaccatgcgacggtcagcatcatggaatgcctgaaatgttttgatagaatttttttttcccaaagagaggttcaatgtggaaacttataggagttttgtccaaacatgaaaatggggttcaaaatttactgtaactgtactgtcagttaggacagaagtgtatacgatagatccaagtcgtttcagagcaattttgtccaacttttcgtatctggcttcatcaatccaacagagaagaagtttttgttggtgaaacatttttgcaataattaaacagttttgtcttgacatatatactagcatatgtttctgtgatggataattctttgtaatactttgtaggactttctgttaatatactcctcacatattttcattgtggaaggaaacaccaaggacttttgtatgattgtggcgccattgacgtttacgatatcctgtgaacataagtctttcgtgcacacaccaattaacaaataccattgaaaattttagaaaaaaaaatctgtgcatttactttcaatattattacacttttagttgcagattgagaaatacaataagaaataagtggcattacggcattcagtaattcagtaaaaagaaaaaaaaacaacgacaagatcgtcggtttggaaatagggtaatatactggtggcaaacagtaaaaaaatccaaaatattttatagtctaaacaaacggaaggtttcaaaacttcttgaaatttaaaatcaaggatatatatcagatttctgataggacaggactagaggaacaggccggggagcagggttcgatatatcgcaccggcactttctatcggagggcaccgatacgacggaaaaattcggtccgaaataatttgaaatttaaataaaatatggttcaatttgaataattttgctaaattcaaaaaaagaaaaaaatccaaaatttttagccgaactaatttagttccaaataatccgcggggagggggggggggtggcttgccggtgaggcggtaagtattccaaataaactcatctagtttttgtacccatacgtaaataaacacgtgatctccaaaactccgatcgatcggctcgcggcgccgctcatggaaaccctacggccggttgcgacggcgacggcgacgctgccttccggcgttccgccgccggcggcggcggcggcggccagaggctacccagggtgggtgatgctcatgccctacgccacggccgaacgcgaggtcgacgactcggagtactccacctccaactccggtggagccaagatcaccggggcggcctcccgctcctcgtccggccatctcgtccgcgtctccctccgcctcgagtcgccaccggcggcgtcggggctaagcttccactgctcaccgtgcggcggctccggatacggagctcatcattaccggccctcgatgtacgtcgtcgctgcccacggcgactccgtgctcctcgagatgcattaccagaaggaagggtaccaacaatacgggatcgattacttcttctacaatgccggcgacggcgacgaggacccaccacggcggccgccgtcgttgtcgctctcccgacttatcagggtaccaataccaagccgccccggctgcgtggaggtagcaccggcctcctcgtgcgccgctgcggcgacgacgacgacgacgagctcgtggtggcggcgctcctcaccgaggagtaccgcaggcgcgacacgctggagggcgccgagctcgtcgtgctccgctccggcgagtggagcgccacgccgatcgcgccgatcgtccacgacgacggcaagggcgaggagctctcctactgggagaccgacatggccgtccccgtcggcgaccggctgctgtgctacgtcgacctgtaccgcggcgtcatcctctgcggcgacgacctgttcgacgaaattcccccgcggctgcagtacgtgtcgctccccgtggaggcccccgccggcgcgttcgacgaggagcacttcgaccgccagggcgacaactatcggcgttgtctgctcaacactcgaaccgtcgtctgcgccatcgacggcggcggcgccgcgctcaaattcgtcgacatctcctcccgctgctgctgcggcagcctgggcaagcacaccacctgcgaccgttcgagccgcgccttcgtcatcagaacctggacactgaggatcgacggcgacggcgacgacgacatggcgtggaccatggacgccatgatcgacgccgccgagcttggtccctcgacgcctactccgccctcccacggagctttccactacaccccatagtgagcatggatgatccaaatctcgtctgcctcattgtggacgaagaacgcaaacggggtgcacattacgtcgccgaagaggtggtatggaagatcatgatggatacaaggagcaaggcactagtgtcggtttggcgcggcgacggtcggtgccattggcgacagccacatggatacacttgtattcctgtcaaaatccctgactgctttgctacctatgtgagttatagcaaagccacgacaatgttgccagcgatggtcgacaagataccaattgcaacaccaactgcaaccggaactggcactaatttgtcgcaatctttgccatccgagtcatctccccaaagtctgtatgtgttaatggcttctcctggggagatcttggtagcacttgaagagatacctgggttggattgtgatgatttgctaacagcttatagcattctttgtcgtgacaatggccgtctattcaaagcccttatggggctcccaatgagtatgaggaagaaattgttgctgatagaaattaaggcttatctaaactgtcatgtctgctctacatgtacaacatgatcatgatatattggaatgtcttttgtaaattacttttgttggtactaagtatacattgtgtgattaactattggattgtgttgattctggtggattgtttttcttatttttaattcttttacacttggaagaatggtgccaatattatggttcatagcttagatgtccaatattatggttgatagcttgttgacgatccttaaatgttaagtgtgccatccattcctgcagaaaaaaaactaaaatgaaacactgggcatagtggtagagtttattactaactatttccacaggtgttagtgaaatatttgtatgcaggtaattctgtatgaaaactcacctgccatgtgaagaaacattgtatcacaatcacccgctatgcgaagaaacacatatctggccaatcagacgtgaccacacggatttaagggctcataaatcagagtaaaactgatataattaggcttatccaccatgcattgtcataagaacccacatgtcagcctcacagaaaaggtcggtgtcttgaggcggtggaagtggttgggccgaacaaccaacacggccccccgcccccaccttccacatggagagttctcattggctcccaatgatggttatgggtggtaaccgccattcacaaccgtcattaaatgctataaaaggaggagagacactctcactttacatcacacaactcaggcaatgatctttttattttcattcatactagagtcgagctcaccgagtcttgcctactgaaagacggctagctggagtactacgacggcaagctcggacggtcaagtaggctagaaagtttcggacattgtccatcatcggctaccttgtggcatgtatgatgttggaagacccgtcgacgctgataatgacctccatggaggaagactggccagtgaagccgaccatgcgatggtcggcatcatggaatgcctgaatgtttcgatagatttcattttccaaagaaaagtttgatgtggaagcttataggagttgtgtctaccaaacatgaaaaagggttcgaaatttagtgtaattgtactgccagttaggacagaagaagtgtatacgatagatcgatccaagtcgtttcagaccaattttgcccaaccttttggtatatgtggtttcatcgatccaacagagagaaagtttttgttggtgaaacattttgcaataattaaacagttttgtcttgacatacatactatattatatatgttcatgtgatggatatttttttggaataactattttcattttggaatagctaagaattttcatatgattgtttgtggcgctgttaatgtttacggtacttgacatcataggaatctatcgtgtgcacacaccgtatatatatctgccaataaataaacaaatgtcagaaaaaaagtactgctttcaatattattttatttttgagagcggattgagaaatacgacaaagtggcattatgacattcggtcaaaagaaaaaaaaagatgacagatgatcagttgggaaatactagtgaaaacaatcctaaatattttgaagtctttttttgaacggataaatattttgaagtctaaacaaacggaaagttataaatcttcttgaaattaaaatcatctgtatcagatttcgagaaacgtccgggggtcagatttcgagaaacgtccagtgatctttcggctagctccacaagatacatcctgagtttaaagtcccatcttttttatttatttatttaatattagatcctttcttgatattcgtgtttttttatactgtttcagatttcccatagaactagagggcctagaggcacaccggccggggaatattttgcaaataaactcatctgggttttctttgtgtaattaattccataactccgtcgaccactcgagccccattagatcggctcgccgatgctcatggaaaccctaccgccgccggcggcggcggcggccggaggctgcccagggtgggcgatgctcaaccactacgccgaactcgaggtcgagggcgatggcgaggactccacctccaactccggtggagccaagatcaccgaggcggcctcccgctcctcctacggccatctcgtccgcgtctccctccgcctcgaggcgccaccggcggcgtcgcagctaagcttccactgctcgccgtgcagcaagcacagagttcacggaccctcgatcaacgtcgtcgccgcccacggcgactccgtgctcgtcgagatgcattacgagaagggagagaacgacgagcacttcgattacttcgtctacaatgccggcgccgccgccgtcgccgacgaagacggcctaccacgtccgccgccgtccttgtcgctgttcccgacttactgggtcccattgtcagaggttgagaaaacggcgtatcgtccgcatcagagcgccaaggcgcaccagctgcgtgaagggagcaccggcctcctcgtgcgccgcggcggcggcggcgacggcgagctcgtggtggcggagctcctcaccaagaggcgccgcaggcgcgacacgttggagggcgccgagctcgtcgtgctccgctccggcgagtggagcgccacgccgatctcgccgatcgtccacgacgacggcaagggcgaggagctctcctactgggaggccgacatggccgtccccgtcggcgaccggcggctgtgctacgtcgacctgtaccgcggcgtcatcctctgcgacgacgtgttcgacgagcaggcccccctccgccgccggccgcgctacgtgccgctccccgtggaggcccccgccggcgcgttcgacgaggagcacgaccgccgcggcggcaaccggcggcattgcctgctcgacacccgaaccgtctgcgccatcgacggcggagccacgctcaagttcgtcgacatcttcccgcgatgctgctgcggccgccgcggcgcgacgcagtgcgaccattccggcggcgccttcgtcatccacacctggacaatgaggatggacaacgacggcgacatgtcatcatggaccatggacgccatgatcgacgccaccgagctctggtccctcgacgcctaagcggcctcccacacacgaatccacagttacccatcgtgagcatacatgacccaaacctcatctacctcagtgtgcgcggagaacgcaaacggcgtaaacaccgcgtcgacgacgacgacgacgacgacgagacgatgtggaaggtcatgatggacacgaagagcaaggcactagtgtcggttttgcgcgacgatgatattttctcatggctacttccatatggatgcacttatattcctatcaaaatccccgaccacgtagtaagctgtggcgatgtcacaacaatgccgccggcgaacatcgacaagctgccaattacaaccgaaatcagcagtaatttgtcacaatttttagcattggagtcatctcccaaaaatctgcaggtgtcaaggatggcttctcctgaggagatcttggtggcactcgaagagatacctgggttggattgtgatgatttgctgaaagcgtatggcattatttgtcgtgacaatggctgcctgcttagatctcttttggggctcccaatgagtatgaggaagaaatggttgttgatagaaattaaggcttatcaggactgtcctgtctgctatgcatgtacaacagatcacctacaacatgattgattgaaatatctgttgcaaattaattttggtggcactaagcatgcattgttgattctatcaaactgtgatatttatttttagattttctttacatttgtaaaagttgagccaatattatggctaatagcttagatgtcaattcagcacctacactagtaaaaaaaaaaaaggtaaactcaagtttattcttgaattgatctcataatgctattgaacattcacaagagaagaactttctgttggtgaaacattctgcaataatgaaacaatatgtcttaacattaatgcatatgcacatttctctgatggatatttcttaagtaggatttttcattgatttgtggaagcacccaagcctttaagatgaacacaatgaagattgcttgtgttgccacaagcaaggttcacaatttccgaaatttcagttcttttagaggggtccgatggaaatggctaccggtcaaatattttgatcaaaagggtcaaaatcagtcaaaattcttaattcctccctttctcttccctatttgtatcacttgattcacttccctggtcccttgctattgtttcctcacgaggcgacatcttccttgcagctaggcggcgcgccgcagctattcctcggcggcggttggaacggcggaggagcagcctctccggcgaagtcgacgacaggcgccgaggtggggcgggcgctccccacaccgatgcggcgcgcagcggtggagcggacactttggaagacattgatagccacaatctccggcgacatcgacggcaactgctcttcatccgtgtcatgggcgacggcagcccaagctgcaggtgtgttgttcctatggtgtccttttcattgtgaatcatgaatgccctcgtttgttttgttgcagaagttgctagaaatgacggatctcttgtcaaatttcctcattttttctgttcgagagtttaaagtttgtttgaatatttcgttcgaaatatctgaaaaatatccacaatttcatatttttctaaccaccaaaattcccccctttctgatacattgaaccctggcaacaagcttataatattgttcaataaacaatcaatgttagacttttaataacggattgacacataagaataatttcgcaccgtcggccgcccctttcctcctcgtcggggtgctgccgccgccccgctcctcgctacatccagcgggtcgatggctctcggcggcgcggcagggtgatggctccctggtggcatggcgggtcagttgctccttgacgcagcggcttcccggtggcgtggtggttcaggatctagcccctgagctcgggacctccacgggagcgaggcggcgaggtagaggtccagcgaggagcagcggcggcctcccgctcgctccttcctctcctctcatcatctcttgtgttgatattttgtctcttgagttgatattttgtgatgatttcgattttgatttggattttgtttttgggttggattggattgtgtgataatttggggtttgcagaggaggtgcgcgctgggcgacggacgaaaatcctctatggaagccttatgattttttttatgaggtatagatttgcacttcagcattaggttaaaaaaaaacaatgacatatcgtcaggttgaaaatatactgttgacaaacagataataatccaaaatatctaagtctaaacatacatgccaacagaaatatccaaaatatctaaagtctaaacataataatcaacaaaccatcaaaagtgcattcgaggcattaggagctaaagacaaggaaacctcacgaattaatacatatagcagcaaacacattnttgtcacagattagtacaaacatcttgagtcaatgcttttcccccttttcggtggactgaccaaaacatgtagcttttgctatttctcagaccaaattatggctatagccgctagaatcctagttgttcttcaagatcataatgagtcataattgagttgttagatctaaacgtacatcaaaattatttcatggtggtgtcacgaggtacacaaaaggtttaattcaagcggtgaaggatgaacttaacaggaagaccaaaaggattataacacaagttgacacagcattaggtgaggatgtcaactaccgtagaaatttatcacatttatttttctctccaccaaacacgtacggagagtcacatcgcattatcttaagaatcaattctcataatatgtcagaaaaaaagaggataccaataaattactcaatataagcaggcacataataaatgttgatatagctaaaagtagagatacaatctgattcttctctgctgaattaaggctgagtttgttcactggctttcccaactcatcttcatcgtttttcgcgcgtacattttccgaacggttacatggtgattttttctaaaaatattttgatacaaaagttgctttagaaaatcatattattctactttttattttaaaaagctaatacctaattaataatgcggtcgttccgttttatgtatcggagggattagttccaaaaggtagggaacaaacgcagccgtactgcagccgtactgatcgagcgggggtcgttggttcgttgagatttttttttggaataagtccactttgactttcttaactagtgcccgaatctgattcgtatccctacactataataccggatatcttgaccccctaactattaaaatcggtgcaatttgactcctccgacggttttggagaacggtttcgctgacgtggcgtccacgtggcatctcagtcatcaaataaatttaaaaataaagtgaagggcccaccctaaattaaaaaataaagcggcccgcggcgtcggtggcgattacgcgagtggtggccgccagagctgggcggtggcggtgatgctcgtgctgtcatgcgctgagaagaagaaagaaggagagagagaggggaggggggaggatgggagagaggtagaggaagaagatgacaggtggggcccactctatttttaatttatttgatgactgggatgccacatggacgtcatgtggacccccgattttggaaatcggaaatcatctgtgtttatccgtaccaatccctggatcagtagttggtacacacatagttgaatcacaacatatcacgaatgaattcaggctaaaagatttaaatacttacattagggccaggtaggccaacaactatcagagaacaacagcggaagaccaaataatataagggcccggttaacatgccacaggcagtcgactggggaatgagacctagaacaagaccgcactccgatcatcttgttggatacgcaagcgtaccgacaagggcttctcttcaacactctcctaaaagatatataattagcaagggtgagtaccaaccgtactcagcaagccaccacagcaacgatgcatatgatagagggtatttcaaggaatggcttcaggttcttttgcataaagctagttttgcagttcttttcacaagcctaagacctagcatagactgatcaaattttagtaccagtattcacattaaacaacgacggttctgtccactatccattatgatcccaaggatagcttcccgccattgagtcgttatggttttctgaggacgtccacattcccgcctctcaggaagtggctccatcagcataaaaatcatcatgcaatatcccatcccacacaagttaaagaatttagagtctagccaagtgtaatacatgtcccggtgctcaataaccgcgagcacggctattcgaatagatctggtttactcacactgcagtggatgtacactttacccgcactccgcgactgcccaacacatgagcctcgtcccaacacatgagacgcgtcacggcaaagcttttcgataaccttgcattggcagtacccgctccatgaacttaaatcctcatgcactctaggcatccatgtttctagcagtgagaggagttctggcgctcccggggaaagagaagtctcacacgcatattaaattatggttcaagttaagttctctctctcacacactcatggcagtcctaccaatggcaacaccgatgtagggcacgcctctcggccctacctcaacggctgtcccatcgtagcgcacctgcctcactcaggggtgaaccatctatgcagggatactgcctccgctcggctatctaatctgctaggtctatacccattcgagaagtacggttgtacgggagtcgtttcatgcttaacttcatggctcggtccttaattgactggggacggtactagccttttccagataccacccaaatcctccgtccgccccagtcgaaaacagttgttttaattttatttctcctttcacaaatcatgtcatcaacatcatggcaatgtggcgctcatgtctccacatgccgcatctcaattaccttcccgaaggtaattgcccaagcatatagcatttgataaatatgagtatgcatgattctagaatagcatttctaagcaattgtcatagttgactagggactcatacgtaaacatggttacaaagatttaagggtaaacaataatcaaggcatggcataatcacaagtaggatgttcatcattgcatgcaatttttacttgtaaacaaaacaatttcgcaattaggatcaacatgttcgaggaatagtgatgacttgccttgctcaggatagtccttattcttgatataattcttgatcaaccttcacctcctggaagttgctgacattgcctcacgactaaccgatacacaaagtctataatacgcgagaaaaaccaatattcaagcaacaatcaaatatgcacaaacaaaatatatttgttgaggttgaacctaaggttgctcatattattcgcgcttgctaatggtttccaacatgctaagggctaaagtttcttaatctttctgttatcatggtggtctatttaggagctagccaatgtagtatgaatgagatacgtatctggctactatgtggtttagtctagcaaatggctattcatgcatctatctagatagaacggttatacactagaggttttgttgccggatggatttggatcggtcaaataattactgtgaatcatttgtattattattttattgatggaggctttattttaattatgtacatattttacttgtcaaaataaattataaaggttaacaattacccttgctttgtatgttagaattgtttaggttaatcatagtatggttacagattatcccatcacataattttacaatgaataatcctaatttacagttgaactataattataattatatgaggtcaagatttataactagtatttatctaatatacatgtttgtcatacactccctcttaatttcatatatgcaatacgcaaattaatac

SEQ ID NO: 22695 - DNA, 3186 bp, Oryza sativa
ccctgtcttggctccctctctacccggcggcacgacgacaaataggggggcagcggctcaccgacggcggcgacgacggcgcacggcgcggcacactgaggcggcagcgcggcggtcacgaatgcggcggcacgacagcacgagggcggtggcgcggcggcgcgtggagagggggaagagggagaggagggggaagatggagtgaggagaggggagaacggtggctcttataggggagagagggaataaggggaagagggaagagaagggagggggtgacgcgacggcggcgcggcggcgcggggctcgggacggcgcggggctcggcgcgcggtgagggcgacgggcgacacgacgacgacggcggagcgtcgacgggacggcgacacggcgacgggacggcgacgcggcgacgggacggcgcggcacggcacggggctcggcgcgcggcgatggcgacagggcggcgcggggctcgagatgacggcgacacgacggacgcgacgcgcgggcgcaggacggcgtgacagcggcggcgcgcggcgcgaggcagtgacggcgacggcagcgcggggcagggacggcgatggcgacgtcggcgcggtggcaggcgacagagagagggggaaagaggaggggctgggttaggggaccacgtcgaacacctggcggccgatgaatagtgtcttttcctatttaatccccattttagcctattttttgtgtaaatttgattttataaatcctagattttgtataaagaagtttacccaatatttgtgtcattccaaccaatggatttattctagattaatattactcatattttatttatataatttatttgaatttttaattagggttaattcttattattattatatatttttcaaagttttcctatttttcttcttttagggttttggttgatttataaattgagaaaagttgcaaattaaatttgtatttactcccaagcatttaggtgaccgtattaagtgttcaaatgtgaatttttcccaaaatttaatattgtccaatatttaaggtttattaaagattctataattttctaatgagaccgttattaacacaatagcacattagctcaatttatctatatgttagtttattttatatggaggggtttaatatatcaaatttcaatccctaaatgcaattaggaacttggtgcaaaatcgatctacatatcgaattaaatactcccgtaattctattatatatacagagagctcagtttatttgaatgatcatcatttcatgtgtacacatattatggcacccacctacattattcaaatattttaatatttgataaaataggttaataataacttttcttttatttgattttaatatcttgtgcataattatttgtaggattaaatatattcccgtaaatcatatctattgcttaaatgtagttcttttctttactttcttggtgatcatttacggtttggcaagtaatagcaatcataacaaccagcatgatgcaaaagttttaaaaagttcgaaattttcgtgattttcattgtcttgaattttcaggatgttacacgtcacgtcagcgaaaccgctctctaaaactgttgatggagtcaaattgcaactgttttaatagttgggagtcgagatatccggtattatgattcaaggatgcgaatcagatttggcaattagttagagtcaaagtggacttatttctttttttttttgcccccgggccggggttcagagtggattgggccgaaacccctgtcaaacccggcctaactaaaatcaggcagaattccgtggagccccgaacacagccgggtgcgggtgcagagcctctcgccgccgccatcgccgctcatcgaaaccctagagcccttggcgatgccggcggccagagattcaggcctcaggctaccacccacccagggtgggtgatgctcgaggtcgtcgacggcgatggcgccaatcaccgaggcgacctcccgctcctcctccggccatctcgtccgcgtctccttccgccccgagctgacactactacagatccgggcttcagtgacgggtcatctgtgacgggccaacgtaactcgtcaaagatgagtcatctctgacgggccgaaaaaatatcctcttcaatatatggctaccagggaggacccgtcacagatgtaaagtcatctgtgacggcttgcacttgtaacccgtcacagatcgtctgtgacgggtcacaaccatggctcgtcacaaatgacatgtcatttgtgacgggtgtagtattatgaaccatcacaaaagagaccactcatctctgacgggtctttaactaacacacgtcacagataacgttatctctgacgggtggtggttatgacccgtcagtgatgagtgaaaattcaaatttgtaaattttgcaaaaaaacctcggattgaaacatgtcctatataaaagttgtagctctcaatgatatccacaactttataactaacaacatttctattagagatcgtttacatccccgaacatgcattacaagtgatcagatctacttttaaaaacaaaattttgagttttttttcaaatgacatggatggatacatgccccgtatcaaagtcatagaactcaatcagatctacaacattataattgaaaatattttcatttcacaaaatttacatgttataaagtgagatatatttttaaaaatgaaattttgaattcttcaaacaacatcggatgaagatattttctatgtaaaagttataaaacacgatgagataactatttagttgataatattttcatttgaagtcatttagggtgttaaatatatgttaaatgattcagacaagcatagacaaaataataacattgggttagtagtcaatatgtgttgagtaggtgagttggtaagagagctctatatggaggttgaggtctgagttcgaatctcacttgtagcatacaagttatattgcgtgaaaaattgtgaatttgtaggtagtgatgtgtaaccatgtataggattgctagtaaaattcaaaatatttttttgaggttttttgttgcgtttaaaattcaaaaattatatttcttactttgtcatcagtgacgggtcgtaagttacaacccgtcagagatgagtcatcagtgacggtcaggtagt

SEQ ID NO: 22696 - DNA, 2050 bp, Oryza sativa
agctcatcaccaccagggagagcgagagcagcaagctggaggaggtcaagctcctcgtgctccgctccggcgagtggagcgtcacgcgggcggagatcatccacgacggcagcaagggcgaggagctctcctactgggagaccgacatggccgtccccgtcggcgaccggcggctctgctgggtcgacctgtaccgcggcgtcatcctctgcggcgacgacctgttcgacgaaattcccccgcggctgcagtacgtgccgctccccgtggaggcccccgccggcgaattcgaggaggacagcgacgacgagagcacgcggagatgcctgatggcgagctcaagttcatcgacgtcttcccccgctgctgctgcggcgaccccggcgccaccctctgcgaccattctcgccacgccttcgtcatcaacatctggacactcaggatcgacggcgacggcgaccacaccatgttgtcatggaccatggacgccatgatcgacgccaccgagctctggtccctcgacgcctacgccggcatcccacgtgtcatcccggagtaccctgtcatcagcacagacgacgctgacgtcatctgcttcctcgtgaccgagccatacaatcacaaacaggggaaaccctatttcgaaagaacgacatgggagatgacgatggacaccaagaacaagacactgctatcagtatgcacatacgatgatgatatttcccaacgagagccatcttatggacacacttacattccaaacaattttgctacaaagccaccaccggccatcatctgcgaggcaacgacgacgatcacaaccgaaatcaacggtaataatctgtcgcaatctttgccatctgccaaacatctgcaggtgtcaaggatggctcctgaggagatattggtagcacttgaagagattcctgagctttctcgcgatgatttgctgaaagcgtatagtattctttgccgtgacaatggccgcctatttaggtctcttcttgggctcccaatgagtctgaggaagaagtggctgttgatagaaattaaggcttgtcgagattgtcccgtctgcagtgcatgtacaactgatggcctataacatgattgattaaaatatttgttatagtggtacttgtatacacttgtgggattaactgtgctaattctgctgaattaagttccttatttgttgtttttattacactttgaaaagaccgatgccaatatttattacgaacttggggttgtcaaggtagaaaaaaactgactgtttattttttttactaactgcttagatataaagtgacctaatattaaggtagaaaaaacatagtgcccgaaaattccattcaaataactattaatcaaagttcagactaaaaaaaaatagtgcagtgacaacatataaatatataattgtcccatgtcccatataggtcatttcaagaaacaaaaatccaatttatcaagatttgcatgatgatacaccgtaatttgcagtcttacatgcatgtatataactagcaaacatacgcccgtgcgttgtaacgggatatctaaattatatataagtattatccaagcgatcagctgaggtaaagcatcaattattgcaggccgtagatacatgttttttttaaaaaaaagaataactctttttttaacagtccatgcatacatttttgtttgccaaatatattaattttctgtaacagtacattaacaatatgaggcaaaacaatcatcagtctaattgtgtaacttaattactggacgaactgatacttcgagatcgtataccggacatatatatgaatctgctccattagaattcagaagagaatctgctggtgacaaacagccctccgaagtccgaacaagggatgcacatcaaacgacaaacgaatccaaagctgccagcacgtcgtaggaaacacttaattagctcgtaatagaaggttgttcaataacagccaataaaattctgaaacgcaacaagtagcatatagaggactctgaccaaaagcaacacaattacttgttt

SEQ ID NO: 22697 - DNA, 5897 bp, Oryza sativa
ccaccctgtgcaaccattctagcaacgccttcgtcatcaacacatggacgctaaggatgaacgacgacgacgacggcatggagtggaccatggacgccattgtcgacgccaccaagctctggtccctcgacgcctacgccagcatcccacgtatcaccccagagcacctatcgtcggcatagacgactctgacgtcatctgcttttctacgtcaacgtgacgatatggaagatcatgatgaacacgaaggacaagacattgctgtcagtatgccgatatgataatgatgtttaccaacaaaagccatcttatggacacacttacattccttgcaagatctccactttatacacaaaccatagtagcaacaatggtgttacaaagccaccagtaggtcgtcagcaagccatcaacaattacaactgaaatcaacggtaatcagtcgcaatttttgtcaccggagtcatctgccaaacatctgcaggtgtcaaggatagcttctcccgaggagatcttggtggcgctcgaagcgattcccgatcatgcttgtgatgatttgctgaaagcgtatatcattctttgccgtgacaatggccgcctatttaggtctcttctcgggctcccaatgggtctaaggaagaaatggttgatgatagaaatcaaggcttatcaaaacatttactctacatgtacaagtacaacaaatgacttacatcatgattgattgaaatatttgatttaaattaactgttggatgcgttggttctgctgaactgtgttccttcactactacaatatcgatttttcattacgtcaacattttttttggcggccacacacgatcaccgccagcgaaaatactccaacggtataggtgggaaaccgtccgctagtctccccgtattgctttacaatctccacacaacgcctatcacctaatagttcttttagcattacactagctcattcatgagcaaggttttaaatctccaactatacctgctatctccccactatctccaggtacaaattgttcaagcaagaactagctatttgttgtcatatgcaatgtaattgctgttaatcaatacagcccactattaattgtatgagagactgatagctaaatgtcgtatcaatcgatttaaaatgctgctcgtgggctaccatattacagtactccttccgtcccaaaataaaccaacttttagtgtttgaaatttgtcctaaaataaaccagcttctaccttcctacctaccatcaatctgtaaatcgagaagctttatctcttcaatacccctcatatacccgctcatcaatataactttgctattaattagggccattttggtcctttgtctctcctcttatatccaccttgggaagctagggttggaatttttgtgggacaaagggagtacgtctcaaggcaacattttgtagtcattatcttggactatatacaaaaataatgtggaaaagttaaacgtgatggagccgcattatttctaggacgtgtctacaacgaggccgtgcgctggattgtcataaccagctatcccaatctcatacctagttgctactagtacacctaaaattgcatgcatttttttcttcttatagaattttctcttgaattacaccattacgttcgttgcaattaaatctttagaacaagatcttatgtgactatatttttataaaagaaatatctatgttgtaaattacttttattatatatgtataagttactttttgattttactaaattacttctcatacattcataatgttgtgagttgtttattttataatcatttttagttaataacataatttgtgctaattaaatttaatttctatatagactcatgtttttaccttcataatagatttacttttaatgtcgtgacaaagttactttctttttgttttaagttacttccataatatatgtaaattacttttaggctttattaaatttatttttatattcaaacatattattaatttaaaaataattcatttaaattgtaaaagtaagttagttatgcaatagaactctctataacattagaagtaagtatattatgactaagttgtagtgagagactgtggagtaaattcataagcagtgtagagaatattttcaagtaaatacatttgtgaaagtaagttcaataaaatctgaaagtaatttacataaatcataaaagtaacttagcataaaatagaagtaagttgttagtacaacattataagtaaatctgttgtagggataaaaatgtgagtctatctaaaaatttaatttaatcaggataaattatggaattgactaaaaacaataataaaggtaatcaactcggagcattacgaatatataagaagtaatttaatcaaatttgaatgtaatttatatatatgataaaagtaacttacatatataataaaaataatttacaaacataaatattttttcatcataatataatcatgtaagatcttgttacgaagatgcaatgagcacaaagatataatcggatcgtagatcaaataagtaatttaagacaatattttataagaagaaaaaaaacatgtatcacttaataacaaaaaaggaagatgtgtagtataacatctctcttttctctctctcctgctcctgctatgtgcatgtgggcctccctgtgataaaaagtagagaaagctacagactagtgaagaagatcgaatggttgtgagtcgtgtcgcgtgataggactaaaacgagagacttctcgatttaaatttcacgttattcctaatcaaactcatttcaggttttttttgttgagtccaaaacgaaacatgtctaggttttataactccgtggatctaccgtgttaattaaggacgaactgcacgcgatctgcgtgactaaccgatcgatcaatctgctcgccgcccatggaaacccaatcgacggcgacaccgtctcctggtgcttcgtcggcgaccggaggcggaggcggcggtgcctacccacggtgggtgatcctcgagcagcgagccgttcacgacgacaaagaggacgacgacggcgaggacgactcccgctgctccgccgccgacgtcaagatcaacaccgaggcagcctgccgctcctccgacggccatctcgtccgcgtctacttccgccgcctcgtggctccgccggcggcgtcgcgcgtatgcttccgctgctccccgccgtgcggcaccggcaccgggagagagagagagccagatgcgacaagccattcttgtgcgtcgtcgccgccgccggcgactccctcctcctccagatgacatacaatggtcagctcgatcgcttcgtctacagcgccgccgactcgccgacgttgacgctgctcccgacccacgcgcggcggcagcactggctggacgtgaaaaccaccggcctcctgcgtcgccgccgccgcgacggcgaactcgtggtggcggagctcaccgtgaagaagggcgacaccgacgacacaccggaggatgccgagctcgtcgtgctccgctctggcgagtggaccgtcacgcgggcgccgatcatccacgacgacggtaaggccgaggaggtgtcccgctggcgaaccgacatggtcgtccccgtgggcgacacgctcctctgctgggtcgacttatgccgtggcgtcatcctcctctccgcctccgacctgttcgacgaaagtcgtccccgccggctaaagtacacgtcactccccgtcgaggctcccgccaagaaattcgacgacgacgacggcggagagtacgcgatcaacccacgaggatacccggagagaaaccggagcgtctgcgtcaccggcggcggcgccgcgctgaagttcatcgacgtctcgccgcgctgctgctgcggcagcccaggcgccaccaccctctgccacaactctagcggcgcgttcgtcatcaagacatggacactcatgatgaacgacgacgacgacacgacgtcgacgacatgggcgatggacgccatggtcaacgccgccgagctctggtccctcgacgcctacgccggcccaccacgcctgagaccagtataccccattgttagcatggacaacccacacatcatttgcttcatggtttgcaaggaacactgggagtcatgcttccactgcgaaaggacaatatggaagatcatcttcgacatgaagagcaagaaactactctcaattcgctactacgatgagtcccagtgtcaaacttggggggtacattatggagatgattaccttcctagcatgatctctgattacttcaattctaatggcaaatatacaagtcataatgcgacaacaagcattaacgatctcatcgtcactaattatttaccgcagtcatctcacaaaggtttgaaggtggtgtcatcagaggtacaagtttctgatgaggagatctttgcggcgcttgaagagatacctgacttgggttgtgatgatttgctgaaggcatatagcattcttagtcatgacattggtcaacaccggtttagatctcttttgggcctcccaatgagtttgaggaagaaatggctattgatagaaatcaagagtagagaagctagttccatctgctctgcatgtgcagcaaacatgcaacatttacatgcttgaaactcttggtgtacaattggagtacttttgctggtggtagtagattaattgtgtgctgaacgtacggttgtattgtgtggaattgtaaattggagtactactacttttgacacttgacacttaacaacgtatattttggtattgaagttgcattcacaaaaccacactatcgacgaatgcatccacatgtgagataacgtaattttttatctacatatatttaggatgtggacgtggcatcgcaaatgtttcacttaggaagaagctcccaaatcaacattctaggaggaacaaccatatcatcttgcgggtggacctgctcattgatagtgtaattttctaaaacttcaatataaaatatactccctccagttttttttgtttgacgttgccgaccggttcgattaaattaaggaagctgtgaattgacttgtttgcccttcacccttatccctttgcactgatacgtttcgtctctgcaggggggagaggggaaatttgcggacgggaggagggcttctgaactgcgagcgtcaaacaaaaaaaaacaccttttgagtatgaactggaacgtcaaacaaaaaaaatagagtatgtagttaagtgtcaagtgtcaaaatgtgttgttttctgcaacttggaccataaaatatgtagctttgtgaaattattctttcatgtgacactaatttatatagttgctaataatataatatgaaatacattaatagttaaaggatatcgctaaagaccgtgtaaaaaggagaaaaaggacaatacgccattccatttggtgggtttcgacgaaataccacccaatacgatgcaaagcataaaatgccactcaataggttatctttaattaggatattttgccactttgagaggttttaaaaccaaccctggagagagaggaagagaggggagggggaggggagcaccggcgaacgttgaaggcggcagcgtccgttctcgtcgccgatgagtgctaagcgcgagcggtcagcacgtgtgggcggtgccggaggcggtgagcgcccgtaggcagcgtggaggcgagctgcgagcacacgcacgggcagcgttggagagccctccccgtcgtcgtcgtcgtcgcctcctcctccctcccgtcggcgttgccctcctcccacatcgccgtcgctgtcctccctgatcagcgccgtcgtcttcctcccccatcgcagtcgccgtcgggctgcaggaat

SEQ ID NO: 22698 - DNA, 6195 bp, Oryza sativa
ggacgagggcggcgacgaccctaactcctgcttcaccgccgacgccgctagcaaggtcaccgacaccgagaccgaggcggcctcccgctcctccgccggaaatcacgtcggcgtctccttcctcctcaaggcgccgccggcggtgtcacgcctacgcttccgttgcgtcccaagcggcagccgcggaggcgatagacggttcccctcgatgcgtgtcgtcgccgtccaccgcgactccctgctcctccggatgcaatatcggaaagggcgcgcctacgacaacgacatcggggtcgactacttcctctacaacgccggcgccgccgccaccgccgttgacccgccacggccgccgtcgttgtcgctgctcccgacttactggtagacattgcaaaaggaagaggatgatgatgaagaagataaggaagatgatggtggagaagaaacttatcgtggtcgtgggtatcggcgtgggcggcccccaagcggtgggtccgcgatctgggtgtcaagaccaccggcatcttgcaccgccgcggcgacggcgacgacggcgatctcgtggtggtggcggagctcatcgcgaaggaggaggacggcgggacgccggaggagctcctggtgctccgctcggacggcgagtggaccctcacgcggccgcccgtcgtccacgacgacggcaaggccgaggaggtgtcccgctggaaatccgacctcgtcgtccccatcggcgacacgatgctctgctgggtcgacctgtatcgcggcatcatcgtatgtgacctgttcgacgaaattccccagctgcgatacgtctccctccccgtcgatgcccccgccgccaaattcgacaacggccgcggcgactactccatcaacccgcggatgtgcccgcggcagaagcgaagcttctgggtctccgacaacggcggcgagctgagattcctcgacgtctcgccccgctgctgctgcggcgatctaggcgccaccacatgcaataacgcccgcaacgccttcgtcatcagctcatggacgctaaagatgaacgatatgagatgggtgatggacgccatggtcgacgccaccgagctctggtccctcgacgcctacactggccatggcctcccgcgcgtcagaccggaataccctctcatgatcatggatgatccgcgcctcgtcttcttcgtggtgcaagaggagtaccaaccggaaatatcattttctgataggggaaagtggagggtcatgttcgatatgaggagcaagaaaatattatcagtgagccagtacgatgagtcagacacgtcgtggcagccatattcttggctcacttatttccccagcaagatctcaaattacttcacttccattggagcttgtagcaatgttgcaaagaggccgctgattgtcactgacaagccggcagtaagttgtatcgtcagtagtaattcattgcgatcttcctcgtcgcgggagtcatctaccaaacattctcagatgtcaaagggagtagtagcttctcctgaggagatcttggcggcgttagaagaggttcctgaattggactgcgatgatatgctaagagcgtatagtattctttgcgatgacattggccgacaccgatttagatcgcttttgggcctcccggtaagtctaaggaagaaatggctattgatcgaaatcaagagtagtgaagattgttctatctgctctctttgcacagcaaacatgcaacgtggttgaacttatttcattgtgatgaattgtacttttgatcaataattaatctatgtttttttcctgggcgtgcttatacttaattaaacacaagacgacggttccttcttaaaggcgttgttttcaactttgtgtttttgtccggtggcttgagttttttttcctcctttttgattgtgtgcatcctgatgtaagcagatctgccagaaaggcagaaacacaaataattttcgtgagtgtggaaaactgtcatgaaaactataaaaaacgctagggatatactttgtgtcggcaagccgccacgctaaaacactcacgagtagagcgacaaggaaaataaattttcttggtggtcagccacccgtgattattttcttggtggaaaccaccgccaaggaaatgatgctattgttaggttcgtgcaacgccacggatataaatgaaaccaccatgttaattctttttcgtgacggtgttaattaagccccctggtttaatccttttcggtatggtgcagatccgccaaagtttattcaatttttcgtcggttcttttttatccctcataaaaatcctacgcactaatgaaaattcaggtttctggtagtggaggctaggttttgtttcatttactaatggcaatcttcccattatccaaaatataatatatgtgatcgaattgtataatatatgtgatcgaattggtagacggatgatgaaataaatatttagagatgttttaattaggattccgagctctgcggctgtgtcactaggttttatacattttaggagaaagtctaaataacccccccccaaaactttggatggaagactgtctagcaccctgaactttgaaatcggatattgagccctctaaactttataataccatttatatatataaccccctaaggttgttttgcatagtgatttttatctaatttgtatataagttggatgagtttgatcacatgacatacacattagacatatatattaaagttctgagttaaatatttctttttactacttgttaactcttattacaaacaagtaccagtataataatagtatgacatcactatataagaataaattgatgactaagcaatagacgcttatttccgtgtgatcagttgataattcctaaaccaacttgtacaggttttgaattccaaaagtacggaacacgtctagattaatttattttggaacatactccctccgtcataaaaaaaacgaatctagaactgaatgtgatacattctagtataataaatttagacaaaggtatctccacattcgtagtaatagaatgtgtcacatcagtactagattagttttttatgggacggagggagtacttggttagtttaattttggaatacggtagtaagtacgagggagagtagtagtattgtatgatcgatccgtatccgattcaccgtcgtctttcctgtgtgttttataaacggaccaacaggtcctctaattaactctctccggcttaacgatagaaccgatccatccatccatcctcctcagcccctccttgtccatggaaacccaaccgacggatggccgtggcgccggcgccggctacccacggtgggtgatcctcgaccgtgaagccgaatacctacacgtcaaccatccctgctccgccgccgcggatgccaagaccgaggcggccacgctctcctccggcggccacaccgtgcgtgtctccctagacctcagggcgccgccggcggcgtcgcgcgtgtgctacacctgctccgttcccgtcgacccggcactagggccaccctacatgagcgtcgccgccgcccatggcgactccctgctcgtgcttgtgtccttcagttaccaagaagggtacgagcaccacacggacacgatagataagtacctctacaacgcaggcgccgccgccgccgccgacccgcctcggccgccgtcgctggtgcatctcccggcttactacaatggagaagagacgacccttccgtcgccgttgccgcacgatcttgatgagaagaccaccggcctcctgcgccgcggcgaggccgaggccgatctggtggtggcagatctcatcgtgaaggatgggggtgaagctgacgcgccgaaggaggccgagctcctcgtgctccgctccggcgagtggagcgtcgtgcgggcgccgatcgtccacgacgacggcaaggccgaggagctgtccttctgggaaaccgacatggtcgtcccagtcggcgaccggcggctgtgctgggtcgacctatgtcgcggcatcatcctctgcgacatgttcgacgacggcgacgagactctccggccgcgatacttctcgctccccattgagccccccgccgacgaccgagaccgacggagatgccagatgtcaaagagaagggtctgcgtcaccaatggcggaaccgtgctgaagctcgtcgacgtctccccgcgctgctgctgcggccgccgcggcgcaacgcagtgcgaccattccagcggtgtcttcgtcatcaacacatggacactacatatggacggcgacgatgatgacatggcagcttattggaccatggacgccatggtcgacgccaccgagctctggtccctcgacgcctacgccggcgtcccacgcatcaatccacaattccccatcgtgagcatggatgaccctgatatcatatgcttccaagtgcccgaagaacacaagattggaagaaaaatgcaatcgtggtacatcatgctcgacacaagcagcaaaacattgatgtcagtctgccgtctcgatgagtcaagctcgcttcaattgtcttatggatatgcttactttgttagcacggtctctcactgctttaattcttctgatgatggggggttcaacaatgatgtaacaaagccggcactgatgatcatcgatgataaggtggcaacaaaaaataatatcatcgctaatgattcattgcaatcttcatgcgagtcatctgccaaaaattccaaggtcaattctcctaaggagattttggctcttctccaagagataccggagttgtctcgtgatgatttgctgagagcgtatagcttgctttgttatgacaataatggccgccggctcagttcacttttggggctcccaatgagtctgaggaagccatggctgttgatggagattaaggctagtgaagcctgttcggtttgttgtgcatgtagagcagacatgcaaaatgtgtgaaatactttttgtagtacattaagtgtgtgactgtgtgcattgctgtttggttgattaattgcgctaaatcgagcagcttaattctcgtataatatagtttttattttaggatattttatgattaattaacgagaaaaaaataacaattgtttgcaatttccatactgtagctattcttttagctaattgtgctaactcatcttcttccacctctgtgagctgaaaacacaaaaaaactaacacatttactataggcgtcggttaaaaaataaaccggcacattccacatataatatagatgaaaaactgacacttataatatattataggtatcggcttttttaaaaataacgccacccttaaatcgagccaagccgaaccgcaccacaccttctcatccaccgcatcctctcctcctcatctcttcctcatccacccttctctcttggctctctctctctctctctaggttcccccctctctctctctttcggcactcttagtcgcaacaacaacggcaatgggaggagaggcggcagtggctggcggcgccaccccctccgccaaatccaatgggaggagatgcgacggcagctacgtgtggcgacaggaggtaggcggcggcaatggcgtgttgcggcgggaggagaggcgacagcgttttgggtggtgccctcccctccgccagatccggcgggaggggagatgacgacagcaacgtgcggcggtaggaggcaggcagcgatagtggtggcggcggcagacgacgccttccaacgtgctgcgggatccgcttctttgtcattgctgatgagctgtgttgctcatctgcagctccatcctctccacggaggctgttgtccatcctctccatcttctttgtgctttgcatttgtgttgatgttcttggatcgatgtttttgaattcttgaagccaattaattctatgaattaaatgttgggtaaaattgggtgaggggggcaccacgattcaagccgatgaattgatccacttttcttttagatttttgggatcttaaaggtgtccgttttagaactgacacctttgatttctatcatctgtgccacttttcaggttatccggcacctagttgggtttccaaccgacacctatctaggtttgtgtagtagtggagttggataccaattgtaggtttgtgtacaccatgtatgacaaaaccgctctggatt

SEQ ID NO: 22699 - DNA, 9298 bp, Oryza sativa
attagaagttgagggtgaacaatgtctgattttcggatttagggggtaattcggtcgaccacgatagttcgggggggggggggtaattcgtactttttccttttgaattcttgaagccaattaattctatgaactaaatgttgggtgaaggggggcgttgcgattcgaaccgatgtattgagccagttttttttttgggatttttaggatctcaaagatgccggttccaaaccggcacctttgatttctatcatctgtgccacttttttagtgtcggttgaaaaatccggcacctagtcgggtttccaaccgatacctatctaggtttgtgtagtagtggaggtggataccaattgtagtccgacccaaccgcgttttttgttttaaaaattaaaaaacggacgaagcaaatctccgtgtacgtgaagatcaaatcgagatcgatatcctctcgatcgccacggtcatggagacccaaccgacggcggaccggcgtcaccgccggcgccggctacccacggtgtgtgatactcagccgcaacggcgacgactcctctccacccttgtccaccccggacgacaagaccgagacgacctccgtctcctccggcggccacctcgtccgtgtctcactcttcctcgatgcgccgccggcttcgtcgcgcgtatgtttcgactgcttcccgcgcatccaccggggcgccagcctgatcgtcgtggctacccacggcgactccgtgctcgtccggttgagctacggaggacgcgggtacggcgatgtcggcgtgctcgattacttcgtctacaacgccggcgccgtcgccgccgacccggccgccacagccgccatcgctgtcgctgctccctgcctacgtcaccaaagcagcggacgatgaagaatgtgaagaatggcaagcatatgaagaagagagtgaaacctggccgcgccaccatcatcagattcatcaccatctggatgagaagaccaccggcctcctacgccgcggcgacgacgacatggtggtggtggatctcgccgtgctagagggccacgggctggaggaggagggggacgccgagctcctcgttctccgctccggcgagtggaccgtcacgcgggcgccggtcgcccacttcgtcggtagagccgacaagccgccgtcgtggatcactgacatggccatccccgtcagcgagcggcggatgtgctgggccgacctgtaccgcggcatcatcctctgcgacgacgtgttcgaccagaatccacagctgcggttcgtgccacttccccccgaggccctcaccgatgaaaccgacgacggctacaagcgggattacgccattacggaccgaagagtttgtgccaccgacggcggcgccgcgctcaagttcatctacatcatctcccgctgttgctgcggcctccccggcacaaccttctgcgacaattccaaggaggccttcatcatcaagacctggatactcaggatggacgacgacgacgacatggtttggacgatggacgccatggtcgacgccaccgagctctggtctctccatgcctgcgctggcctcccacaagccaaaccaatattccccgtcgcaagcatggacgatccccatctcatctgcttcatggtgcaggagcgagaattcgagggaagaagaagaagatactgccacatcaagagaacatggatggtcatgttcgacacaaggagcaagaaactcttgtcagtctgcagctgccgcgatagttggctcatataacgctccgcttttcacgtggcgttaaaaagctaatgtacaaaaatcctaattgcgaaaatttagttctttgagtgttgagtctaagttgtgccatagatctcaatttaaaatccctctcttgtctcaataccctgatatcaaagatcacctcctcaaaatttccgttccaaaataatctcgaagtttgaatccttctattcggatttcactgtagaaaccctaaccacagatatcgcctaattccggaatccaaaaccagactccaaccctaaaacctctccaatcaaattccctccttgagctagctctaacatccaagcgtccccctctcctcgtctccctcgctttatctatcgtattctaccgccacctcctttgtttcaccccgaacattgatttctccttttgattccctctcaaataatccttgagctgccaaatacaaatatatccctaaaatatcaattctcgctttgaacttcaaccacccatcgacatcgaaaatcacgcctcatcgaaattccttcccatttccgaaagtatcgaattcgctctttgaatcccctccttggcttctccatattttgttgagttcaaatatccaatttgaattcaaatccaatgtcaaatgctcctcaaattccttgaagaaattcccttgaaaaagtctatttcacctccctcttggtcgttgggccgtttttcccttttccggcccatcgtctcctctcggccgctcctcctcctccccgcacgcacgtgctctgcacgcgccgagcgagagaagcagcgcctctctcctctccttcctctctctctctctctcgtcgaactcctctccctagcgccgatttccgccgccgccgtttgatttcgcccgtcggtttcccccgcgcgcgcgctcgacgctcggtcgccgccgcgttagcctcgacgccgcccgtgcccgcgctgccgctcggccccgctgctctgcgcgcatgcgtccaagggcgagagccagcgctcggtctcgccctctcttcctccttcacctttttcccaaagcggcatggagcaagctccccttttctccctccttttcccttttttctctcccgaaccgacgtcctgcctccaccgcttggcatctagcgccatggtagcgagtgcccctgacgccgcgcgccaggtcgccatgccccaccttgaccacgccgagccgtgccagcccgtgctcgcggttcgattcccaccgcacgatccaccgcctccactgcccaacgcatccgcgccatccgctgtttcgtgccgcccacgaaaacgccgacgtcgccagtgaacgccggccgagcgccagctcgcatgctcccccgaaccgaccttgacgctcccacaccccctctataaaaaccaccccgtgcttcctcctccccttgcttcgtttcccccaagcggcgaagctctgccgccatgggaactcctggccgccgcgtcgagctccatgtccggaggcatctcgccgtcgagtcgttccatcctcgccgcgtccttctccttccttggccgaacgacggtcgttgccacctcaccgcaaaacccgtctgtgccgccctgccctgtccccatatttccggataccgcgttggtcccgattcgccgccgccttcggaaatcccggccgcactcccccgtcggccttccctctcccaccacaaaatcgccgccgacgtcatttcctcttgccggtgagccccgagcctaaatccttcccctacatcttctagctgctcacctcgccgtggctctattttccgccgctgtcggcctctctctcctctcgccgtaccttgcgccgccaccctccttgagtccccttgagccaccccaaaaccgtcgctccgcccgctggcctcctcttttgctcctgcgccgtgccgtcctttccaccgccgtcgtgcgcacggtcgcgcaccgccgttggcctccctcctctctttgattcccgacgccgccgccatccccgtgacccctgggacctcccagaagtgtcgccgcagtcgctagcctcggcctctgcgcccgcgccgtgccgctcccgccgccggcgccggacgccgtcgccggccccctccgaccccggcgccctaatccgagccgtggaatgagttcaccttctcctccttttgcctccggcgccgtcccctccctctggctcgctgccgctcgctggcgccgttgcgccgccgtgagccgtccgatctccggaagcccttcttcttttccccttttttctggcaggggaccaacactggcacccccgaactagtaccgaacggaacttagcccgggacccttcaaattaacctgttaatcgataccagtcccaagaaacagtgctggtttcacaggaagacggaatatcacagcaccagaggtctctttattatagagtaggaatacagtcatgttgggctggggacagatcctgagctcacaactgcattacaaaagggaaacggaagccaagacttgggccaaacaacacaggcgcgacttgggaactaggccgaaaccctaaaactcatcgtagccggcttgctcctggaagaactccttatcagcaggatccgcttcatcttcttcaccaactgggggggtgattatttatatagagcaagggtgagtacgggagtactcagcaagccatgggaaataagtgtttaatgcaggcttcaaggaaggctgttgtttttgcaattgattttatttgaactcttttctgaaaacaactaagtgagtgcttctcaaacgacacggatgagacagtgcgtctcgtccggtcggagtatgtgcaatgtatcagtctttagaattgattcaaggttggcacccggctaacagcttccaaacggccacccgggccaacaactttcaaacggccacccgggcctagctgatcccatcagctgcaggtttttcaaacatcgaacccattccacaacagcaatttcgcaaagcagtagtcaaacaaaactacgctaggaatcacctcacatccgcccatgaccgtgggcacggctgttcgaatagtttgttaacctctgcagagggggtacaatttacccacacgacattactaacccggatcacccagcccgtggggatcagccacgtcgggagacctccaagctttcatgacaaggcatttccaaagcggacacaggtttaccatatgccgacgagaggggtcccagaccaacaacaggttaggtcccagaccatactgtgccaggaagcccaggggtcctccccgacaccaccccggcgaatccacatgtctcccggcatcaaggctcccctgataagctagttactcagccaggggtgtcccattccacccatgtggtcgtacttgtcttatattcggatgaaattccaaggaaacggtccttaggtgcgagagcagaaaaccgtacacccggtacattccccggtccgcggttttggaaattcatttagttcgcaagcaccgacccaggtgtcgggttttccaagtctttagtaaagcaagttttacccaaggagttactcgcacagagtgcacgaatatcgaggcgcaactagatggttacaagggaacatggtatagcaattaacaaaggaagggtcaaatgcaacaaactaggtaggtccaccaatctgccttgcagacgggacaaacagattaagtgcgatcctatcaatgcataatatttttcaagcaacataattaagttcaaatataggctaaagatgttcaaaggtggcttgccttgctcgagatcttgagcttgatcctcgaaatcctcgcactgcgggtcttcgggctccgaaactacacgcgaaacgggacaacttaacaaacagcgaaaataaagccctattaatgacctctaagcgtgacattagatagatctcgagatttgaggaattttggaagttgaacggagtcaaacggatttatggttgggaagatattgaatttctaagattattggatttttggtctaaaggaaaaggatttaattaaatcctttttgaaaaaaaaagaaaagaaaataaaagagggagggaaattagactttcctcgggcggctagggcgcggcccgagagaaatggagcggttcggccgagctaaatgggccggccggcccaaggcggcccaagcacgcgcgcgcgggaggggaggagagagagagccggtggaccaggctcaccacgcgtggtcccgggtgggacccgcttgtcagtgacacggttcaccgtgcggagcgagcacgcggcgcacgcgcgcgggcgggggagggacgcggcgcacgcgcgcggttcgcggtggacacggatgcggcgggcctacgcgcagcctcacggctcgcggtggaacgcgcgcacggggaggggctgaccggggtcggctcgacccggtcttggccgagctggcgccgacgtggcgcctacgtggcgcctacgtggctgccacgcgggccggcgggaggttgacgactacgccggccggaacggacggcggacgacagcggcgagcggcggagcgaaccacggcgatacaggcgaaagcgagcacaccgggtggttgctcaggacgaggggagacgagccaacggctcggattcgccggagggagtgcgtcggcggcggattgcggcggcggcaaccggcggggagggaagagggaaaaggcgacgaggtcacgaggggccgattcccggtggcgagagcatctacgcggctacgggaatccgtcccttgttccggattaggaggaaacgcatcgagggaggccggcgacgagaggcgcttccgagctcgggcggcgacggcggcgagtacacggcgagcgacggcaacggtcggggcggcgccggctagctacggggaggctactcgtgctactactcgagtctaaggggaggagatggaacgaggaggaagaacggagggaggcactaccgtgcgggcgggcgcagtgacgagaagccaacggcgcgggagtaatctctctggcctcgggccggggaagaggaaggagagggcgcgcccggagtccccttccgcgtcctcgctcgtgccggctcctctgacacgcgcaacgacgaacggtgacggcgaaacagaggggcagcaacaatggagtggaggcgatgggacaacgagaggagaagggagggagggcgcctgggctttataggatggcaatgtcggtttgggagaggggaaccgactttggacggtcaagccagcgagctggcgctccggctagcggccaaatcggcgacagggcggagggaggatgacgccggcgggaggaaaaaggggaaaaggagggagagaaagggggctcgcccctttcttctttgggaaaaggaggaggggagcgggggcgacgagccagagggaggagggctctgcctccgtcccttggaggctagcgcgtggagtggcggggccgaggcgatgacgacggcgatgacggcggggcggtttggagcggagcggcgacacgggcgacaggcgcgtgcagaggctgacggcggcggcgaccgggcggtcggccaccacggcacgcgcacacgggttgaaacgggaggcgcggcggtttgagcggcgcggctcgggcacgcgcgctggcttgcggggccgagcggctgcgtggctgcaggcgcggcagggcagcggggccgggcggcgcagacggcgcgacgtgggcgacgaccacgcgggcgcgcgcgcgcgaacaacgacgcgcggggccgatttcgcgggcggggagctcgccagggatggaggcggggagagggaaagcgagggggaggcgctcggcgcggcgcggctcacgcgcacgcgcgcgcggcgcgcgggcggagcggagggggagggagagagggagagagagagatagccggcgagggagggggagatgggccgagagagattcggcccatcgaactcgggggaggcaaaatagacttttgcggaggaattgatttgggaaggattgggattcgggattgaactcgacgatggatcggggatttgagatctgaaatggcacggacactagacaacaagcaaagaaacaaatttcgcaattagggtttttaagagataattttcccgctaggcgccacgacggaacgggcgctacaaccacgtggccaccacctcagccacccggccctgcttgactcggtcagccgcctcttccctctcccgctcgtgagctcggcctaccagccggcccatatcctctctcactctctcccgccaggccatgggccatttccttgcagccacccatgaaccgaagtctatgtttcctccctccaccaaatcacttctcttacacaaaagtccatctatcctccccaccgtttgctggccccacgtgtcaatgagtcaaagatattctagagaatgtcttaatccggagattccaataattcgtcccctcgagcccgcatgtcagtggatgtcaataatattcttgagaatattatttctataaattccataaaccatttcccgtattccagaaaattccgacaaatcatctccttgttcagaaaaattcatttaaacttccaaaattcatatcccttgatccgttcgtccgattgcctccgttccacttccaataattccattaaattgtgatatatctaatggcactattaattagcctaaataggatattttatttggtctttttttaggtttttgattgtttgcgcctagttgcggttactggatatttttcttcaagcggaattctcgaagatttgtgaagcttcgtgaagaccctgagcaaggcaagccacctttgaaaatattgagcctatatttgaacttctattgtaaattattatatcatgttcccttgtaaccatctagttgcgcctcgataattcgtgcactctgtgcgagtatcgacggtcgccttccaacttaaaatttgagtaacttcttgggtaaaacttggtttacaaaagctttggaaaacccgatgcctgagtcggtgccttgtgaaagaaaatgagttttaaaaatgaaactcgcgacacaaggccattcctgggtggaatacttgtgcggtcgcatttaaggaccgattccttcggaattacatccgaccatacaacattgcgaccacatgggtgtaatgggacgcccctggctgagttattagctaatcaggggaaccatgatgccaagagacatgtggattcaacggggtggtgtcggggagaaccctcgggcttcctggcacagtattgtagcgcccgttccgtcgtggcgcctagcgggaaaattatctcttaaaaaccctaattgcaaaatttgtttctttgcttgatgtctagtgtccgtgccatctcaagatctcaaatccccgatctatcgtcgagatcaattccgaatccaaatccttccaaatcaaattcctccgcaaaagtctattttgcctcccccgggttcgatgggccgaat

SEQ ID NO: 22700 - DNA, 1667 bp, Oryza sativa
ccggccggtgtcgtcgtctacctcctgccggcccgcgtggcagccacgtaggcgccacgtcggcgccagctcggccaagaccgggtcgagccgaccccggtcagcccctccccatgcgcgcgttccaccgcgagccgtgaggctgcgcgtgggcccgccgcatccgcgtccaccgcgaaccacgcgcatgcaccgcgtccctcccctgcccgcgcgcgtacgccgcgtgctcgctccgcacggtgagccgtgtcaccgacaagcgggtcccacccgggaccgcgcacggtgagcccggtccaccggttctctctctcctccctcccgcgcgcgcgcgtcttgggccgccttgggccggccggcccatttagctcggccggtccgctccatttcccttgggccgcgccctagccgcccgaggaaagtctatattccctccctcttttctttacttttctttttcttttccaaaaaggatttaattaaatccttttcctttagaccaaaaatccaataatcttagaaattcaatatcttcccaaccgtaaatccgtttgactccgttcaacttccaaaatttctcaaatctcgagatctatctaatggcacgcttagaggtcattaatagggctttattttcaccgtttgttgagttgtcccgtttcgcgtgtagtttcggagcccgaagacccgcagtgcgaggatttcgaggatcaagctccagatctcgagcaaggcaagccacctttgaacatcttgagcctatatttgaaatttagttatgttgcttgaaaaatattatgcattgataggatcgcacttaatctgttgtcccgtctgcaaggcagattggcggacctacctaatttgttgcatttgatccttcctttgataattgttatatcgtgtccccttgtaaccatctagttgcgtctcgatattcgtgcaccctgtgcgagtatcgacggacgccttcaaacttaaaatctgaaaaacttcttgggtaaaacttgggttttacaaaagacttggaaaacccgacacctgggtcggtgcttgcgaactaaatgaatttccaaaaccgcggaccgggggacgtaccgggtgtacggtttcccgctctcgcacttaaggaccgtttccttggaatttcatccaaacataagacaagtatgaccacatgggtggaatgggacacccctggctgagtaactagcttatcaggggagccttgatgccgagagacatgtggattcaccggggtggtgtcggggaggacccctgggcttcctggcacagtatggtctgggacctaacctgttgttggtctgggacccctctcgtcggcatatggtaaacctgtgtcggctttcgaaatgccttgtcatgaaagcttggaggtctcccgacgtggctgatccccacgggctgggtgatccgggttagtaatgtcgtgtgggtaaagtgtaccccctctacagaggttaacaaactgttcgaacagccgtgcccacggtcatgggcggatgtgaggtgattcctagcgtagttttgtttgactactgccttgtgagattgctgttgttgaaaggggttcgatgtttgaaaaatctgctgctgatgggatcagctaggcccaggtggccgttttgaaatttgttggcccg

SEQ ID NO: 22701 - DNA, 6270 bp, Oryza sativa
ccagacgtggatgttctgcacaggctgggtgacccaggttagtaacgtcgtgtgggtaaagtgtaccccctctgcagaggttatcaaactgttcgaacagtcgtgcccatggtcatgggcggatgtgagttgattccttagcgtagtttttgttttaccctgttttatgaaaaggtgttaaggtttgggaaacctaatgcttgggaagcatttagctgtccgggggacagcgggaccgggagtccctggaagtgattggtcgtttggggaccactattatcgggaagtttggaaaattggtttggtttgggaaaaccaaatttgaagccaactctaggagttgtgcaaatcttgataaataaatttgttacttctcacctcccgaccgagctgagacttgtctcgctctggttgtggaaagcacacacttagattgttgaaaacttgaaaacaaaactgtttgcaaaataacagccttcccttgaagcttgcattaaccacctaagttcccctggcttgctgagtacgtaagtactcacccttgctctctatataaatatagttctgccagctccaaagatgaagttgaagtgaagtgaagattagggtttcgtcctagttccctgccgttgcctgtggcgtttggtgttagtccgttggttggttctgctgctgctgctgttgttggtgtttgccttgtccgtgtcgccggttgcattctcaggctgtctgagctgcaacctaagttaaggtaaataagtcctctattaattataaggatttgcaatgattcatgtttgtcaccgtgggtaccagcgctatgtcctaggactggtactgagatcgcggtttcgtaggacgcggttcacgccgttttcctacgacacgctcctgtcaggtgccgttgtacggtggtgccagattggggtgtgacagctcactcttcctagcaagatctccagctacttcacttttgatgatccaagttattgtagcaatgctgcgacatcatcagagccacatgtggttgatcatgatactgtcatcgatgagtcggtgcgatcttcttccgagtcatctgctggtggcaaacatctgatcagagtgtcaggagtggcttcccctgatgagatctttgctgcactggaatagataccggagttgtctcgtgatgatttgctcagagcgtatagcttgctttgttctgacaatggtggccgtcgattcaaatctcttttagggctcccaatgaccctgaggaagccatggctgttgatggaaatcaaggccagtgaagctcgttctgtttggtgtgcatgcagagcagagctacaaaatgtatgaaatactagtgtttccagctgtttgattgttctgaattattgtactattgctgcttgttaagaagaggactctagtactctaatagtctactactatccccatcccaaaataaatttacttttagacgtaaatttggacatagcctcgtgtctaaattcaagggttgtcaatttcggttcgaaatttcgccccccagcaagcaattatgtcaaccgaaatttccaaatttaaccaaatttttgagaatttgttttttatgcaaattaaattattttcaaataagcatgtacatgggcacatggatatcgtacccattaaaatatttatttttggttgaataagagagaaaaacagttctaaatatatgcccgtagttctaaatacaaatagaaaagaaaattttctatttgtatttgtattttttaacccaaaactgtgggacccaactaacggccttaaaagtgagggcaaacggtgggttcgttttcaaaaagatggggcaaaattgtaaaccctaaaaagtaggataaaacaacatttggggttcgaagtaagggcatgcatgcacttgtcccatttttaattggtgctatttaatgattcatttattaaatggtgccttttatattagattagcgtaaatccatagaaggaatgtgacgttttggatgaactgtcagagagaaaaagagaggataacaagggaagagggtggcttggctggtctgttgaggttatagaggactaaataggccgcctgggcatgacccagcctaagcacgaccaaggctgcggttggcagccatgcccgctcacgggcttcacttatggcccaataagacttagaccatgttgtgtcagcccaaagtcacgaccaaattattatgctcgtccttagaatatatttactttgcttctcttttcttttcgggtcgtgtcttatattggtagaataacttactaatgatatgttccatataaatctatcttgctaaaaaaaatttcaatttcccctcttagagtgctctaccgtcggccaccggagaacaggtcaattaaggcaaggggaaagaattcaaattatttaatcctaaataaaaagaaaatttaaattgctcttatgaaagacatgtaggagtacgtacaacgaggcggattcctattatacgattcattagtttgtttcataatcaaactcttctatatagtcaaacaccttcttcttttttttcgtaaaccgaggaaccgatctctccgcttacgttacgagacagatcaaatcgtttgttccggcctctcaccggcggcccatggaaacccaacggacggcggaccaaggcggcaacggcggcgccggcgccggcggctacccacggtgggtgatactctgccgctacggcgagtaccagggctacgagcgcgacgactccttcccgcccttctccacaccggacgccaagaccgaggcggcctccgtcttctcctccggcggccaccacgtcctcgctccctctgcctcgacgcgccaccggcgtcgtcgcgcgtatgcttcgacttcttcccgcgcatcggcggggggcggggcgccagcctggccgtcgtggctgcccatggcgactccgtgctcgtccggttgagttaccaaggagaaggataccggtacggcgacgacggcgtgctcgactacttcgtctacaacgccggctccgccgccgcagacccgccacggccgccgtcgctgtcgctgctccctgcctacgtcaccaccgacgcggatgaagaagagagtgaaacctggcggccgcgccacgatctggatgaaaggaccaccggcctcctgcgccgcggcgaagacgacatggtggtggtggatctcgccgtgatggaggagggcgacgagctggaggaggccgagctcctcgttctccgctccggcgagtggaccgtcacacgggcgccggtcgtccacttcgacggtagagccgagaagctgccgtcgtggatcaccgacatggccgtccccgtcggcgagcggcggatgtgctgggccgacctgtaccgcggcatcatcctctgcgacgtcgacgacgtgttcgaccagaatccgcagctgcggttcgtgccacttccccccgaggccctcaccgatgaatccaacgacgacgacgacgactacgacgaccacacgcggaaatacgtcatcgcagagcgaagcgtctgcgtcaccggcggcggcgccgcgctgaagttcatcgacgtcatcccccgctgctgctgcggccgccccggcccgacctactgcggccattctaccggtgccttcatcatcaagacctggatactcagggtagacgacggcagcggcgacatggcctggaccatggacgccatggtcgacgccagcgagctctggtcatcccacgcctacgccggcctcccacacgccattccagaacaccccatcgtgagcatagacgatccccacctcatcagcttcatggtggatgagcgagaatccgaggggagatattgccgcatcaaagaaacatggatgatcctcttcgacacaaggagcaagacactcttgtcagcgatctcctgcagccatggacgcaatttccttcctagcaaggtctccagctacttcacttcctccaatggaagctgcagcaatggcggagcgatgtcagagccagctgtgatcatcgacaaggcgccaacacatgatgccatcatcggtgattcagtgcgaatttcatgtgagtcatctggtgctaaacatttcagagtgtcaggatcagtagcttctcctgatgagatctttgctgccctggaagagataccggagttgtctcgtcatgatttgctaagagcttatagcatgctttgtcatgataatggccgccgattcaaatctcttttggggcttccgatgagcctgaggaagacttggttgttgatggaaattcagacgtgcgaagattgcgctgtctgctgtggttgcatgacagacttgcaaaatgcatgaaatactttgttgtaaacttgctttggtattgatagtatacatgtgcttactgcttaacagtcggattgtgcttaattgtacaattgcttgggtactttaggttttttttttcaatgatcataaacgatttggtaccatgaggtaccggcaccttgagatactttttttttgacttgagcaaatctctaagggcatcaccaatgtatatggtaaagtgatccatatagatgggacccgcataaatagtttatccttatggcaatctccataacgtatacagatacaaggtatcattaggagaagagagaggagatagataatataatttatttcatatgggtagtccatatgcatatgggtatcttttgctattttttctatatggactagttgcacaatggtaataggtggctgaatggaatattatattgcttatgtactacttttacaccacattgtggatgccctaatccataacatgtggcgcatatgtcccgattaatttaaaaacaatccatatggagcttttcccatccatccaaacatccatagaaggctaaaggtaaaaaaagggcacctataaggagactggattttaaacttttgagggaatgtcccctcgttatttgcatgtcacttaaatatttaggaaaaaaaattaagaagatgtatcaatatatgatatatcactccaaaaaaatacaaattaaaatttaacttttacatatcgcaaagaaaaaaaagcaaatttgactagctgtagtttaatttgcattttgttgcaatatgtaaaaaattaatttgaacttgcatgtttatggagtgatataccgcatattaatatattttttcaatttttctcataaccatttgagtgatgtaaacaacgagagaatatcccatcgagagtttagagtagtttccttatatataagtatcaatatgtgctggtcctccataaaaacatatattccatccgtcccaaaatataagcatttttaacatagtgacaagtcaaacagttttaactttgactattaatagaaagaaaaaaagatcaaccatgtaaaattgatgttactagctagattatcattacacaaactataataacatgcaactctttttattcaaaacgtcttactttatatatcgttgaccaaaatagcatctcggagatcgtgttagaatccaaaaatacttatattttaggacggatggagtagtattttctttaagataaaccaacattataacaaactaatttataggtgtcgtgtcgtttttttaaaaaacttgtactcgtaaaccgcaaagccgagtctgagccgggcctcatctgtgaacgtgattagctgatctttgctgacaagctagagaaactaattgacggccggactatccgtgattagctcgtttacactatttgtgagggcatttctgtttctgcaagatcagcttacgatccagctgatccttctccctattattcagattatttccccccataatatcgatccgtaattaagtcagcaattagtagttttttttcattgatgatctgcaagtcatacacgaggttatatttgcaatttaaagaagattactgtccattatatatggcctcagattttgtgtcaccctaagcttccaccagtcgccgccgccatcgccgccgaccatggaaacccaaccgacgccggcgactctccgacgcgtcggctgctacgacccacggtgggctttactcgagcgcgacgtccgacgcaagcacaagaaaggtagcgatgatcagggagaccgggacgactcctccaacccctgctccgccgccggcggcagctgcgccgagaccgaggcgagctgccgcaactccgccggccatgtcgtccgcctct

SEQ ID NO: 22702 - DNA, 3285 bp, Oryza sativa
acttcgtctacagcgccggcgatgccgccgccggtgacccgccatcgttgtcgctgctcccaattcactgggttcactacgggttgagtgacaggacgccgaaccggctggacgacgctagaaccggcctcctgcgcgccgccgccgccgttgcggtgacaacgaccttgtggtgtctaagctcaccgtgacggagggcgacgacggagtggacgccggagctcctggtgtttcgttccggcgagtggagcgtcacgccggcggggatcatccacgactacggcgaggccgacgagctattccattggaagaccgacatggtcgtccccgtcggcgaccggcggttgtgctgggtcgacctgtatggtggcataagactttgcgacatgttcgaccacgatgatcctctccggccgcagtacgtgtgacttcccgtagagccccccgtcggtgaattcgacgacgacgactacggctaccgctactacgagtacgagagcggcggcgacagcgtccgcaaccctcggctttgcctgatgaaagatcgaaccgtctgcgccaccaacggcggcggcggcggcggcgacacgctcaagttcgtcgacatcttcccccgctgctgctgcggaggccccggcgtcaccacctgcgaccattccagctccgccttcgtcatcaacacctggacactgaggacgagcgacatgacatggaccatggacgccatcgtcgacgccaccgagctctggtccctctccctccacgccgacgccggcatcccaccacacaaaagaccgtactaccccgtcgtgagtacacgcgactctcacatcatctgcttcctggtttacgaccacgattactgcgtgaaagagaaattttggaagatcatgcttgacacgacgaacaagacgctgccatcagtctttgcctacaaaaatcagtcttcgccatgtttacggtgcattcccagcgagatctccggttacctcctcacttcatgcagcagcgattcaacaaagccggcagccatcgtcgtcgacgtactacctgcagctgcagcgacgacgacgacgacgactgccgtcatcagtaagaaatcacatgaactgtccaccaatgtgtcagagatggcttctcctgaggagatcttggctgctcttgaagagatacctgatttgggatgtgacgatttgctcgaggcgtatagccttcttattaacgatggcagtggacgccgattcaggtctctcttggtgctgccaatgggtctcaggaagaaatggctgctgattgaagtgaagaatagccaggcttgttccatctgctccgcatgcacaacccaacccacaacatggatgggggctgaagctgaactccaaggctctgatgtgctgagcaaacatctctctcgagttttatgaagactgtacttgatctaaatttgcaagaaaaaggggcaaaagtgtgtgcatgaaattgctgctggactacatgtcttcatctccttaaatttcatgaaatttgcttttgttttattgttcctttagatcgatgcaatgtggttaagtgcctgctcttgtatttgtgctagtggtgggaactggggatggcatcatttttagcataaattagatgagaggaacgtcctggcgccgtaaaacttttgatgtttcgtttgaactctgtagttttgttctctaatggaaacggagaggctttaattacctctttctctgaaaaactaaacatgtacatcgatcaaaggtttagaatttaatttttatttaaaatataggtgccatatattttagtacgaaggaatatattacactgcatttttattgttttctgtaatggcatataccaccatctagctaatgtattttgccagcacgagagatatctcctggagttaaacgtaacgtatggtaatttctagtagacatatttttttgtagttttgttatctcaaggatattgccgtgtcagctacaaactcaagcaggtaatttttttttcaaaaaaaaaaagaaaaaagacacaagctgatccactcatcaggtttattgccacaccctgccttagcaccacctaacaatgacaccggagagggtgcgccacaggaaatcggtgtgaaccgactcccacagaaccacgatgtcgataggcacaagcactagtttcggcagtactgagatgcatcattccaataaataaactatatcttttggaagtcacatattcggaacatgactgcaagctctataatcgataattagagaagtagcagcgaaacttagcgcaactagacctaatccacaagcaaagatttagtattaggaaggaaaccctaaccttcaactttacttttgtcttcccaggggagggggaaaactacaatgggtggttacatgcgagtatgtcggcttcaaaggattgatgggtttgtttcggagacttttgaaaacattttcgaaacactaattttggatcgaggtgattggtaactccgttaacaccgcaaatcattagatgagtttcccggaatgcagaagggagcataaggaaatagattttgtagggaagtaggacataaagtgtttatctatgccaagaaaaggccatttgaagccggcccagagagaaaaaaatggaaaaagtttgtccttttgttctcccaaaaacggcgatcaagtttgagaaggagatagataagttccttgtagtcaaagcttcggaaaacctcatggcggccgaccgacgcggagtgggaacttcactactactgttagccaaaaagacgccaacagaaatactataattacattcaatcgctatttttttttacagtgaaaccaatgtggtgcggatagcctgatgtatagatggccaaagggcccgcctggcacagccctgcccaggcacggctgggcacggcccagaagccatcgggccggcacggcccgataggcacttcgtgccagcccatgggatgcacctcccgcccaggcacggcccgacgtgccatgccggcctgaaggcatgggtggcccatcgttccttttttaaaataagtctaattttcttccctcctctttgggctatttcatatttatagctaaaataagtctattttccgtccctcctctttggtctgacatatgcatagctaaaataagtctatttccgtccctcctcttcggctgacatatgtatagataaaaaaaagtctattttagatccctattctttcatccatggaatataataggctgcaggaat

SEQ ID NO: 22703 - DNA, 2717 bp, Oryza sativa
gtctatttttactcccctattttttgtgtattgggccgagctgccggcccatcgtgccgggccggcccaacgtgccggtggaggggcccaggcacggctcggtggtcaggccgggctagcacggctcgacctccgtcgggccgtgccgtgcttgggccgggccaaaatgccgtgccatgggttgggccatcgggcctcgggccttttggccatttatagcctgacggcaacaattttttttttttttgagaaactgacggcaacaatatgaatgagtgaggagagtggattctaatctcgagggaatatcctctcgttatttgcatatcattcaaatgggttatgatttttgttaaaaaaaatcaaaaaatagattaatatatgataaatcactcaacggcaatgtatttaacctaacatatttgatcggtccaaaatcaaatctgtacggcaaaagccaaaggtgaaaaaatcgtttttaaaaaatcacaagatagatatgtagcaaatttgtgctctaaataggtgtttggatcgttagttttcataataaaattcattggggattggataaaaaaaagaaaataaaagtcctccacaacccacacaaaaaaaaaaaatcgacacaattaacagtaaattcgggctagagtgtttttgatgacacgataggatctctaacgataaacgtgacggttatttataccctgttaaatcttaacagaaaacacagacatacattcatctgttacgatcttttatataactccgataactagagccaaccgcaaggcgcaagcaactaatcaccggcgacgttgatggccaccgccggcggcggcagttacccgcggtgggtgatgcttgagcacaaaggtcacaacgtgaggagcttgaggaagcactccgccgccggctacaccggcgaccccaagacggcggcgagcgcctgcaccttctccggcggcccgtgcgtccgcgtctcgttctgcctcgagccgccaccggcggcgtcgcggatgttcttcgacttggagcaaaaagatctagatgcctccatgtttgtcgccgctgcccacggcgactccgtgctcatcaagatggaatactacgacgagcataacgccgacgacgcgctcgattacttgattacttcgtctacaacgccggcgacgccgcgcggccgccgtcgttgacgctgctgcctcacaactatgtcgatgcgacagagcaggacgagccaaatccagacatggatgtacgtgccaccggcatcctgcgccgtggcgacgacgagctcgtggtggcggagctcatcaccaaggggagcgacgacgacatgccgccgaacgaggccaaactcctcctcctccgctccggcgagtggagcctcaagcgggcaccgatcatccaccgcgacgacagcggcggctagggcgctgagctgtcagcgtgggaaaccgacatggtcgtccccgtcggcgaccggcggctgtgctgggtcgacctgcaccgtggcatcatgctctgcaacccgttcgacgagagcccccgactgcagtacgtgtcgctccccgtcgagccccccaagagcttcgacgacggccgcagggactcgccggcgaccaaacgaagtgtgtgcgccgccgccaccaccaccggcggcggccacgcagatgctagggaaatcattttgctgcttacataattttgtgatgcaacaggcatactgattcgataagtgttccatggattagcctaacaaacatctgttgatacattggcgcattgctagcctgtggcttacttactgctactcctagacaacaatgtaatgccgtgatacgcatatacatatgctgagaaatactccgtataaaaatgttacccccaaacagcccatggcggccaagccatgcggccagcgtccatggagcaaacactggacgccgcgtcatcgtggcggaggatttgattgattcttgtcgccgcgttcgggcgtcacgctagtgctggctgtgctgctgctaccggttcgttggagagaggagacgagccaccgagacggagcccgaggaggaggaggctccctggcgcgttcgcgggttcggtagagatgatgatggcggaggacggcgtgccgttggccgagtccgagtggctgcgtcggtggtggcggcgggactctggcccgctcgaacaccggccggctggtcttgtaggcagatggcctcctatgcacgtatagcaaaggaggaaaatgatgtaatcttgcgcatttgtcacatgtttttcattcagtttgttagctttggattctgcggaatcatcttgggcagactggatctggagagaatttgatgggcaatctttgatgaaaaccttacctctgggccagcactggaactctatgcaaaaactcttacctgcccttcaaaatctgacgagagtaaaggttggagatgggcagatggctcgaggacttctttctggcatgaccgttggctaggtattcagcaacttgcaaacctattcccggcactctactcgcactcaacaagcggtcatgcaaatgtcaaagaagtgcttagcaggggaatcttatcgtttttggtaccaagactatcgcaagcagcccaagctgatcttcataatttagagaatatgcttgcagcttgctttctgaatgaggaacctgacatcaggcaaaatgaggg

SEQ ID NO: 22704 - DNA, 2320 bp, Oryza sativa
tagcttagtttttcagttctgttttcgtagaaaactagtaaggtgcccgtgcattgcaacgggtaattttattaagtgaaaagaaattgagtgaaaatttgttaaactatcagaagcaatctgtcagcacgtacatttgtaatatctccaagcggggctgctcatatccaaacagattagaacgtatttggtacgaaacacctaacaaatttctacatgttaccatattacacatcaacctgaaacagttgaggacacaggagtagccattttggtcgtggaatcttgagatcaatgatctgaaagagttgaattaattcaataataataaggtgttgtgttcaaaaagtccaaattttgataacaatagatgtgttaatttataaaaacctattgattcatccttcctccgctttctggaatcacgtctcttcttgtttccatcttcctttagctcttttgtcaatgatgcgtacctctctctagcacgcttcctttttagttcagccgtactgagattagtaacatcttcatgcatgttgggtgtaccgtacgacaattcggctttgtctgtacatggtagccgcacatgcctaatgacagaagcgttattttcattgcctgcaccacaaaatcagaatgctgatgttagcctaaaacaaatatctcatatattaaaaaaaaaagaaagccaatataagtatgataccaaatccaatagttgaggctctctgaatcttagatgtagagttcttgttgatctgttgatagttctcacggtcttttggaacattgatttcactttggataaccgcggcatgcttatttgtcaacttggcattaatcacattagttatatccacaaaaagacctaaaggaagagtgtacgtaaaattaggaagcaaaaatatatcaattgagcaatggatattaccatggctggatggatgaaacaatgacatgatcttttggacgatattggtgctgaaccgccaccattgttatccattgcagaactaacttgtttagaagttaaccgcaactgtggaaaatcattgttcggtttcaatttagttcttcacaccaaaactggcacctaaaactgaaaatcatacatcatgatgtggggataatgacatgcaaaagctaccagcaaagtagatgagtagactgtactgcagaaaatgaagaaaaaaacacatggtgcatgtactgaaataggtaagatacattgcaagaatgcggatttctgaacttgaactaatgttcagaatgtggttttcaatactacaaaatattcaagataccattcttataatagtattcaaatttaatgtccatggtgttgtgcagcaaattataatgttgtttgagtgtccttaggcaaattagtgcaagatttgcagatccaaaaatgtagaggttaagaagtgcaggccttcaagttagtagtagtagattgcattctgtatctttgctacctaactaaattgtacagataaaccctattcagggtaataggttatttcagaaatacttgccgcaaccaaaattgtagttactcaatccatgatgctaggatgcctagtgatgaaagcaacacagcatgcatggattggggatataacatcagaacttcaaacttattacatttttttttttaaaaaaaagaagagcagagtccagatttgagctgttatctgaacaactccacaaaccataccaaatgtcaagaatggattaaaaaaattaaaaaaaccagagttattcagataaagggatgatggtctggataaaggaaatgtccttcattttgtcatcattttatcaattttaggtcatgttctccaggcaactacacaacattgtagtgcttctatcccgttagaatggctaacggagtaacagtctgaaacccctctaacaaccaaaccacgataaattctgaaccatgatatcttaatagataaagatttgtgatgaacgagagcaattgtttttattctaaattccagcacatgcaaaaaaaaaacaggaaaaatattatcttctcatatcaaccactcaaggaaaacagggaaaaaagagagaagaaactgcttttaccttcaattgaggtaatgatgaaccaaggatgtcgaccggaaacaacaggatatggacacatgagatctctgatctgcggggttatgcatggcgatctgctgaacttgctcaaattagcgaaatttctgagaatcgaaaagaagctaagacgtctattttcagttatttacttagagggtagaaaaggggaatgtaaataaaaatatattagcct

SEQ ID NO: 22705 - DNA, 5478 bp, Oryza sativa
ctagtaatttgttttctcatccttctccaattcatggcgttagtaaatgaagtttatcttccaaaaaaaatattgatcaatggttaattgggccagcttgttaacatgaaatcaagaataaaatgatatgattggccagccttaatacttaccaagaataaattgttatgatttgtgaaatgatccatttcctatgacatttctcaagaatactaatctacaatatggctgccattccatgaaagattggaagtgaggaagcacctagaaagagaaaaaccaaatcatgggacaaactcttagttccaaaaatgcatggttgtaccttcctgatatattttttttgcaggactcttaataggatttgaacaattgaaaagccatgcgtgtacaacaggaaatgtaaattcagtatgaaccccacaatagatacaaaggaagaatctgtactacagaaacacctctgaactttttgaagatacaaacgaaaatatgaattcagtacgaactcagtaatagatcataggttagctcttgcaaagtacaagtacaaagaaaaatcaaaggaacaaagatccctcttggaattcagaagatctactcctatattcagaatgaccaataataattcaaaaggtagatgtcagaatcagctttttgtacaatttataataggggtaaatttgcaattgcccctttataatatcagtaggtttcaataataaattatgaaaagaacatttttttttcaaactaaacagtagaccaccatatttttatccaaactgaacagtagaccaccatatttttatccaaactgaacagtagaccacaatatttccatttcatctttccccgggacagcatatgtttcttaaagatgaagtgatgaaccgacattcatttacacaaatcgcaggtaaaatctaaccccgacacattaacttgcaaataactacaaaaggtgcatgcatgcatgtagattttactctaatctagactacaaaagtgttgcatctgcattttctttcttaaaatgctctatttttcgctgaaatagtagccactggcagtgaggcatgttatgtacactcagccatcaatttcaaccagaaaattatctttctcacaagtacatggactcaattgttacataaaaaatacacaattgactgtacattaacagaataggatggtacttaatcatgcataggtggtacaatagcaaacaacagaaacagatcaataataacataattctgacccatattcttctaaactgtttaactcccttataaaaggaacaacattgcaggaagaaagtgactcaaactttgagctatcattgtgttgttatattgtgatagtatctgtccagccagatggtttatatcgggaacaagatcttcctattaaactttgaggaaaaaaaatcatatattggtacacagaaagttaaacaatttagaaggcaaacacataatacacagatccatgctcacttcaaatatgaatgaatagaattgcccgcatagcaaaacgattcacagaaaaaggcatccaccacaagctttaattttctatgtggagatatacattcgaatgtggcaaggtttaattttgtaattccacaacaagctacagttagatgatcaccttattgataagcccatcgtcgatcacagaaccattaatgctcttgaacagctcgaacaaagcctccacctcactaacgctaactacacatccaagacaactaattcagaattttcagtacgcccatcgagataatcagaccggcggccggcgggcttcgtaaagctttaggcacattacctgaaagggtttgaggcacattacctgaaatccgtcttcggtgggcagggggcgacgggcggatggctaggggaggttggaaggggaggcggccggtgatggttaggggagggatgagagcgcgcggaggagatttgcgagggcggcagcgagggagcgtctggagagtaggccggcggccgtggctgctgaggaggcgatgcggcggcgaggtgaggaggcgacgcagggaggagggcgaaggtggaggatcaatccgatgcgaggtggaggcgcggaggagattggagagggcggcggcgattgcaggtctggagaggaggccggcgggcatggctggtgaggaggcgacgagacggcggggcaaggaggcgacacagggaggagagcgaaggacgcggcgtgggggaaggaggagtgggcgtggggaggagatcgatccgagagaggagcgagcgcgtgatggggagaggagtgatcgcgtgatggataggagatggacgattgacgccgttggatatggcaattggatggttgagattacgcgtgtctgtcagacgcgtctgctatgtcaggaatcaataccaccactacggattttttaagtagtagagagatggagccagaatcggaacgtgggatggtgcggtcagtagtttgatccaataaaattgtgcatgtaacaacctcctagaacctagatggagagaaataaaaagaagaagaacacagaaaatgctgcaattagttcgcagccaaaaaaaaactctgtttttggcactctgtttgttgctctgcattctgcattcagttaactgtttatcatccgaaatattcagagttcttcatattagccactaaaactgtgagtgaaagagagggagtgatttctctaagcgctttctaataaataagcagctaaccatttacacatgcaaagtattttttaagcataggcaagaaagcgcctcagcatgcaagaaaaaatggttgccaaatttgccagatccgcataacgcagaacacttgtcaggcaaaggggccaacactactgctagagcataaaactcatcggctcgacggcgattgccgcggccgcggcagccacccggcgagtagggaagcggagaccgcggaggtggaggcggagcgaggcgcgggctcgtggaagatggagcgaggtgcggtgccggaggagcaggaggccgcggcggctgctctgaccgcgagctccatggatgactgcgacatggaagaagaagtcgaggcaggggttgccagtttgccacttgccagagtcggcgtaggtggcggagtcgttctcggtgcggccttccatggcttcggcttcgatccagaggtcctcccgctcctccgatgcctattagcctatctgtcaccgccaagaagctcgttgacggttgccacagcgcttgcctccaccttcgcgtccattaccgcggcgcccggctccgcctcctccgccagaatcctaatttgttcgcgcgccggcagcgcgcactcccggtccacatggcccacgtagggcgcgcgcgcaatttttttcgctaacctatcgtcgttttctttttttttttctcgcagtttgatgccgtatgggtaggagaaaaaattgtaattagttttagtagtgattagtttcctatttttactagtgattagtttactagtaattttttaatttgaacttaaaaattgttaaatttggacttgaaagttttcaaatctcgagttgaaagtttttaatgtcgagttaaaaatttttaaatctcaagttaaaagttttcaaatttgaacttgaaagttttcgaatcttgagttgaaatttttcaaatctgggttaaaagttttcaaaatctgagttgaaagtttttaaatctaagttgaaagtttttcaaatttaagatgaaaagttgaaagttttcaaattttgacttaaaaaattcaattttcgagttgaaagttttcaaatttgggtttaaaattttgaaaaatttgactacagatataaatttcattttcaatttgttagttaaaaaatctcacgaaaaaaagaaaatcctaactactaccgtcattatctctaactagattagttaactgccttaagtgtggaaaaaaacgtgcgtccctgacgcgtacgcgccgactaggacccccctcctccgcgcccaccgccgtggtgcccgcctacgcctggctcgctgcccgttctttcctgcctcgccctgtcatttttgaaaacaaggagaaaagtgagaaagagagagataggaggaagtgagagaagaggggagagagatgaactgttgaagagaggggggagagaggaggaagaagaggagggttgagaatgacacatggggcttacgtgggccccaccatttatatattttttttgaagctaatatgtgggtcccatgaggtttattattttttcgaatcaaattaccacgtaatcgacatgtcaatgccacattagatgaagaccaaagtcaaattagccacgtcagccaaaaccgctgtccaaaccaccgagtgatctcatctgcactggttttgacagttgagggacccgttgtatctggttttgaaggacgaaaattggattctttgaaggatgaaaattggattcgttaacaagttaagggaccttagatgaacttattcctctggataatgacaaccttacccttacccgattgcatccggcccgttgttcgtatggcgtaatagtccgaaagaccaggctgcagaaggccgtttgttttaatgggccaaaatatatcggcctttttcattcggcccaagaagagagagagcgcgtctaccggtgggtgcccccccgcaccgcaccgaacagcccactctttttttctcttcttcgtcttcgtcttccccgtgccgcataggcatagagaggcttctcccccccagatccgatccccgcacagagcccagatccaccgaccactcccccagatccaccccccaccggcggccgtgcagcggcggcgtcggcggccatggagaagccatgcaccctcctggtccacttcgacaagggctccccctccatggccaacgagatcaaggccgacctcgagggcagcgacgtcgccgccaaggtcgacgccatgaagcgcgccatcatgctgctcctcaacggcgagaccctcccccacctcttcatcaccgtcgtccgctacgtcctcccctccgaggaccacaccatccagaagctcctcctcctctacctcgagatcgtcgacaagcgcgacgtcgcctccggcaaggtactcccggagatgatcctcatctgccagaacctccgcaacaacctccagcaccccaacgagtacatccgcggggtcacgctgcgcttcctctgccgcctcaacgagcccgagctgctcgagccgctcatcccgtccatcctcgccaacctcgaccaccgccaccacttcatccgcaggcacgcgctctccgcgatctccgccatctaccgcctcccgcacggcgaccagctcctccccgacgcgcccgaggtcgtcgagcgcgcgctcaccggggagcaggacgcgtccgcgcgccggaacgggttcctcatgctctgcgcct

SEQ ID NO: 22706 - DNA, 1113 bp, Oryza sativa
tgttattattctggttcaggaatcaaattatccaaatattctgcatgcttttaaaatttaaaggtaataattaagcagaaaacttgattctctgtaagaatatttggataggcttgtgtagactattctgacagaaatgggcatggaacattttgtttgtacagtagagatttaatgttattgtttaatatggtaacacatggactgacgtgttactatgttactgttttttcctgtctagtatttgaaaagatggcctgcggttctttcttcactaaaacatgccattcattcttgcagggaatgagccaacttgagttggaagatgcagtccaagatgatttgaaggctgctactggtgaatttacaaaagatgcagatgacgcaaacagactgaatcgcattcttcaactaacagggttcagtgatcctgtgtatgctgaagcatatgtaactgttcaccactatgatattgtgcttgatgttacagtcataaaccgaacaaaggaaacacttcagaacttgtgcttggagttagcaacaatgggtgatctcaaacttgttgaccgcccccagaattacacgctggctcctgagtcaagcaagcaaattcgggccaacatcaaggtttcatcaacagagacgggagttatattcggtaacattgtttatgagacctcaaatgtaatggagcgatcagtggtggtcctaaacgatattcacattgacatcatggattatatctcacctgctacttgtgccgatgttgctttccggaacatgtgggcagaatttgagtgggaaaacaaggtagggttctttctcaagcttcagcttttgcaaatgcttgttttacaagattctttcatgtattatttgcagctgctagattttcttcttcactgtgatctttttgtctggctcctctttattaacatattcttttacttctgttattagcttgtgaacaccaaaattgtaattcactatttgtgttatgaagaggtaacattgtgggggactggtggtgggttacttctgttttattttggaatgactttgtctagtaattctgactagcggtttgtttatgctggttgttgtcgatttgtt

SEQ ID NO: 22707 - DNA, 728 bp, Oryza sativa
attcctgcagcccatccagacaggttgttgtaagacaagttgagaacttttagagtctttatgttttctagagatgcagggatgcttccactgaaaacgttgtggtccaactctatgtcttccaaactttcagagtcacccaaagtgctaggaatatatccagatatattatttgatgaaagctgaagatatgtgagttgttttgccttgccaatgtcattatggaggggtgcatctagattgttgaaagataagctaatttgcactatggttggaattctgaagatctcctttggtatgctaccatgaagattattgttcgagacaatcaatacttgaaggattgggagggttccaaagcttggtggtaattggccaactaactggtttgagtctaaatatagttctcccaattgagacagatttgagaaagatgatgggatggctccagtaaagaaattgctacccaaagataccttttgcaaagttttgatggttccaagccattctggaagcacacctgtaaatagattagcacccaacgccacaataatcaggttctgaaggtttgctatacctgaaggaaaatcacctgaaagtttactttctgccaagtgtagctcctggagttgatcagaaaggttacccaacgaactaggcacatgcccttgtagacggttcccagtcatggagaaaacttgtagctcagtgcagttgcccaagctttg

SEQ ID NO: 22708 - DNA, 695 bp, Oryza sativa
tacgaggactgccccaactgcagtatggacaccatgatcagcaaggccccagtagaagccttgtttgcttcagcctttgatggctggacctcctccagcctcagcacaagcttggtgagggtacaggcaacaacagcagctaaaaagaaatcaccagacagaatgagagatctgagattctgtgtggaactcagtgaccctggagcaacagctggagacgaaatggcagtctctgtggcagcactctgtgtggcataagtaccatctgcaagaacaacaggcctcctagaagatactgtgacagagttcaccacaggctgggctggctttgacgcatcagttgattctccttcctcagagacagtgtagaatggcagatcaccaaggcactgcttgatggtggaaatggcactctcaacctcagatagtgaaagggagtactccccaaggatccagagagcacatgagcagacacgggatgcacggatctgataaaatgtatcaatcagcctctgaatcattgacacacggagcttggggttggtctcaatgatctcgcgcacaaacaaaacaacatcaaccgctgcagcaacattagtgtcaccaaggaagtccatgaggaggtggaccaccgatccagccacctctgggtactcgacagcgcaggaatggatcgcctgcaccagcatctgccg

SEQ ID NO: 22709 - DNA, 1615 bp, Oryza sativa
agttgtggcaaggtgaggcaaattgtggtagtgaaccaaacaacccctactctccggtcaagtaatgccgtcttcaacattttatgactatggactgttgactattgtgatcatcagccacaaaaactgaatcttttttttttcagaaattctgaaccattagcaactgtacagactgaatgtgtcttgcggcgggcggatgttgattaattgttgagtatagtaatccaggtatgttcctcaccgtcttacaatattaatatcatgatcacttaactctgtaatggtgacaaggacgtccagaattaaaaacaatacaatactgcttgattagccaaaaccattaaaaatgagagatttagggatgacgtaggtgatctattagattaaagaagctgataagatgccaatgcattcacactcttatcaatacccataaacgatcatggatgtcattagtaaacactgtaaaacatgatggcatgggtctaaattactacggattataacagagcctgatcgcatatgattactaaaacaaatagcatacgaagatatgtcatcttacattcaccggccggtcggttgcatcagcatcaggaagtccaaatgctagtcattctgtttcagcctaccaaccatgtacttctattaatttaagatacaagtgtttgattgactgacttgaacactgataaattaatggatgctagctgcgtgaatcaggcattctgcccaagctaagctaagtcctgtgacagacatgcgtattgcactattgcgcgttcgccattcatgagagcatatctgcctctgacctatcaggtaagttactggtatagtaagcatcttgttcatcaacatcttgtttagctttaggtgtccatgcagttgataattcatcaaactgatcaaataacttgtactgttgtcagtgtgctgtgtgctccatatttgggtagtttgttgcaatcggtttatttctctgtatctgaccctgtgtcactgatcttgcatattactcaaggctttcacttactctgaatccagctgaagaagaagcagagaagaaagcaatccgttcttcagtaaagtaacagctgaagttcagagaacaacaacccttcaggcttcaggtatcaacagttaataattgccaacatttcatcatcaccatctaaacaataatactcctttgtgtttttatttgtctatacacatgaaccagaaccaaaattggaactagccatgaaagctccttcagttggagagcttctcttggtgttcatagcctgctcttgctgtgcacatgtcgtctgcagctcgttgcctggaaatgagacagacagactgtcactgcttgagttcaagaaggcgatcagtggtgatccacagcaatccctgaattcttggaatgaaagcacccacttctgcagttgagaggacgtcttgtgcagggcgaagctccactccgtgtcacttctctgaacctgacagattgtggtttagcaggcaatatctctccatcaattgccaacctgacattcctaaagtctctttccctgggtaaaaattcattctttggagaaatccctgcatcactgggccacctgca

SEQ ID NO: 22710 - DNA, 13440 bp, Oryza sativa
  unsure (1)..(13440): unsure at all n locations
caagataccactggtaataccaacatcatggaatgttaatgatgagaagtacagaacgccatttatgccagcaaactgttgcagaaagaaaagggaccctccaatcagtgcaactgcatatacatcagaaattaagctattaatatcatggaaataaagatcataataatgcaaagggaaggaacaaatagaaacaagtatacagacattaagtcgccaccccctgctccccgctaccagcctggtcggcgcccggctcaccaccgatgactgtcgctgcccgccgcctgcgcattcaacgacaagggcgggagttcgccgcagccgcagccaccgctcccgtcgtcgtcgtcgttgccagcggccggatcaacggctgacggatccgctgacccgtgaccttcggccgctggggtcgaagaagacgaaggagagagggaggagaggcggcgggatccgcgagcaggccgcagtcgccgatgtccccatcgccgcatccgtagccattcccgacggcagtggagccagctctcccgagggtggcgccgccggatccgaggaccaccgttgccgctaactcccaacgccaccgcctgccgcttccgaggtcggggatggcggatccgcaagccgtcgccgctccagagttcggcggcggcggatccaacctctgccgccgcaactctcgaggtctggagcggcgggcgcgcgtcggagctccgcatctggccgccgccgccaccgccatcccccctcccggcggagccgcctccaaaactgccttcaccctcccctccaccctcctcccctccttatccaatctagccagcagccccttcaccacgtaaccggcacgcatgcacaccaccacagcgcccaaatttgaattttttttaaaagcaatatgattttaatgaaaaatcgcaaaactatatgtcagttaggcgaaatcgcaagtttagcaccctgtcgaacaaccgcggttcgacagggatacctatcgaacaaccacagttcgacaggtacatgtcgaactgcgtcagttcgacagggtaggtggtccaaaaacaaataaaaaattacatgaacagtatcactacaatgctaggcagggacatatcgaacagccaaagttcgatagggttgcgtgaacnnnncgnnacnnngatgctacagtgctcgcagtcacatatcgaactgccttagttcgatagggtactgtgaacagtgtgcaacagtgatttttctctttttttaatttttttaatcacctgttgaactaccgcagttcgacaggtaccctatcgaactgtggttgttcgataggtaccttgtcgaaccacggttttttctctttttttaatttttttaatcacctgttgaactaccgcagttcgacaggtaccctatcgaactgtggttgttcgataggtaccttgtcgaaccacggttgttcgatagagtgctaaacttgcgatttcgactaactgacctatagttttgcgattttccattaaaatcatattacttttaaaaaaatttccccaaattttgatcaaccagcgcaccgcttatgggcggttgcccccttacgcgcaaggagcaagagggattagcagcgacgtgtaaaacaatataagatagcctaaaaagaatttaaaaaaatgagaaaaacagtggggttaggagagttattgattgatgattagcgttggggaaacgcatataagagcacccgtaatagtaaagtaaggtgctctctataaaacatgtacatctcagcaatagactagattaatagtaaatcacctcaatagtatgtctacatgggtatctatagctctctcatgtattgcctcgtttttctctatagactatctctaagttagtaaacagttttgctctctctctttatttaatatcttccaagtagaaaaatatgctgatatgaatctcctgtagagagtttataaataaccattgtgggtgccctaaaaagcatatcagtagtagaaggtacagtaaaaagcgtcgataaaaagcacactactcggtactcacattctcaatagcatcaggaattcaggaccattacagccgcgctggagagatctgcgcttctgtaattgtgtttgccattccacaggagtgagtggcagacaaatcgaatgaacgcaacaaaaattgggcacaacccgacgctgcccgacaaaaacacagccggccacagcttctgtacaaaattatgtagcatcaacggcgagagccgctctgttaccacagcaggttgccgacgaggcagagagcgaacgccccaagaacgtcgccgacgacgtgccggccggccggaggagggccggagctcgccgccggggtgctcgtcggcgccatgccggccatgacgcctccttcggatgccatcggcgtcggcgaagggccgaggtacgtctcgaagaaggacgacgtcggcggcggaatcagcggaggatactgatgcggacctgcacgaaaagcaagagctgcataaagtctcggtttttcaaggcagaaatggtgaactgagacataattgagcacgaattttatacctgggcattgaggcttgagtgctgtggttaacctgaaagatgcacaaaatgtatcgctacggtgagacaacggtttctgaatagcaaaatgcgagatggatttgggacacacacacacacaaaaaaaaaaaagctgatcaattacgtggtgagaattgtgccgttcacgaatccgccgtagctgcaggacgtgacgctgcagccggagctggtcatgaggagagtgaagttgccgagcatcatgctgctgttggcgcactgcatgctggagcacgtcgagtcggcgagcggcgccggcacgcagaacaggctgcaacagcagagcaaaagcaagcaaagcaacgggcaacggcagcgtcagaaacaggagagaaatctctcggttcgcgtaagatctggagcagattgaagatgggagggtgaaatcgatcggtgcctactccaagttgcctgggccacagctgcactggacacaccggttggcagtaactgcgtaggtcccgttcgccaccgccaggccgtagtccgccgtgaacgccgggaatgatgatgtgcacgctgcatgttcgagagaaaaaaaatggtactccgtcatgattaattgcatgtgagataaatgaagcagaaaacggtatagggataacagtgacgacgaggacgaaatggaccaatcatgtactaactgtagctaggtactggctattgtagtggccactgattaattatgatagaatcctgtttgtccgtgatctgacagaacatctgggtatggaggggattgaaacttttggccacttcccttcagaaattatcggaactacaattcggtctagaaactcagagcagagtgtttagtttgtttaccaacctccttttaggaaacaggaaaacagcacagcttttcagtgctgaatctatgtgcacaaatgaaaatcgttaattttttcaatgcatcacacatggatcgcacttaagaactctagaagacctttcagctattcacaacagagaaaacgacacaacactttctttctcacaatagtgaaattaaagtctctctaagtttgtgttgaacattcttaattgtcaaatttatgtcgtgcaatcgtgctgcatgctacaccttttttttcatctccttttcttgggtgtcagcttaattgacagcaaatgatcaaaaggagcagtggaaaggtaaagtttcatgcatggacccttttattttaaagctgagagcgccagtacgtgcagatacacaaacagagcatccgaactggcactagtaaacaatttgagcagacaagcagtgatgcgctgcattgctggcactcatgtttcacctcacgaatcttgaagcattttggccctgtttagttacaggatgaaaagttttggcgtgttacatcggatatatggacatagacttaaagtattaaacgtaatctaataaaaaaataaattatagattccgcctgtaaactgcgagacaaatttattaagcctaattaattcatcattagcacatatttactgtagcaccacattatcaaatcatagcgcaattaggcttaaaagattcatctcacaattacacgcaatctgtgtaattagtttttttatctatatttaattctccatgtatatgtctaaatattcgatatgacaggataaaaagtttttgcataggaactaaacatggcctttctgatatcaaagctagatactccctccgtcccaaaatatagcaacttaggatcggattagacgcattctagtactacaaatctgcacatgcccgtatccagaattcggagtaaatctcatgctcgcagtagcaaggcttgtggccagtgcggttactgcattgcactaaattaccaaggacacactagactaatcacattactgtcagtatagtactcctactgctacttcttactgagtatggagtaaaattaccaaccaaatttgtcggttaaccacccatggccatggatctaattaccaacgaaccacgcaatacatctcggtagcacaaagcaacaaaaccaaaaactaccagatccaagaagaagctatgaattgaagctagaaaagggctcacctggcagcgggacgacgatgatgtcaccggcggcgagctcgggggtggccatgtcgttgacgctcatgaggtcggtggccgtggtccggtacctctgcgcgactgcggcgacggtgtcccccttcccggcgacgtacgtgaggtacaccgcggggaggccgttgtcgacgccgccgaagcaggcgcagtgcagcggcacgaacagagtcgtcccggcgtcgacggcggcgtcgggcttggcgccgaggatgccgttggagtcgctgatccagtccggggtggtgaggccgccgtagacggaggaggcgacggaggcgagcgtgtcgcccgggcgcgcaacgtagcgcacggtggtgaccctgcggatgccgtcggagcaggcgcaggggacgggcacgcggagcgggagccccgcggggaggatgcggtcggcggggtccgggacggcgaagtcgatggagttggcggcgaggatggcgagcgggtcggcggagaagagcgcggccagctcggcgagcttgaggtcggcgtagagcgtgtaggagagcagcgctgggcaggcggtggaagaggagcaggactccagcgtcgacttggaccgcgcgggcgcgacggcggcggcggcggcggcgaggaggaggaggaggagcaagggtggtggcatgatgatggcgacggtggtcgggagcgcggaggcgtgggagtgtgtgcgactgcgagccagtgagagtggagactgttgacctggagtggggcgatgtcgagagagtgctttgctttggaaagcgtgcggggggttttggatcttgtgttcggctgtgcagaactgcagacctgggatcacatgaggtgtgagtacgggagggtgaggtttttacgagggtgcttgcgagtatctgcgagactgcaaatgcagaggatccagatctgcgagaagctggtgttggttcgttcgaattttgttttgtgccgtttgtattctgatccaatctgattttgatcagatcaacggagttgcttggcatcttggcagtgtacggttgcgtcttttcctttttgtcctgaagagcgtgctgattaggagaaattgtcctattcatactcctctactagtacccctacctccgttcgtataatataagggcatccacaatgtaagacacttctagagtgtcctcactaactgaggagacttgtaggaaactcagctcgcaataggaggtatctctggatgggctcctcaaaatctgaagcaacccgatgaagatactacagcccacaatgggtatcttggcccaaagtaaccccagatgaaaaatccccaaataaccctcccagcccattcttcttttttccttctcttttcttccaccctctcttctcacgtcttctttcttcttcttctcgccctcctcgtcgaccattcgccgcccccgcctcccagcctgccgccgccacctccctcctctctcccccgccgctcgccgccaccgcttccctcctcgccctccccagccgccgccgcgcctccctcctcgccctctctagcagccgccttcctcttccctccgcctccaccagccgtgtcccaccgtcgtcgcagaagtggttccagcgccggcggcggcggatccggcaccgaggcgggcagatctggtgggcggacgcggccgtcgaggtggcgggtgcagtcgtcgccgggtcatcgtcatcctctccgtcgcggaagccgagcccgtcgccggttggtggccgccggctgccgcggcggtggccggatctggtcgtcaccgtcgcggatcctcgtcgtcgtcgcctctctcttctctctctctcgttgccatgccgccggtgaggggcaagaaagggaaacgccaggagagaaggtaggagatggggcaccgggtcgccacaacgcgtagcctcgagggagtgtctctggaaaaagtgagctggggagctagaggggcgcgttccccgcgtgagggtcgcacctccctctagagacacgccgcgcggacggacggcggacggcatgagcggggggacgacccagggacaccgactgtggatggcctaagaaattttgtttctataatttgtcccgcaatataagttactatttggaatcccaagataacacaatccctttcccattcatcaatttttttgctccctcatccataaatataaaagattttggttagatgtgatgtatcatagtactaaatcctttacatttagggacaaggagagtattactttattcttccacctatcaactctttgctaatttattccacatatatcaaatcttgtacaattttatcctcctatctaccacaatttgtattattttatcctcctatggtacaattgtgttaactaaggataatttggtgaaggaattagaatgatagtttaagatgttgttttttatgaaaaatgaaaccatctaccatctattcattgaatgtcattttttgagatttctttggagatatgtacacatttcttttgatttacatcctccacaaagtatgtctcatatattcgggaattggcttgttggtgttgataaaagaattaagaatcttattcttgttggagcatccgctttatgttgggctctctggcttagtaggaatgacatggtttttgataaatcaccatcaaaatcttatttacaggtacttttgagggcaacgtattggctctggtgttggacccaattacaaaggtgtaaagaagatatcagcctaattaatgatgcatgtcctaaacttgagtcaacgattatgcagctcttccccaacttcggatggaggttctcaaatagaattcaatagttgtgtgatctttatcttgttggtgtctattagtttgtgcttgtttaaaattttcattctgtggttctagactcactgtgtgagtttgttattgtgtgaactatgtaataattggctgtaactcgtttgagcaaaggccgaaatattttattccattatcttaaaaaaatatgttgctacttccttaatttatgttaaaaactgtataatctcttgtattatgggatggatggagtactttcatcattttaaaataagtggtattttaatattagaaaatactacagaacaagttctgtgagtggggcaatgtgtcagtacttcttcggtagtgtaggatgggaactaatccttcatgcacgcaaaacggagtggtttattagcacatgattaattaagtattagctttttttaaaaaaaaagattaatatgaatttttaaagtaacttttgtatagaaaatttttacaaaaaacacacactgtttagtagttcgaaaaaagtgcgcgcaaaaaacaaaagacgtgagttgggaacatgaagtgccaaactcagcatggacaattatgcatacacgcttttcaaactattaaacagtgtgtcttttacagaaattttaaaacgatgctattactacgacggcggtgcccctccccgtcgaccgcctccagatcgatgccgccgacgcgatggcgcccttgccctcccactacgtcacgagagagaaggtgaagagaaggggggagaaagagaagggatagggagggaggaggaagaagagaaagacagaggatgacatgtgggcccacatttttttcgagtaaatgacatatgggacctacgaatattttctaatgccacataaacgtcatgtgggatgaagccaacaacgccacgtcagcaaaaccgccctccaaaaccactgagggggatcaaattgcactggtttgaatagttcggggagtcgtcctatccggtttttgcgattgagggtcacggatcagattcaggttactttttaagggagccaaagtggacttattcctagtctgatagtaaccgactaaccgttgctttctgggccgtgttgtactggagcacaggttatgacgtgcggaggcccaaagagttttgggccgtgggggttgcttatcttgccatccttgacgcgcgctgagctggcccagacgcccccagttccccttctctgatgctttttttttaacgactcgcacgagacggtgcgaagttctaattacaagattataaccctggagggtcgtaaccaggaaaaagaaaaaaacaacaccacccacacaccgacatcgccaacacacaagcccaggagaaggctagcaccggaccggccgccgctaagcgtgaccagccgccactagactaacaaagggacacagctgagatcgctccctaggggatgccaaaacgacgtcttcaagaagagaagcgacggaaaaaccgccactgccgtccgtcgggactcaaaggagccaagactaggctttcgcccggcaatcgcccttgaggggtgagacctacggctgacacaccgatgctccaccaccacacaagctctgccgacatgtgggaccctgcaccggcgtcccctgccgaccagccttcgtgcgccgaagatcgcgccacacccaccagcagctcctcctcacacctaggtcgcctcctctaccgccagccgcgcctctcgtgctaagccggccgcctccaccggacgcgcctctcgcgccaatccggcctccctccatcggctgcacctcttgcgccaagccggcctccaactctgccgcccgcgcctctcgcgccgagccggcctccactgccatcggctgcgcctctctgcgccaagccggtctccgacccttccaccaaacgatgccgcgtcggccaaatgcagccatctcccacgccctcagctagccgtccagggccgccatgcctccggtgactgctgtcgcggccaccagccaccgcctccgtgagccgccgccactgccagcagccgcttcgttgtcgccattcgccatgctgccgccaagtccttcgccggcgtcgtcggccgacgccgtcgctgccaactgccgcggccacaccgccgccgtcgccaactgccgttgccagccgtcgcaagtcggccaacgtctccgaccaccacagccggctaccctccaaatccggccgagaggcgcggatctgggggcaccgccgccgtcgccgcgcagggaccaataccgccgccttcgcgccctcggccgacgccatccccgccgccttgaaccaccatgacgccgtcaccaccaccaccagaaccaccgccgcccagctcaaccccgtcaccagccgccagctcgccggcactatctccgccgtggcggccttgccgttgccagccagccacggccgtcgtgtcgcgctgccagccacagctgcccaccggccagccacggccgtcgcgccactgcgcctgctgcggccgcccgctcccccagccgtagcgcttgccgccgatgccgcgtctccccgccgacgccacgcttccgcaccactgctgaccagccacggccgtcgcgccatcggcgtcgccgcatctgccgtgctcccgcaccaccacggctcagatccggcagcggagacgtcggatccagccgccactcgcctcgtggccgatgctgggcgccggatccggtggtggcggcgccggatccgctgctcttcgccacaccgccgccgcggccttcccgaagctccgcgccgcctgggttggagcctcgccgccgccatcccagcggccgcacgttttccggcgacgtgctccgacggcggcgaggccagagagaggaggggtgtggcggcggtgctagggttcacccccggttgcccgcgcgaggacgacagggagcccagttgactccccttctctgatgctcagttgacgtgtgcgtgtttacaatgttaacacaagcattaacctcgaaaaccactgtataatagtagtatgtatttcatcctaaaaacgacaaaaacatgtggcttgtctagttgtctagctagttaggcatgaatctacaagctagcatcattctcgtcagccggtcagttataatcttcaattaacgtattcccagagtgatccagtcttattttttccagttcttatcacgcaggaaattacaggacacaatatctgctgcaatttgatggtgatgttgttgaattaagatttaggaacattaattggtttgagttatctagctaggcagaaatttggggtcgacaaggacaactagtgatgatcattgcgttgatctttctgtcttccagagattaccaaagcatcgatcaatgtcaacgcatgtgctcgtcagtttcacgaacagagtcatcgattgctccaagtctgcatactgtacaccaaattgatctcatcaacgacatgaaccttggattctacctcaagtggaggcgctaagctagcatgcatccttctgaaaccatcataggcatcgacatttgacgtaccaatgttcatcattgtactcgatcaagacaacatatgattagtagtactgctgcaattacatatctgaagatttttctgaaaatgcaatgtcagtatgcagcgcactagtaaactgcagtctgcagaagaacacacatggaacataaatcccagagagaaaacgatctggcgccttgaagtggtgcaacttgtggtagtagtttttcgccgtgtaaatggcatcgtcgatcaattcacagctgctgcgtgagcgaagtaatgaggctagctatagccgtgtccctgcttaaatgcgtcggcagttacgttcatgtcctccggtcctccccttgttctgactgtcagagtgacagtgctcacgtttactaccaccctgaacccagtgaatactagcattattgctacgtacagtactagcatagtaccacgatgcagtgcttcacaaatcacaatatgcatgcacgtacagtttctgaatttcatctccaagatctgcatgcatggctgttgatataagttttcagagaagaacacctgcagcaattaaatccgtgcaatgcatgggtgtgatatcattttcatgtaaacatagttaagaacttgatgagatcgagatttgatgccaatgcagaaatgcaaggtgttgaggtgcataaaactgcagggtagcagttgattcagagtcagtgagaactgagaaaatgagaagctcgcagcatgcgtttccccgcatgagcagcatgcctgacacacatatacactgctcactgtctacaaaaacacatatacactatatagagtaactggtccttagctatccagggtttccttctagatagaaccaaaaccttggattcttgatgagcaaacctagatctttgttaaactttgcttgttcatatgctgataaaacaaagcaagagctactccagttacagctaaaagcaaatgaaaatttccgggttaatacttaatacacaagaacaagaactggaggtgataaacatataacataccagtgcaccacactcggatgagagacatattgtgcagatgctggttaaagggattgaagcctggtccgagatcaccaagcatcctgtgcctccatgaatgaacattttgcacaatgtggagaccttgaaccagacaacaatccccttaacctaacttcagcctggacatgccatgcactccaaaacaagaactcctatcaaaatcaaactgattcagagatgccaagatggagtccaccatggacagtggggaagaggaagaagaagaagaagacacgccaagagaggtagctactgatcgagccatcagtgcagtagagcgctggtgtttttgaagagggagaggagggcagttggcgcagctccttgggatgggccgcgcgagctgaattgccatttattgaggggctagcttaccaattaccattgggcacgagctgctctgatggctgctgcaaatgggacttttatgacctgtggtgtactggtacagcgtatgagagggaggaggacattgtatgttcataccttcagactcagtcatgtgtggagtgcagaggggggagctggtgatagcattacactcgagtcacaaatatgtggggtttttggccatcttcgtaattgtccctgtcacaaatactagatatggacctgtttggttggttggatgcctaggcaaaataggagaggagaggaggattatttggatggagcaacttagctagaaacgattgattcttttggaaattcagaaaattatagattgaatgtgccacatccaacccgaatcccttatattttggaacggaggattataaacataacaaatagcttagaaaaagtggttcaaattaatcattttattagaagcgtggcataaataatcttagtccaataatccatttggaacatggttatatgacaaacattttgattagtgccatacattcaccggttggcacaaaaactaagcccaatttgtatctgcatagttattccctccatcccaaaatataatcacttatcgagctttttcaaagattagggagagaggtgaaattaaattggaatggttgttggttgatactactaggaagtagtttgcaaaattaaatgagagatcattgccatttgctgagacgaggaagtaaatggagaagttgctatattcaagcatgcagtttaaatgctagaagttactatattttgatagggagtgagtacaaatttttgctaaacatgtgtatgtatgatttccgagccctaaaaatggcatactccctccgtttcaaaatgtttgacaccgtttactttttagtacgtgtttg

SEQ ID NO: 22711 - DNA, 7274 bp, Oryza sativa
agggttttttttttttttgtcacaccatggtgaatggggtggcactttgttgcacacgctgacaactcaccaacatatctactagctttttttttgttctaaatgtttaaattttaattttaccaaaatgcctcattttacaaaattgaatttgtccagagccagaggtacgcccatgtgagcagtcatttgtgtcctgctcagccaggctgtgaatggaccgagctggaggccctgccattatctttgacgtggttgaacctcattggttgcagcaattatggagtcatgatgcggtagtgattgagatggagaggaacaggaacgcagcaaaagctgatatctcgataaacgggagcatcacagctctccatgtactacgcattcaagactacagtacgggatggttggagtagttccgcatgggtctttctttttttttcccttcattttgtttaaaccgtctagagcaagtataatagtaagtacaatagtagagtattagccagctataaacatatttaaatgagataaaagatgagagagaagagtagcaggctacagatcggtagccagctgcagtacagactccaaaatgcaatatgtgtatgacatgtgagaccatatattaatagtatagtaagcaactatggtatgaattgtctattagattagctataaatgaattagagctagtagtgggctatactattaaacttgctcttatgtgatgatgcatgatgcacttgcagagttcaactaaagttgaacgagaaagaaaaatgctaatagcaacataaacataaaacagatggagaaaatagacaaaacaaaaattaagtttacattttatatggcgtatgaagcacaggaataaactgcctcaaaaacttagtacatgaatagacaaacaaagaagagtatggagaagatatccttacccctgcattccaaatgacagtataacatttatactacattcgttcctaattaagtactgcacttccataagtactgcacttccactattttaaaggcaaattaccggagcagaaaaataacttaaatgccatttattaaatgagcgatggttggaacggcggggatgattggtactaagatagaaagaaattaaaatgatgagtggttggattaaaaaaaattagaaatatagtactagtacacttgtgagtaaattgtaatagcggtatataaacttgtcagatgtgtgcaatctagtgcataaacttataaaatatttattttggtgcacgaacttatttggtgcatgcgatcaagaccaaaatcacttgacaaggataatcttgctgattttgttgttgatttgaatgctatgtaaacatgtgtctcagaaaaatatcacatagataaagatctgtttagcaatacatataattaggtatattgattgcataaagaaagttcggtcctgttcactttgatgtcatttttaaccttatcaaattttggtaaagttggcaaaaaaaaagtggctacatttagtttgctacaaaattttggtaactatatagaaaatcctgccaaaattttaataagttgccaaaattttcgcatttttgacattaccaaaattgggtaagattaaaaatagcatcaaagtgaacatgcacgaagtgtgagccgtacatggccgttgtatgctcggttgccccgttccaaaatacatgggccttttgggggtgaagtgtgaaccatgcatgggccgctgtgtgctcggcctgctccggcccatcatttactgggccggtttacccgcccacgtcgccacgagcggcgaaccaccaacccaaaatccggcgacttcgcagcagccggggggacgaggagaggagagagaacggggaggcgtctcaaaacgccaccgccgcgcgcgccctaaaaccccagcaaccaacctctcgtctccgccgcttcgccctcctccggccgcccgtgcaggcggtgcagcctcccctcccccgtctcctccctacctcggggggaaacggggccccgcggtggtgagtctctttcgatctctgctgttcaaatcgagcccctctcgagctggtagtatcccccccgcgccgccttcccgtgttccgggcggatttgcttgtgtgggttgtttcttttgctttttaggttcttgattagacttcttgatctgggaactgtgcacttgatgcttcgtggaggtgccgggagccgtatgtggggtagtctctcctcaaatttaggttttggaattcggttatgcccctgatggcaatggcacgcccaagttttaccacgtgacgttccctgtaccaaaattattataggtcgtgctctgttagtgcaaaggtaaagatttggaaaatttttggacatatattttttgacagaaaatgatcttgttgtgtgcaaacgtttgtaaactgttcataaaaacttacatgtcacgggttatgagttcaattgaatgaactatcttgttgatacacacccttccaatcaaagttaggattgatggactgatagacttaatatttcattgcttcttgtatctagatgctatatgcctgccagttggtatttagaaccttgattgctatgtttctgtatttctggcaatgttgatgatagtgcagatttttttagtgaagtcatggtattgcaaatctgcaattatgctgaagaattttctagaagttctggttgctggcaactttacatcaccatcagtgttttctgtgcatatatgggcctgtttattttgatgtcattttcaaccataccatttttttttggcaaagttgccaaaaaatgtctacgtttagtttgttgccaaatttggtcaatacataagaaatcctgctaaaatttattttggcaatattgccatcttgccaaaattttggaattgctaaaacttggtaaggtttattttggctacaaactgaacaggccctatgatttcggacataccgttatctcttgatgggagggtttgcccacatcttataattggtctggctgttgaaataccacttgttttgcagtaccaatgacaagcatcaaagctatccattttctttgccattaggatcatcataatttgttttttttaatctttgtggttgaaaaagaaaaccatgtatctctggcataaacagatcaattatctctgatattatgtccagttgtctgtttgatctgactgtttccatctggtgtccagtaggaattgtgctaaattaaatcaaaggttcaaagtttagcagtaacttttgttcccatagaatttgtcatcaccatatgatgaatttgtcaatgagtgaatattgaacgcatgatttatgtgatgggtcgattagctagaatcagactgcattgtttccaatgcacactgataaaactgtagcagcagttgacatcaagcatgtgatttgttatcttttgaccgtcgagcaggcttataatgtattcatttttagagataaggagagtgaacaaggaaattatctgaagtagagtcggctaatggatacaaatgtattgaccccctccggaccaacttcagatcaatatacagttagataagccccttttgtttttttaattctgtgatgtggacagtatgaaattatgtaattatcttttgacggactcaaaatcttatattctgaatgtatgcatcttgcagctattaccaagatgactaaaagtataaggggcaagaaatgttcatctcgtcagctcagatcacataatcggaggctcttcagccaatgcaatttcaagagagttgctaacaaggaattggcagcaacagagaaatgtgcgtggaaagattcaatctgtccagtttgcttggaatgcccacataatgctgtccttctactttgttcgtctcatgataaaggttgtcgtccatatatatgtgcaaccaattaccaccattcaaactgtcttgatcaactcatagattcgcggagaagctcaaaagattgtgaggacctagactccatagagcttacatgccccctttgccgtggtgaggttaagggatatacattggttgaacctgctcgggaacagttgaaccaaaacaagaggagctgtatgcaagatggttgctcatacatgggtagttatggagagctctgcaagcatgtaagaaagaagcatccttcagtgaagcctcattctgtggaccctgtacatacttacagatggaggcgacttttattccggagttcactgcaagatatgatctgtgcaacgagttcaccaatggtgcggagggttttgtatgttatgttgcagtttgaggagttgatggcatctgtttggcacgaaggtcctcatggagctatgcaaatcaatgaaatgaacttggctgatccatgatctcaacctcactgaaatgtgagaatatcttatgctgttctcgcaatggggtcagtgatttgagccatgctgatccatcatgtgtgacctgacacagaaagatatagcttttttagttttctgttcttgagggaatatttgtcaccatcttcagaagaaacagatcctatcctatgctgccatgaattcaagaaacctggtcaaattgtgggtggaatgtggaatggcgttgaaggcttttgttgatactatctcattgtagtcccccctttgtgtcgtgtgatgaattgatcctgtgcatcccttttgcactgtattgacattacattctattcggaaatgcagagttcacttgctcctgtatgttttattgttcctacctcctcagaaggtacccatatatgtttgttgtttatgtcgcgtgacagattggtgtatactgaagatgaaatttgcttaaaggcctcaccgccaagctacgcgtggcaaataattattcgggacagataattattgtactggtctctccgatcggtttgtcgagatggtttagattagcacgaagaatatgctttctgatctgaaatagttccatcagatggtcgctgtgcagttctacaggcagtcaagcaacacttgcacttcgaatttcgacgcaccagttcacgtaaatggcaaggcctttagagtttagaggaactttggaggaaatgaatcgtttcatacgaaaatcctgtaaaactcctgcgttccaagaggagacctaaacttcgttgatcctcccaacgttcggatcactatcagaatcgtcctgtcgctgtgcagtgtggcgccaatggcaattgcaagcttggagttataagtcaggactaacataacttccagtcaatatgatgaaagttcaggggatcaaaccgtaagacgagtgaaatgacggttcaactaatcaaaggagtgaaactaagctaaagaatatgagctcgagcaaaaacgcaaacactagtcatgcactcagacacgtcatgatctgaagaatatttagcgcaaacgaagttccgcgtgcaaagaagggattttaaaagaaacatacggttcaaaatcaattcagatattcactggtacgcacatgcaacaccaatgatatagccttgtagcattaaggatgatccagctaggttcatatatatcataatatcaatacctgcacaactgcataagcatgtcaacggctgccggccgcatgtcatactctcactggaaccaaatgggacaacttgacaatcatcagtccaggaaactattggtctggacaagtgacaaagtttacagcataaatatcaaaccaaggtttctctccaaggttaacttaaaaatgatagttaaactcagggaggtatatatgctcttcacacaaatcataagtttagatgatgatagagacatcacatttggtaaatcatatctccccctcaaaaccatgtctgaatcatggtagccctataatgtgttgataaagcatacaccaattttttgttatcaagtaaagatagaggatgtaattcaccgtccttctgatttgttgaggtacctctgaactgcttaatgcatatggcttcgcccattacttgaaaggaatttgtaatatctccactaataatatgtactccttttctactcgttgaagtttcaattgtactagaaaatcgctaccaagtcaaatagtggttttgccattaatgcaagtcaaaagctgaatgaagagacataacaaaaaggtacatgcatttagttgtaattaagaaaacaaaaacatactgtattatttaacttaatgccgtgttaacatctggtcttggttgcgaaacacgctactccaatttgctgatgtgattgagaaaccaaaagagaaggtaaacatattttaactgcgattaagaaaaaaacacacggtaacagatgacctttttgcaggtgtgaaccaaacatctgcttctgatacataacatcataattcagttagccgatttgattgaaaaggttaacacacagaaagattgaaaaaaaacactaacaaagatgcattggcgcacatttaaacaaacaacagaaatgttatagtatatagcacaaagttagcacctaagcatcataaaatacattggttcagaataacaaggagaacaccataacttgttctatccctaacttttgactgaggaatgtgcaaccttgtccataaaggtaagtaattaaccacagagattctatctagaaaagaaaaagacactaatttcccccttttaacaatgcactactcaccagatatcacccatggactcagtcagccatctccagggcatcaagcaccatactcagtgtgtccttcatcaggtccatccgacgcaactgctgtctcatctcagtcagcctgaacttccgcagcttttcctccatcacctgtgctttcgatccttcaagcaactcaaacgccttcttgaacactgctccagttggatgttggctggacagctcctcaactgtttcccacaggtaaggatatacatccttccctttctcaaactcactcctccctctcacaatggcattcacagcaccgatcccagtcccattgccatttgccatagtgactggcactgatctctgattcttgcggtgacggttatcccgcccactctccatatcatcatcgctctctctgccatattgctcctcttcgctctcaccagcatcagcattatcatacccacttcctcctccctcaccagcagtactcattgtcccccagaccttcttggcaagctcgtagatattgtggtcatgcggagtggcgaatactt

SEQ ID NO: 22712 - DNA, 803 bp, Oryza sativa
gttggctatactatttttcagtctgatcgccttcacaaagttctggagtatgtgaatgaagtgcattgtttgtgtggagtccttggaattgattttgggaagactgtaaatgggattcatcccagtttacatcagaatggtcttgagcaatccacaaacatcagcaacagcacactggaaggccttgctaatacaatatcaaatctaaaagcagaacagagatctagaatcgataaggtaatctcaaggctcttttcttcatggttttgtgctagttgttaattattcataacatattgtccaacgacaattccttatagatgagagagacaatggaatcattgtgtaaactctggaagttaatggactcccctcaagaagagagaagacaatttaacagagtacttagtgttctcatatcatcggaagaggaaatcttatcccccggggttctctcacaggaaacaattgaaaaggttttttaccagtttgccttgttctaatttctactttgtttacagctaaccttcatccttttaacagcttcatatttaaattatcatgcagatgggtgctgaggttgagaggttaacaaaacttaaagctagaagattgaaagaaattttcatgaagaaaaggtcagagttagaagagatatgcagatctgcacacatagaacctgatgccagtacagcccctgagcaaactaatgaaatgattgactctggtactatgctatgtatcttgctgctgctaagttcacttgttactattgtatataagttgtaattatcttgtgcatg

SEQ ID NO: 22713 - DNA, 5948 bp, Oryza sativa
caggaatatttaggatgcaaaaacttgtgcagaaatataccatcattgtcacacttccgttgcgtgaaaatgacgtggggattacgtcgcgggcagtatcgcgcggtgaaagcatgagaccgcacggtctcgcgcgacaacggcgcgagaccgtgcggtctcgcggaaagaaagagcgagaccgaacggtctcgcagaagcaattagcgacactgtcaaatgggatccatttgattagtaattaattacttaattaacaattaactaataataactagtgattaattatcatgattagtgattaactaattgttatttaatctctaatcaggataattaaccactaattaaatcggcaagacatggtatcgctctctgcttgagcgatagcgttggttgcttgttcggtatcgctgtttccttgagcgagaccgcgtggtctcgtgctggaaccacgcaagaccgcgcggtctcgcactttcactgcgcgataccggtcgcgacgtcatcttcatgtcattttcgcgcaatggtcgtgcgagaccgatggtatatttgtgcaaaagattttgcatcccgaatatttctaacaaaaaattgaatgaatagtatattttcaaatttaattctgctcccgtcactgcttggttatatggagggaaaaattggcgcgacacaatagacgagggaaaaaaaggcgccctttcggctgttgctctgagctagacgatgcagacgatgaaccaaggcgcagcgacgatgcagatgatgcactccgatagtgagtaagtttcaattggttgcctctcttctactgtatcccacttgaatgccttgttataattgatcaacctcttgttattaggtttcctttgatcaagctttcttcttttcacatggaagaaatatctaagtgaagatacatttaaatctctgctgtcaaaattgtgagatggaagaagaaaggtatgtcaaacaacttcatgcttatctttgcaatttttttcagtcatcttgtgtatgcgctttgcaaattcttttcactatgtgtgtacacaagtcatatacttgatgatgatgtttttctatatagagagaggctactgccatgtatggtcccccatgttggtatggaattcaaatgttcagatgaggctgggatgttttggcatagatatggaggtcaaaaaggctttgaggttagaaaaaggtacacaaagaaaatcagatggtgaagtaacatcatataggtttgtttgtggaaatgagggtcatcgaggaaatgacaaaagggatcatctaacaaagtgtcctcgagctgaaaccaaaactaattgtcaagttcgtatgagtgtagcaatggacaaaaagaagggaaactataaagtgtctgagttggttcttgaacacaatcaccccttgcacttgcatgaaaccttgcacttgatggcctcgtaaaggaaaatttcagatttacaagcttttgaaattgaaacagcaaacgattctggaattgggccaaagacggcatatgagttggctagtcgacaagttggtggatcacataatctaagctacaacattcgtgatcacaagaactatttgcggagcaagcgccaaagggagatggcatatggtcaagaaggtagaactatttgagaactcaaggatggatgcttgctttcgctataaattcctctcccacaaatttctcaacttggcacaacaagctgctagctatccagagtgcaccttgttagtaaacaatgcccttgacaaccttagcaagcaaattgaagagcaactcagtggatgtgctagtatctcggatccaagtataactcacacggaggttacgcccccaaacaatttgttgagtaatgcacacctaaagaaaaaggatcggaggttcgtgttagaagttcaaagcgaacaagaaattggcttgataaaaagcgtaggactaggaccagacaacaagggaaagggaaaaagggaaaaagttcgaaggtatgttatacaaaaagttccaacactatgttactattcagtactatgttttatggatcctctgatactcttttcttgaaaggaacaaaataatgggggagatgcggaccatgttggtgcaatggcacaaatggtagaggatagtgtttccagggaccaggagaagcttggagaatacagtttcttttaatttgcaggggcctattaatgatgatatttttactgaagtaccattttgggaataaagttgtgctgtggagaataacccaagtttagctgcacttagtacaagtctgatgaagttggggcaaaaatttcaggaaaaacttattttgtgtttactgttgattttattttggttagatcctggtgaaggattccaggtatgcaagaaagagtgccaagattaaggtagtatgcatgttctttttgccttttttcaccctttgggacaatctgtatacatgttaagcctcactctcacatgttcaattcagcaacaccagcacattctactgtcagcaacaacaactgtctcaaatatttggcttaattcaatttacaatcacaatccatatcaatttatattctcctctcagcttctcgagcagttgctgtaagcctccttcagaaggcagaggtgatgatattagcctcctctagaaaatgcagcagccagtgccttcctcctgtcgtggtgtggcccatgatagtgctctgctgaggatgtggccgaagagttcgacgagggcgccgcctccgccgccgtcgtcgtcgaggcacgccggtagcagggtgactctcgtgcaggggaggccgcgggcaagagatggggatgagggtggtgggctggtggtggagaggcttccctagatctatggtcgagctgaacccgcgccgagggaggcggcgagcttgcgagcagaagcgagcagccggcggccatggagcaaggcgagaaaggagaggaggaaggtcgcatcgtcggtctttgattgttgactgtgcttctgtgggccggattttgttgtcatgggccgtgtgagccagttcattttttcacactcactgattgccgtctgatgcagatcgtgcgctccatcttgctgctacttccctctgacgtaacttcgactacgtcagacgatccgaatccctttgcttgtgttggagttggtcattgttgtggttatactcgtctgctcacatttttacagtgttcaacgatgtggattatctttgttctttcctgataggtctatttttctcgaacgctttcctgataggtctaatatttttttttccaaaacaaggttgtaatcagctcttatatttaatcaggcttgtttcggaaaaaaaagattaggtcaatttggaaccaagatggctgcaaacctgcaaattacacatgaagggtgtgtttagttttttgtgtaaagtttttgaagtatacggacgtatatttgaagtattaaacgtagactaataacaaaataaattacagattccgtctataaactgcgagacgaatttattaagcctaattaatccgtcattagcaaatatttactgtagcatcacattgtcaaattatagcgtaattaggctcaaaagattcgtctcgcaatttatatggaaactgtgtaattggttttttccccacatttagctaaaaacatttgatgtgatatttttagttaaacttttttggatctaaacaaggccgaagtgaacatggcacaaaccctccaagtatatgtctggcacatatatagactcccaaatcatatctagcataaacttcagattgttttttaggcaaccacagaaattttcttggcttcaaacccaacccctaatttcacgctcaaatcatacatttacacacacaataaataaataaataaataaataaataaataacaagggaatagaatccagtggactgaaactcgtcactttcacgaacaagtctttagtggcaagataaaattgcatccagtgccagtgaagtcctcggaaacacattagactgagacctcttgatttctaaaattccaatggatcatgccagctgatgtgctccagtaaaaagcttgctggaaaagacaggaaatactgcaggctgctgctttcggcgagctgctttggataagaaaacgcattgctatcgttggcactgttacgactcggtctgtggttctgacttccgatcatatccacaaatccacaattactccagtttgttttgtcaacagacaacagcataaagcatagatttctatttgaaggaaaacacgttgaggcaaaatatctagattacgaagtagttttatttcccagagaaaagcatccctcctaaaagaccacaaacgatgtttttcttcaactaaaatgtactgtaataacaccaaaggagcattctgaaaattgtcccgcccaaattgtacagttgacacgagtgaagcattagtgttactcagatttacagtctggctaatcaactctaacatcatttccggaattatcagaatcacaactcgtcatttactggagagttgtcggccatcagctcctcaagggagaattcgtcctcttcaataacctcaccatctttgccgtcccatggttcagattggactatcgttggggtaccgtccaaaggaagattacccttcccaccgcgccctgcttccttcacaaactcactgcaggagaccggttttgttatcaaacatctggcaaatgaaccttaagcagcaattaattttctatgcacaaggaacttacgttatttcatcaagctggaaagcactacggagtggagcatatgcgccttttttcacgttgagagcaaccatcgctggatagccataaccaccaactccaacttgcttctcaagatcagcttgcttcccagcagctgtccagacaaaactgcaagacaatgctttttctagctcagaatggctttctcaagaaacggaagagatttcaaggcattaactaagtgaatggatttgtctgaggaaacttctcaacatagaactcagtcacatggcagatttgcatatataatatataaaatctccattatgtttagagcttatagtatacacgccttggcatataacattatcgaactaagtcatttaattcttttaaggtgtttcaaatatatgaaggttactatcaatctttttgtcaatcaatattcaatagcaaaaggaaattaatgtatcaatttaactgtggatttttttatctcaaaagacataacaagacaaggaatgataggtagaatggtataaagtccacaacaagtttagttgaatcttgcctgtatggactctttttaaatttctcagcaacagataatagcagctcaaggtacttgtttcttccttcggcctttgaatccaagatatctggaaggaaagatacaaagcaaatggcagcagaagcacatttctcttccatggcgtcctacagaagccaaaccacctcgtcaaaacatcaatcccagaccattgtctccacaaaaggataactttgttaatatcacgaaaacttactgggccagtcaactcagaaacttcaggtggagcagcattggcttccaactgctccaatgcaaaggactcgatagcagaggcaactctagccccctggtaagggaatgggctctccttatcggcaccaaataccaaaatagtaggaaagccttctaccttgtacttgctcatcaaagactgcaaaattcaagtcacacgttatgttacataagtggtacttgaaaactaggttgtatagtttgacaaatgttgtacagaacgcacatgaatgctttaaaaaggtcaaacattaactgtgttttataaatatactgatacactgcctgaattttctgcctaagttcatttaaactcactcggtaa

SEQ ID NO: 22714 - DNA, 21675 bp, Oryza sativa
  unsure (1)..(21675): unsure at all n locations
aaaagggcaagaaccttttcagcatcacaatccacatgacctagcttcacttggcccttcaagttctttgcagcctttttccattcaggtgccaatttcttgcagtgcccacaccttacaaaagaccagtacagttaatgagtcaaataatgtcttcattaacaggatttacttattatcttgaacaacataatcttaagggcaatgatctaaaatgtacacactacaatactaacatgtgactaaattgtatgaaattttgtgtttttcttcactttccttctctacttttggattcagagttaagttcagaaacaacagtaaagaataaatcagtcaacatgaaaaccataaatgcattaagccacataccatggtgcaaagaactcaacaatccaaagatccttgcttttggtgacaagtttatcgaagttttgagaatttaattctattgacgcacttggttcagttttctcacttgaaccacctgatttcttgccacctgaacctgctgatgtctttccattcaaccgatctctaagaagagccttgacctgtaggatacagattcattgtatttaaaagtggaaactcatatcgtgtgtcacaaggctgaaattttttacagagaaatacccaaaaaaaaaaggtaaaatggcaacccactgtaacacagcagcgacagacagtgtattttttaacgaaaatcatgggtgctaccagaagcaccagctgtgcaagagcaggtacataaagctccaccatggtaagaactgagaagcatcactgcatcacctcatatccagtatcccatataaaaagttgataagtttgaaaggtttagcatttgagggagatatatagcaaaatcaattagctacctaggacattagtatcagttgatatatgatatctgttgtttttcccccctagtaatacttcatgttaagataaaagttatttatgtcaacattcagctgacaattgcaatctgaataagtttggtctgtgaaaatccaggaagcacttaacatcttcagaaaaggatttgtagttgtatacactagtggagtggcagatagaacaggagcaataaaagtaaaaacaacatatcatttttatatatatcaaatagggcaagctgcaacaaacctgtgaaagagcaaattcaacaattggctttacatctcttgctccttgataatctactggaggctttccaggaacaaacaccttaatagttggaaatcctcttattccatattcctgcagaacaaaggcatcatgcatcaggaaaaacttgatagcatccagtcaaaatatttacaaatggcaatggtggaagacgttctaatgtgcagtttttattgatttagcctagacagaagactaatactcaccaaaacaaagatataacgtagctaaaaaatgcctcttggtcaataagcatgatactgtaaaattactgtaaaaaaaaatatatgtctaaatatgacagagactcaaaatcaccgcactgcaggtacaatggcaaaggtacataactatctttcactcttgcttgccttctctcaggatagatgcctttatttcatttgatgagtgactaaattttcagttagagaatctgggatacataacctaattttctgattcaccaataaacaatgttgcatcagatattgtaaagttgcacaacccattggcttccacggtttcgtccttcataaaagtatgcatttcccacatctaaagtcacatatacacttttattggcaataaactaaccaaggccgctctcaccttcggatcaaaagaaaaacagataaaaccctaattaacaccaattaaaatgcttaattcgttcaatataattcaaaatccaggttattttttttaaaaaaaagagaacagcatccaatcaccatgctgaaaaagtgaaaaaataaataaatttactgtatgaaatcaacaatgcaccacattccatcaatattaatcccagctacagcattttaatatgcattaattcggtattgtataactcatatccgatgttaatgccctcctttaaaaaataaaaacgacgcccctttttgatcagtacgtgtagacaccaaacattgatcttcccatatttcctccaccaaacaaatgtggcattgtactctctgatactgagagctacacaaaaaacccataacaggtgtaacttttttttttatggagtcgagtttgcacattgcatatacgcagttatgtcctagctcgatcaaattacgttgacgcaacaactgatgcagagatcagatcacaccaggaaaaggtagatcagccaatcccaatgaaccgagatgccaaacaggacgtttgctcacctgcgcgagctccttgtgcgcgtcggcgtcgagcgcggcgaccgtggcgacgcccttgaggacgcccgcggccttctcccaaatcggcgtcagctgctggcagtgcccgcaccacggcgcgaagaactccaccagcaccaccccattcgagttcagcacctgcacccccaaccgaaattcgaactcagcgagagcccccaagtaagggaagccgatccggagacggaagggaagagtgtgaggggggagtcgatcgagagaccttggatttgaagttgttggggttgaactggaggacgggagagccggcggagtagagggcggaaaccggcgaggccgcgacggcggcggcgacgaggaggagggcggcggcgaccgcggggcgcatggcggggtcgagaaggttctagaaggagtggagaggggaggaggtggaccttgcgatcggcgccggggtgcgactgcgattttaagttcgctcgcgaggaagacggacggacgcgtgtgcggaccaatggagagcctccacgtcggattcaccgccacgtcggagcagtttggctcgcttggcgtgaggggattggccagagagcgtggagtttgtggactcggagcaccgtgatacatcggatataactgggcccacacacgcttggaggtggtcccaaagttcagtgagcctaggctacactcagttgtttggaaacacgatgtggccattgtggccggtgtgatggaatgttcacgaatacaaattctcatacggccttgctagctcggaaagtccgttgactctccctcaactatactgagcctgattgtcatccctcaaccgtgaaagtgaaacagatgtatggtcttcctcatccatcaaaaccgacttattttacatgattttatcgacgggctgaacccacctatgagatatttgtaaagtataggaattgttggtaccaaggtatacgcgaaactgaagcaaaagagacagtagacatggatttttatacaagttcaagccccttaattgacatatctaaccctactcctgttgactgaaccagtgctgcctttatatatatcaatatcacatgagtacaatatttgagatgatctaatctattatctatcaacctaatgacgtggagctctcacatgtgatcgacggttagcgtagtctggttcctcgaatatgaactcgatgagattggagatagctctagctagatcccttttgtcggcctatgtggctccatattggcttttttaaggcttgcctttggtatattttggtttgtcttggattggctagatccgtcttggcttgtcttcgcctctctcgatggtcttgtatttataccctcggatgtccccttatttaagtagaactagagaactaacggggtcatcgtttaacttatttagggaataagctaaacggtgtgtttgcaaacaaaaataatttgttaataaaaactgttatatacgtgttcttagcgatctaaaagtaaaggctagaaaataaaccacgatttaaaaaaccccccaaagtgaactccaaatttaaggttaaaaattcaaattttggcttataagcatatgcacaagcgaaaagataaggttgtaagtgtagatataatccgagtggtccttatcgtgccgaagcgggactatgtttctcttttcttatccaaaacatctaatgtatatgaggcttgattgcttataaaacttagtatgtggtaggcttcactgagcttaacacaagaattattaggtatgatttatccataacattgacatatttgaacagtggttttgtcttacatggcgcctacatggcatgttgacctaacttcgaacaacgtgggacccacatgtcagtaaccaaacatcttcttttctactacacacaccctccttactctcgtccctattgcaacagtagaagtagctggcaacaaggtagtgcttgagctcccggaaggtggtagtcgagtgctctctctctcctatccggtcatagagctcgaggatagcgatgggcggagtagtagcaacaggctagcttggctccttggcggcacaacatcagctactgtcaacatctcctcttcgccattatcaatccgccacctctatctaggtactgcccaaggctctatgcctagatctaacatcgtcgtcgccgccaccgtcttctaggagagcttgagctcaagcttcgctaacgctgtctcctcctccctaagaagttgatagaagctggcgagcatgagctggaaaagctggcaaacctcctcattgagccattgtctctccttgcctcttccgccctaaggggaggcgatgaggcataggaggtaggcaagataggttcccgccgacacgagctcttccgctaagtcggcaacgaagaagggggggattggtgatgccgccattgccttgttgttgatgccaccaaagatgcaacaaggcatcagaaaaaaggggaggaaaaagagaaaacatcttacactaacacgtggagcccattgccttttttgttttttcccttgctaaatttgtcataatagtggagaaagctacaaatcacatctgacacatgcatacatgcaaggctgcgtctgtgtctgtagcatgcacgtagtgaggagaaaggctggcgcatgcatgcaagcaggagcaagcaagctagctgccaaaatggcatgacaaatcaatactttctctctcttttaatcaaactttaaacaaaattttcttctaaaatatgtgtccaatctataactagattataccattttattcatcgtaattaaatctttataacaagatctcacatgaatttattttgataaaaatatatatgtgttccagaaaaatcaaacttatgttgcaccatatacaaaaaaaaaaaaagtcacttgtggagatgttttaacccacttcataaaatgttccaaagagatgcaacatataaaagatactgactgcaacagtaaccattatcacatgaaacattatgtcctaactagtgaaacatttttatatttagcttgaaacatcaaattgtaattgttgaaacataaaaaagtatttactgaaacatataaaaataatgggaaacagggcaaatgcattagtaaaacatcaataaatacttgctggaatattacattaacaatgtgtgtaatatttaaaaagttaaagaaaagttatcggaatgtagtcatgtgatatcttgttataaagatttaattataacaaattcaatgatataattagtttgaaattcagaaaaatagtttaagagaaaaaatcatttaaactttgaaacatacttgcatgcacattccccttggcatatgagtacacctaacaaacttctttgtcatgcacttgcgcttttgctctcttagggcccatttgaattgcaggaatgagaaaacataggaataggaaaaacatatgatcttgataggaatacaaatataaaacaaaggattgcaaatcacaggaaaaacataggaatggtcgtttcattggactgcagaaaaaaatacaggaattaaaggagagataaagactcagaccccctttgatttgtaggaaaagtgtaggaaatttgaaggatttcaatcctatggaaaaaattcctatgaaagcttttgaaacaaaggattgaatcctattctatcattcaaaattcctatggaatgtttaatcatatagagattttgtaggaaagttagcaagaggtccaacctcttggaaaaaaaatcctttgagtctatctctctcattcgattcttgagtttttcctgtggttcaatcaaacaatcattcctgtgtttttcctgtatttttctatcctctgttttacacctgcattcctgtcagaatcctgcgtttttcctattcctccgttttttcattcctacgattcgaaggggccctcaaaggaaagtttccatgaggttctacctcatgttagaattcctctaaaacttgcatggcattaggcattccataggaattttataggatccattcctttgattcaaagaactgtataggaaaaattcctatgggaaagaaatcctctaaaattcctataaatttcctttgaatcaaagggggccttagattgagacgtccgatttttttatttttggccggacggccgatggtaagcattatcggagtttatttgcattggttttgattgttgggaggtgatatactgatatatttgcttgaaggtggttaactggactcggcacatagttgaaggaggcgatataaagttttcctgggctaggcgatgagtccgtcccggggcagcccagttacacggcccaattaaacttcgttcggtagctgtagttgtactgcagaacacacgcagcgtcagtgcgtcacacgaggaatttcagtttacagtgtcaccaagttgtcaaagtagtacgtaattttttgccaaaaaaaaatcaaggtaataatgcatccaaaccaagatacaggcaaggtcacgaggagactgcaggcagtgcttagtactagtagccaagaaataaacagggacttgctatgacacggatcgaaataagaatccgacacggtacaaactttcgagctcgtcgcgagtagtaatctattcatacctacacggctacacctggctagctgcatgctcttttattcagtacagtacgaaccactctgacgaatcctatgtaggagtatcacaaaacgacgacgaaaccacagttcatgcacacacacagtacacagaacagagcgagcgaggccggggttgctaagcgatggcgatgcggttggaggtctcggtttccatggacttgaacgcctcgaacctgggctccttggcctcgaacttgtggcgcacgtacagcttcatgtagtcctcgaacacgaacttggggtacgccacgacggcctcctcctccttcaccagcgccggcgcaggggagatcacggcgtcgctgccagggttgtagaacgacgcgatggacatcctgttgccgtcggtctgcgccaccacccggtggatcacgctcttgtacctgccgttggtgatcacctccagctggtcgccgaggttgacgacgatggagtggcgcatgggcggcacgtccacccactcgccgtccttgagcagctggaggccaccgacgcggtcgtcctggaagagcaggatgatgccgccggcgtcggtgtgggcgcggaggccctcgacgaggtcggggcgcgggcacggcgggtagctgctgaccttggtgccgaaggtgggtgcgcccgcggggccacggaaggccttggtgaggtagcccttctcgaggccgaggttctcgcagagcaggtccagtagccgctccgccagcgtctccagctccgccgcgaagcgcttcatgaggcgcctgtagtcgtcgtcgaggtcgggtatgtcggcgatgttggactccgggaggtggcggacgaagaaggtgctctcccagtccagcttctccgccttattcacgtcgtcgcagccttccttgagcgtcttgctcgcgaactcgaggaacctctgctcgcgcacacgcttgtagtggtccttggtcatcttctccacctcgtccatcagctccgtcgagatgccgtggttcaggatctgcacgatacgcaccgcaccaacaaaacgccagagttagttagagatgacatccattatccagcatcgaaatggaacttagtttgtctgttcaatgttcaatgtgtccattattatagattatggttttagtactatgttgctagtttgctacatataaccacctcgaagaatccccagttctcgcaagcatcatccagctgctccatcgccgcaggtcgctcctccccggcgagcaactccatgttgatgaccgggaacgtcgaagtcggtgccatttctagctctcaaagtccaggtatcacactctactcactaattaatcacaactatatctgactatagtatgctgttgtgaatgtgacgcgtccagtgctcagtgcaagtgtgatatgccgaacaccccgggcaggtgcaatttatagactcgcatggcaagctagctgctctgttccactctgctccactaggctgatctgtatctcagaacgatcgaatcgaagtcagggattagtgctcgctggctgttgcattgaccggacggagaccagcccatgtgggatacgcgtgttggctcgtggatcggcccagcatggaattatttggcccccaccaataataatctcccacatgtttcccgtaatcatttgggagagatagatagatatagatcatgttaataatcaccgttggtcccgtcccgactgatgagtcccgaccgaacagacatcccattctgccaggcagcagccagtcacgtcccgtagattaactattccgccgcgttcatcaggtgttgcgcgcgcgaaaacggcgaatccaccgcgccgccgtcccactctaacacctgttcaccgctcgatcgggcgattcggcgttgcccgcaccggcaaaaactacgtgggggctacgtacgcgcgccgcccggtgaatagcctcccgcgcgcgcccgtgagatcgccactggcgccacacgttgcaatgccgacgtacgccacgcagcggcggctcagatcagtgtcgccgtcccaccacgtgcgcgcggggcgccgtacgtctccggccccctcgacgcggagaattctatggcaaaggaatggaggaggaactagcggacgcagcccagcgcgcgcgcgcgagcggcgaaccacccaaccaatctcgggggggcggattgcctgctcccgttcgattcgacggatcgcatggtcccgcgtctcgatgatttgaggcccaagggggtaggagtacagcttttttgactcgtcatcagcttcgatgatccgtcacgcgccgcgcgccgcgcggtgcagatctggcgagcgagagataagaggaagaacattccgcttacttttctgtagtgacatgtagtaccgtcgtactggtagtgtagtacggctgttaaatgaacgcacgaacaaatgtcggttttacacaccaaataggagtagtatcagtgcttcttccatccatataacgagatatttaactatttataactcttaaaagattactggaccatatgtcatacatatataaggattcacatattatagacttaaaagtggcaaaaagttaaacgccccttatataataaatcgtttaaatatttttctagttaaaatattttaagtttaattaaatttatagcaaaagatagtaacattatcaacacaaaacaaacatattagcgtaatatattcaatactaaattaatgaaactaatatggtgttttagatattgctaagttttttataaatttgttcacacttaataaagtttaacttatagacaaatcaaaacaatttataatattgaacgaagggactagtagcaaatatgcatacttgtacgatgtactactacataggctaacaaaatggtagaggttgtagctcttacagtgatgtctgccgtgggggaaaaacaatggtcataggccgcgcacattgtgctggctttgatggacgatgatcctctcggagatggatcctaatcactccatggatatccaccagtttattatgttaactaaataactataaaaaaattgaaacaaatagattgttgtgcagtatattgtcagggttcctagttatgcacgatcgtgatcgaacctactattcggaatatcacaatcggatattgccatgggattgttgtgcacgatcgtggtcgaacccactattcggaatatcaagatcgcgcgagttctgatcgatggcggcagctcgattaaccttctcttcaccagcaccttggacgcgatggggatcccacgaagcgagttgacacccaccgatcaacccttccatggaatcactcctcagtcatcatccaaaccattgagcaaaattacgttgtttgtgactttcggccaaacaaataacttccgaacggagcagatcacctttgatgtcgctgaattcgatacaacatacaatgccatcattgggagaactgcactcgcgaagttcatggccgcatctcactacgcgtatcaagtgctcaagatgccgggaccgaagggaacaatcactattcaagggaatgctaagctggcagtgcaatgcgacaagcggagcctcgacatggtcgagcacatgcccagctaggggtgaaaacggtacgaaaacagacggaaacaacctttatcgttttcgttttcatatttttttcggaatcggaatcgaaatcggaaaccccggaaacgaaaacggaaacgaatattatcgaaaacgaaaacggagcgaaaacgaatcggcgcggatacggtaacgaaaatttatcggaatacagaaacccctcaaactgagcttcacagcaaaatatattcttctataacttcatataatttgcataacaaatattctaaaaaaattacagcaaaacactatggtacaaggtataaactattagtgctttcactccatcatcagtacatactacatagtcatcaatcatcacataacagcaacacatatcagtccatcaatattcagtacttagagcgtacacagtaacaaagagtgatagaggtggagccgtggaggttgaggaacacctgctgctgctgggctaatggctgctgaaaggcgaggcatcgtgcatcggtggtggtgaggctgtcggcggtgtggccagtggccggcgtcatcggtgtcgtccgcgtcggcggcgtcggcatcgtcgcctcgtcggtggtggtggtggctgcgaaaatggtgggggcgaggacggagcgagagagaggaagggcggcgagacggcgggggcgaggtcgcgaggagcccactagccgaggacggcagccaggcggccggcggtggcgtgctcgaccccctggaggctggatgcgccgcctctctcgatctgtctctctcctctctagcctctgtagggttagccagttagggacctagggacttgggttgggcgggaacttgaggaggaattatggactatttggatgggcttttttttacttcggaaattccgacaaactttccggaatttttccgaccgattccgagttccgacggaaactgctattatcatattcgattccgtttccgagaaatttcgaccggctgattccgttttcgaaaacaggtccggaatccggaaaaaatctgaaccgttttcacccctacgcccagcccacctaccacagctgagtcacccaagaaagtgagaaagacaaacaagacgccgaaactggactccgcaatcaagatcgttccactctctagtgccaaccccgacaagaccgtcaagatcggggcatcactaggcgagaaataggaactcgtgctcatcaccttcctccgtgacaatgttgacgtgttcgcttggcagccgtctgacatgccaggggtactcagggaggtgattgagcacaaactcatggtgcgacccgacgccaagccagtaaagcaaaaactgtggagatttgcaccaacaagccatacgagaagagctcgacaagcttctcaaagctggtttcatcagagaggtactccatccaaagtggctagccaacccagtcatggtgcggaaggccaacgggaaatggagaatgtgtgtcgatttcaccgacctcaacaaggtgtgtcccaaggatcacttccctcttcttcgaatagaccaaccggtggactcaacagccggttgtgagttgttgagcttcctcgacgcttactccggctaccaccaaatcagcatggcgaaagaggacgaggagaagacaacattcatcacgcctttcggggtattatgctacgttaagatgccgttcggactaataaccgcaggaaacactttccagcgcacggttcagggcgcacttagcgaccaactcggaaacaatgtcgaggcctacgtcgatgacattgttgtcaagaccaagacaagcgactcattgattgacgatcgacgggaaacgtttgacaacctctgacgatatcgccttatgctcaatccagagaagtgcacgttcggggtaccatcgggcaagctgctcggtttcctcgtctctggcagaggaatagaagaaaatcccgagaagatcaaggcaatcgagaacataaagttgcctacaagactcaaggaagtacagaagctaaccggatgcatggctgcactaagcaggttcgtcgctaggatgggagagcgaggacaacctttcttcgctctactgaagaagcaagacaaatttgtatggacacaggaagccgaagaggcatttattgcactcaagcgctacctatcaaatccccctgtacttgttgccccctaacctaatgaagaattatttctctatatcgccgccacgccatattccgttagcactgtcattgttgtcgagagagagaaggtgcaacaactagtctactacgtcagcgaagctctccacgacgcaaagacaagatatccacatatccaaaaactactctacgcggtaatcatgacatcaagaaagctacgccactacttccaagcccacagggtcacagttgtatcctccttccccctcggtgaagtcgtgagaaacaaagacgttgttggccgcattgcaaaatgggtagtcgagctaagccaatttgatgtccactttgtgccacgaacagccatcaagtcccaggtactcgtcgacttcgtagccgattggaccatgcctgataacaggtcagacaaccaaatcgacaacgaaacgtggacaatggcattcgacggcgcactcaacagccaaggagcaggggcaggattcatcttgacatcaccttcgggagatcaattcaagcatgcaattcacctcaacttcggggcgaacaataacacagccgagtacgaaggactactcgccaagataagagctgtagctgcactcggagttaggcgactggtcgtgaaaggggattccgaactagtcgcgaaccaggtgcataaagattacaagtgctctagccccgagttatccaagtatctcgcagaagtcaggaagctggaaaaaaggttcgatgggatcgaggtccgacatgtataccgcaaggacaacatcgagccggatgatctagcacggcgtgcgtccagacgagagccactcgaacctggcacctttctggacgtcctgacaaggccatcagtgagagaggtaagcggcgaagatagcccagtcgtcctcaacaacagctcgggggctacagaggcaaaatgcgccgttgccgatatcgaaaccaaagacgactggcgcaccccactcattaaattcataggtagcgaagagttgcccgaggacgatgcagaagctgagaaaataacccgtaaagcaaaaatctactgtatgatcggcaacgatctatacaagaaggcgccaaacggggtactcctaaaatgcgtctcgtccgacgacggcagacatcttctcctcgacatacatgaagggatctgtgggtcacacgctgccggtcggacattactcggaaaaactttttgacaagggtttttctggccaaccaccctcaaagatgcctgcgacatggttcagcggtgtgaagcctgtcaattccacagtaaacacacaaagctaccagcgcaagcactccagactatccctcttacttggccgttctcgtgctgggggctagacatactcgggccattcccacgaggacagggcggctacaggttcctattcgtggcgatcgacaaattcactaagtggattgaagcgacacccacgggggaaatcaaggccgacaacgccatcaaattcatcaaagggatattttgcagattcggattgcctcaccgtatcataacggacaacggctcccagttcattagtgccgattttcaggattactacatcaggctgggagtcaagatctgctttgcctcggtttctcacccttagagcaatggacaggtcgagagggcaaacggcatagtactacaaggaatcaagaccagcatctacgacaggctcatgtcacacgacaagaagtgggtcgaggaacttccatcagtactatgggccgtgcgtaccacaccgacaacgtccaacaaggagacacccttcttcctcgtatacggctcagaggccatgctccccaccgagctacgacatcaaagtacacgagtacagaagtattccgatgaggatcaggaggagctgcgatacgacgatgtgaatctacctgaggaacatcgcgaacgagttgccgttcgagcagccagctaccaacaggcccttcgccgttaccacgagaagcgcatccgagcacgcacgctttcgatcggcgactacgtcctctgacgggttcaaagccaagcagggcgaaacaagctctcacccaaatgggaaggaccgtacacgatcacacaagttctgcggccaggcgcattcaaaattgcagacggcgatagtcgcgagttggcaaattcctggaacattgatcaattacgtaaattctatgtataagtcaatagtatccatacttgtaagacatcttacagcttcaataaagcctatttttcaggtacagattacaatcaaagtgttccttcccgatgatcccttacctagatgacacctagcattgaaacttatcctcatgtccctttacgccgtcttgacaaggcctctgaggaacctaagggaacttcggttggggacgcccagagccgataaggccttgtcggatcctgtagagacgaaagaccatgtaagatctggtcgtgtaagagttttcgccgtgtgtattaaccaagccgtgtaatccgaaattaactttccaacttcacggctgggggctaggatcagttcttgttcaaccgaggtaggtcaaaggtccaagagccttatcttccaagaagaattctccgatgacaaggttgggggctagggagagtatataactcaaacgactgatcgaagttgcgaagtaagaagacactcttacacactatgtccagagtaagaaagcttagttagatagatttcttttttattttacaagtacttcttacaattccgtaaaaatccaaaattatattacacttttccctaagacatttgtcacaggacacgaagactaccaggaaggccaacgccagtccatggactggaagaccttctccgccagcagcgccatcgacttcgccaggccatctatctccgtaggagttctccgagaacgagaaaacccttcatggaggaactcgaggtgcagctgcggacaatgatatcgtatgcaagccaatacatgcccccggcatatcggctcgatcgacggcactcctgcttcagggcctcgtcgatacgctggccgatgccttcgagctgggcgcaaaccccatttagccacgagatgtatccggccgccgattcctcaggatccccacggggtactcggagctctctacagacccttgtcatggatgtgcaacaactcttcagatacgagctgaaccacacctcgcgacctcggagtgtttccacggcctgatccttcttcacttccagcataatcctctcgagttccgcgacctcaaatttcgtcctccaatactggatgcggcgatcttggtcagcaagcgcactcttgaggtctgctcagcatgtaaatgactaaggcaaactgctcttctctcccaagaacacaacaaagcaagtcgatccagacggaagagtaaaggagatgaaaaaaaaaaccaacctaaggaagtcgtcgccatgcccgtttccacaggcatattttgatctacatcgccctgcggcacatatggcttgaacgcaagtgccggaacgatcactggcaactcaggctgcccacgctgctggacatcctcgacatcaacatctctacaaatgacaacaaagtactcgagatcaacatgctaaagaaaactaaggtgatgactgcacacacaaaggcggttggaaccaatgagagttttacaaatcatgactaaagatcctactcttcaaaaagcgggagaacggactcccccagatcgccgacttcctccatcatgtccttgcgcgcgtcgctagccgccccctgatccaagatcttccgcaaatagagttcagggtgtgccagcctcatacacgcgaggacatggcatgccccggtatagatcaagttggacgtctcctctccgatcctggccgcgtgcttggagggggatcgcctccatcgctgtcgccagttctgcaagcgaagacgtcagcgagaactcgtcgggattcgccgggatggtagttttgacgccacactccccggcgagctggtgcagaccagtataggtgacccgcaacgagccacgggtttccgacaagttgttctcaagctccgacatacgatgctcgagttcttgtcgttgtcgctcattgccggccaccagctccgtcatcttctggaggtcctcgcgaacctccgcaaaatcacgcgtcagccggtcggcacgctcattcaccgacgacgccgccgccgccctcgcctccgcgatctcgcggctaatgccgcgagcaccagcctcaaggaggagccccatctcgacctggagctcctcctaggtgaggacgacagccggcgagccccgaccagccgcaagatcgctggctgggccactaggcgtcgcctcgcggctcctgggcacgaccacgacatctgtcgaggccacagcaggagacgcgctggaggtccctccagatctgtcttgcgccgccttcgcccacgccgccttgtggaaggctgcagttgagacaggctgcaagagtttgacgaagtgacaaaacctcaaattcatccacttacttctcgccaagcgtcacaagccactgccgtcacggaggcggaggagacgcatccgaggcctggagtataacgggtatgatgtgaggtggaagttttccgactacgcgataaaggaccaggaaagcttaccgagggagtgggcgccttccgacgatttctgatcacggaggagaatttcctcccccttttcgaaacgttgccgccacttgttgtggcagcagcggcagcaacatcggacgcctccttggcgacgtcctccttcagcgacgccgccgcctgataatccacgagcagcccgatgatatcagtcagagggagagcctacgctttatgaagtcacaatgcgatctcggaagaaaagtgcaaaagggctgctgagtacacttacattgatggcagcttcgcgttcagctgcccccttctcacaaagggggacggggactttgctcgccgttgtcgcgccgctgatcatcaattggccgacacggcgctccatggtttcgctgttcaaacctgcagattgagaaccagaattcgataagtcaggaggaacacgcacataaggaagtcaatttaaatacaagaaaaataccccgagaagaaacccgggtcgcgtcctccggcccaaaatagtcaaaggatgggtgggctcgagcccggagcggctggatccgcctaccaatgaagtcggcagcgacttcataccctgacaaacctcgtattcggaggtcatcgatggcatcgatgaagggctgaagagaaggggttaaggcgggttttgcggtccaagacgaaatcttgtctggttgttcctcaggaacaacgaagactggatccgaattttctatctgaagatagaaccacctcgcccgccatttgctacgagaggaagggcactggaaagggatatagcacgacttcaggccatcccggagtcggaaaccgacgcatccggataccctgtttgattccatctaacgcaactcgtagtagaaacgaaagaggtcaagaaacagctctaccccaatgtaggtctcacaaagatgcgaaaaaatactgagaaggccatggaattggggttcaaatggagcaaagaaaggccgtagaaattcaagaccaagagaagaaattcagaaggcggaggaagaaaaccacagagaatatagtcctcgatcgcaaccatgcgacccaggacaggctggggttcaatacctcctgcttctctctccatggtcccgcgaccgggaagggcgccatcctcctgtagtttcttcagcgacgcgctggtggaggtagacttgtcgaggtccattgcgggagcagagaagacgaggaacgcttggaggctggagagttttttcacaacaggcggacttcaaaatggatccccaaaactcacttaaatagtcgcacttccgacggtgcgaattccaaggaaaggaaagagatggccgccggaaatttatgggtccgttacgcacggcagtttttcagacttcaatttaaattcactcatgaccgttgagcttcacttggcgttgtcgattactccttatctcttggtcctcacacctagaacgacaacaacctcgacatcagaagtcacgatcagttacatgagttcatttaagcagaagtcgggggctactgtcagggttacgggtaaggtataccctctaccttcgatatacgtcacatatcgatatggtatacttgcgcgtatacggacgttttcggcgtacgttaaggaaattcatcatggagttcacagatggaaggagtcctactcggacagaactgggtcgtcattgtatcgtgccgggtccgatgtctccgagtcctacttggagaccagttgacctgcggtataaaagggacccccgggaggatctaaggcatcgaatctcatagccaacacatccacgacagcctacggagttgaagcccacaggagccaagtcgccgggagatctaatcgaacctgttcgattacgacctcgtcggtatcatcgagttccgcttttccctttgtaatatgtggtttccatcatataattccatatcaactggattagggctattacctatcaaggggcctgaaccagtataatctttgttttctgcctgcttgatgtcgtattacgtagatcctcgtaccagcgtacaccaataccctctatatccggtctacggatatccccgtcgacatatatcacttcacaaacatataaatttaaattcaacttctataagttataataaaaatatcaaatttaactgtaaatatatgtgtactaattagagtttgatttgttatttttgttgtaattgatagaagtcgaatttgaacttacatgtttatgtttatagagtggcatatcacattattcacatgtgaatttatcttgtcaatttttttaaaaaaataaaaataatttagttaacatacaacaaatgaacggatgttcatataactaattaaaagtgtttccctgatcctttgatgttagaaggtcagagttgtcctgtgctcgcgtggttgttttgtggcaactcagaaaattgaatttgtatgaactatgtacatgtgcctttgattgctgcaaaggaaaatgttttgcctttaaatttgtttctcctttgtttttctaaaaaaagtaaactggtaatcggaaaccagctagtagctgtttttttgggtgctatgcagagtaaagagaccagaacaactcagcactcgtagactcgtagtcacctgtcacgatcctcttaactggaggcatgcatggatctggccggtttcctgcactccaatctacatccatggttgttaatcaggtttgcaaatcaatgtctttccattgcccttattccggatctccgggagatgtttttgtactaatgaagtagtgatgattgatggcggcctgtataacctatcgctacgcccacactcacaaatcttcatactccataccaaactattgtactccacgtcgattttcaattttaaaaaatactttcttctacaaagagaagatcattttgatataacacaaaatannnnnnnnnnnnnnnnnnnnnnnnngatgcttggcaagaaaaaagagtaagagagagggagagaaagaaccggaagaggcatttttgtttgttgccccttgccaatttttttgctaacttgagcagtacattactagaaacgatcttttatcttaggccctctttgtttaggcttataagccaacttataagtcaaaaagtctaagccaaaacaaacaagcaacttttttatttggcttttttgaagccataagccactctaacactattaagccaaaagctaggttggagaagcttttttggcttatatgagatagatgtatgactccaccactaaacttaggacattaaatccactggcttataaatcatataagccaataaactgacttaaaagttaggccaataagcctaagcctaaacaaagagggtcttagtcccctaaacataaatatctcggttagattaaaaataggtactaaagatgcattactaccggttctaaaaattcaagcccctataagatagtaccggttgataacactaaccgagactaaagctaaaagatctttagtgcgggttagtatttttaataccggttggtaccaccaactcggactagctaaagctatttttaagtaccggttaatattaccaaccggtactaaagatgcctcagggttagcttaaaaggaaaatatatttattcaagttagatgtgtgtagtaggcgggatggtaacgtgtgtgagggttgagatgagagatcttgagtttgaatcctatatcccacatgttatttttgatttagtacgcatctttattaccggttctttcaatcggtactaaagatcgtgttacaatcgataataaaagaggttgttaaccggtagtaaaaatgagttctccgatcgtgatagttgttttgattggatacaactttttatcaaatctatgtagttgagacaatctaatataaaatattggtagtattaaactgtctaatatattttatcctatcaaaattttagtaaggcttcaaataaaaatggcttcaaactatgttgtccataggaagaaacttctctgacataggtcgctgacatgtggaccataagttatgtgatttacatatcagctactttaaagttagagagcagtaaattagatgatccattttggttgttcacgtgattacattgtatcaaattcagtgtaactatattcagag

SEQ ID NO: 22715 - DNA, 2654 bp, Oryza sativa
taggggtgaaaacggtaacggtaattaccggccgaccggcgttcgttttcgactttctaccggccgagccatatggaaatggtaatcgaccgaaacaaaaatggaaatggtaaaaaatatggaaatgaaaacggaaatggttttgctgttatacctatcatttccgtatttaccgtattcttgcggaaattaccgtttcttataatatggtaattaccgtattctaaatatgtcgatattataggacatgtctatacttgacccacagcttatagattgaatgactcttcaataaatctctaacttttgtacatggctaaaatgaagttaatttataatttatatagtataagcttgaatttatgtatatatataacatacttatgtaaagttaaatatatgtttttatagtttaatgtttccgtatttgttaccggtttccgatctgtaccgacatgtttccgtccgtattgttccgtttccggttttccgatatttccgatatcgttttcgtttccgactttaccttttccgagaaaaatatggttacggaaatggttgaggctgttttccgatcgtttccgaccgttttcatccctaatcaagacgtctagtccaagaacaaatgctggaatatctctgctgtaaaacaatattgatggagggagactcacaagtggctagctgaacagtaccataaccattttcagtcagatgactgatgacatcaccgaccgtgctttcacaagacactttcttcaggttaataagtggcaatccattcgtctagctcctcccttttgacacggtcacacttaatggtgctacgtacctatgtgatgtacttataacatgtccactggagtccagggtcctacaaatttggtctacaaccgacatggccagacatgattggacccaatccagacattgatgttgcatcattaggactactttgataggcaattaggcatgttggtacatgttcagacgcctccaaaatcctcagtttgatggtacaactcgacgcctgaagttatccgagactatcaattgattaagacattgtttgtggagctcgagattataatatgcagctagtgattactaagtcatctacttcttctatcctaaaatataataatatagtgctgaatatgttcagattcatagtacagaatgcatctcaaccgatatgactaggttcttatattttgacatgaagggagtaatgaaaatctaaaaaggttgggtttcatagtttctaactgttaatttattttctagattttataaatatagagtctaacaaattagatgagaatttaaattgcatagcggagatgtaaattttagaagaagttgtagccactaaaaaaactcttttaaacagatgctaagacatggttagaggatccaactccccatgggccacagggtatcaaaatcatgctaagacatggttagaagtcctccatgctctaaaaaaaaaagaaaagattggattaatccttctgagaggtttttttaaagatacttcattagaccttttacaatatagcaatataatattttctgtgtggcggtagaatcatgaatgtataactccatgcatctaccagggtgctgtacatcaatggctgatactaaaaaagtagcctcttgtaggctgtagcttgcaacaccctacttggatgctgcagtgtgaagtgttctatagatagagcaattacgcttttgaccctactttaaaacttaacagagtttgcttgtttgatcttttttttcgaaacgaagaagaggcctgaccctattccatgaagacaacgtgacggtgttaactcaagacaaaaatttcatttatacccttgtgaatttaacccaattagtgaatattaaattgcaaaaaatatacatggtacaaatttgtgtccaccaaaaacaaaaaacaaaaaaaaaacatgtcaaacaatagcactttcaacacaagcagaaatatcccattgtgctgtcgctggtgcgctcatcgcctacaaccacgaccaacggctcgccgcctccatccaccacgccgatggtcggatctacagcatcgcgggaccacctccgccccctctctactccaccgccgcaaagggagaagaaggacgccgcccctttcttgcgccgcgagcagcgggcgagtgctttgcgtcgagccgtcaaggtcttctctccacggcctccttctcaccgcgtcgctggtcatgcccctccctctgcgtcgggcgacggcgagctcccgcggcgccgagctcctgcgctgcgtcccgcccggcggcgagctgcgccaccctcctcgacttgcgccgccaagctcctgctccccgtgcccccctccgcgcccagcggcggtgagcagccgccgccagcactcctctctccgcgcctagtggcgcgagcagccgccgccagcgctcctccctccgcgccgcagctacggcgagcagccgccgccacagatcctcccactgcagcagcagtgagcagccgccgccacaaatcctccttccccggtgcgccggcggcaccgccgccgctccccgcgccaccgccgccgccgctccattcccctgcgcgccacctgagagagatgagtgagtggatgaggttga

SEQ ID NO: 22716 - DNA, 8824 bp, Oryza sativa
agcgcagtgaaaatagggccaaacggtaactttatttttgaaaagcagggtcaaataaacaaactagaaaaagtaaggttaatttggtagttaggctctgaaatagggttaaatgagcaattgtccctatatagattatcagtccatcctaaagaccatattctgtgataggcatcgttcttttcctatgtcttctcttgctaatgtatttagcgactacggaagcgtgggagatttgcttgatgatcaaagtgtagtcagtgtcaaccagtcaccaaattacttcctttaattaaagacaggtttgcaactaaactagcaacctatactgttaccggaaagcgctgtatgccctaaaaggcgaagtatcggaaaagaatgctggaagtagcatcataaaagagacaaactccaaatggagtacaagatggtagcctggtaggtaattgccgcttcaattataaatgtaaggttccctctgcttttttacatcatgagctcccattttgctcttgactgtgacaacgagctagaagtaacaagatgagagccagacgtaatcagcacatcaaagcaagttgccgacatatccacaaggtttcgctatcttgtctccctagccaatgcatcattccagcaagccttatcatataagcttaatgtttctctcaatatataccttttgctggcctttcccattagtgcaaaagatgaagctggtatatcaatagaaacctaaaaaaatatacgagagactgagctagagtacaaactcttgagttaataaccggagtccaccactagacttgaaaagagctactccctccatcgatgggatatcccacaatatataatctaagggtgagtttgagaagagggagattaataatattgggaagatacacaaaacgaggtgagccattagcgtatgattaattgagtattaactattttaaattttaaaaatggattaatatgattttttaaagcaactttcctataaaaattttttgcaaaaaatataccgtttagtagtttgggaagcgtgcgcgcggaatacaatgttcttttctcacccaatcccccagaactcatcacaaagaacgcagcctaaaactagctagatgaaacatcaccctgatcatacctcctgtctacatatgtactccatcttacactaggtaatgttccatctaaccttaggtttttatattttggaacggtgatgacggtgatagaaaatatagacacatctagtttttttcttgcatgcaacctgctatagattcttaccacactatttttactctcagtttggccagccgggagatttgtcgatccgtcgtctacggatttataagagcaaagtcaatattaaattttgttaattcgattagattaggcagtggcaatcgccaaatggtgaacgattttgttatatcttactcgaaagatttttttcttatctctcacttgattttctcattcaaatttacagtgtattttattgtaagttacaatgtaatttttgaatcttcgcatataagttttgaaatttatattggatttggtttttttcttgaagatatggtaattagtgtccattatggtgtttcttagttgctttttatcttttactgtgtctatttgtgtctattggattttaatccaaaaattaaaaatctttgtgatatgatcataaaaatctttcgaaaaatgcatttatactcccagtggatgactagttgttcgtttgatgaatcaacaaaaagttatataaagggaaatattttaagctcttgagagtatgcacctttgttatgtgacaaatgattacacaaatttctaaaataatacacaatgtagattattgtatcctatatccctccacaaacatatactcattctatccaaaaatctaagcgctcattctatcaaaaaatctaagcagtatttcctttgtcaccgagaccaaagaggaattaactcatgcaaggaggaattaactcatacaccacgtgaaaaaaattaataaactatatgtatgcatgcaactaatgagtattaaaatggctccttaagttctagacaataatttaatttagcacataaaaactataaatatgccatagacttcataaaaataagaaaatgaaaaacgacttagtcttttggatcgtgagagtatatcacttcttttttttttcactaaacacaatacaaacaaatacaaacatttatgctcgtataagtgtatctacatatacaatataaagatacatttgcacaccatatacttatgataatccccaagagactaggccgacacaggccttgtttggaagattagcccagggctaattttaagagctaatgttggcccctttgaattggaggaaaaacataggaattttagaggatttcaattttatagaaaaatttcctatgaagccctttgaaacaaaggattgaatcctatccaatcctttgaaatttctatggaatggacaatcctatagagattttggagaaaatttagcaagagtttcaacctcttggtaactttcctttgagtctatctctctcatcctattcctgcatttttcctgcggttcaatcaaacagtcattcttgtgtttttcctacgttttgcaatcctctattttccacttacattcctatcaaaatcctacgtttttcctattcctacgttttttcaaccctgcgattcaaaggggcccttagtcatgaattggtaggctaaacattagcctaaagtggtatgtttggatccatgagctaattcaagactaaaaggtggagagagagtaaaaagagaggagagagagggagagatagagctgctttttatggtccccacacaaaattagccccattagagcaggttcaatagtgctattaagctggctacaaaacttacaaatcagcttaatctgtgattaatgaaagaaaatcacaggaaaaggaacaagcagcgcttgttttagcgccggcgcttgctcagcgcctgaaactgtagcgctcgcatgcagcaaaaagacgataaaaaatacatttatgtgggtcccacatggaaccatgtaactatttaatgtatatgtatgctttaaccaatgcagcttatagctaacttatagttagtttgttatatgagttgtctccttaagttagctctattttaacatgataaaattttgaagcttgctgctagctatactattgaccttgctcttagcactccttgaaggggctaatgttttgaggggggctaattcactttagcctcaaattagcccacctgtttggatacttgagagctaattcagggctaaatgatgggggctaataattagcccatggaaccaaacatggccatatattaagattgaccaaagtcaaaacacacgctttattattgatggatgtgccacatattaaaaatataattagccgtaaatgcaagcacatgtgttgaatcgaacctaggtgagtaggtcccattcaaccacaagaacctaacaactgtgatgtgctatgctaagttcacatttgtagttgaattgatgtttttctatttttatgtatatatcaatttggccttgtacatttgtaaagaaatttgtgatagtcttttttttttacgaactagcaatcacagtgtaccaatttcgttaaatataacaaaacaaaaataaattgtacaagtatgaaaagaaccgtaaaaaaacaaagccctgagagctgttcgctcctactaggtcaagtttagtcttctctttgattttcgtagttagagctatcacgaagttctttatgttaaaacgctatatttctattttttcacaacttgttgaaccacatgcaacaaatgtataaaatccacttcctgtatatataggagtatgatataaagttgtaaaatgactttctcacctgctttacaactcctgacttcgtcccgtgcataaaatccctgcagaaatgcagcattagaatttgatcggctaactacacgcctttaccctcaagcatgcacccccatgctttcacctaacccatcctcatccaaccaacaagttcctcaagatggagacgcacaagagtagtactgctacaagcaccatatggacatggaatcgaatcgtttatatgtccccagcagccagcctgcttgctttttcccgcaagttgggacttggaaagttggaagtagcatattcacttctccgccacgtcgaatgcgaggttcctgtagtgcggctgtgcgggcgagacgacggatggcgccgcgcgcgcgcgtcccaactacagattgcgatggctggatggctaagctggacggccgcgcgcgcaccgcaccgcaccgcacgagccgtccaatcctaccctgcctgccgcgacggcgaatgacgggcgcgccatatggcgtgccatcccggactcaggcacaaagacaccgcgtctccatcatcggcgccctcgcccgcggacggcgcgcgcacgccgctctccgcaccgcacacagcggcgcacgacgacgcggctttcgtataatcccggacaggtacagggagagggacgtgatcggaagggattaaattaacatggtgggggacctgcgtgcacagctgcactgccgcgggaggattcgattcattccacacttccatagttgcatgcaccgcggatgacatgagccagtgcgtacgcatattgccacatgggaagcgagcagcgggcccagtccagtctgccacaacggatgctatattaactcgattgatcgaatcgatgtccatactggtacggccttcttaccaaaataatactcccttcctcctaaattatggaagaccccatttttttcaaaaaataaaaaataaaaccaggtaacttttgactaattttttttagaaacacagtacaaacgcaggcgctcacaacatgcgcacactgtcgaaacaagatttcggcaataataaaaggggtggctatcgagctaggaaagtggatgggtttggagacaaggaattttatacacgttcaggccttcttattcaagaagtaataccctactcctgtccggggatgattccgccgagtgtgttattgattgtatgattgggaaaaaaaagaatcgtgccccaagaggcacacggaccctccttatataggggaaggaatccgtaatatccatatcctaacggaatatgggattacagataaaatacaatcgtaaccgactaggatcccaggtactttcttgatatacaagtttagaatctaacccgagtcctcataaagatattctatctatatttggtactgtatatccagctggaatataactgccatgtagatatggggtaaccataatctccacagtagcccccgagaccttcgcagtcgaccaaaacagtcttctcgaaacaaaaaataataatccgagtgcttcaattcaacttgctccggcttgccgagtgctaaaagactgtgaagggcgaaaataaaacatggtgtatcgagtagatgcacctaattaagtgtagcccccgactatgtgattagttgaaaaactaaacatatagtcaagaaccgagtggttttacagcgaagcacgcatggtacttagtaagatacccagccgactacttctcaacttgaacatatcaaggacagaaaatacaagaagggctgagtgatgaacactcaaaaggtccaaaaatagacatatttgataggaatccgagtaagaaactcttaaaatgattcaccaaacatgataaaaaatcatggtaattaatgagtctaatagcctaggctgtgacccttaccataactaaaataagcatataacatgctaaaagaatgactatgaataaaccagtcatctcaaatcaacccaaacagcttttgcagcctaataaagcttacaaaaacggtataacacctttctgtcagacaccttttgtttgcatcgtgttaattctaaagaattagcaagccgcattaaaaatgatttaatcagcattgggccacaacattgtgagcacaaattgccaaagcaaaaagtgcctaagtccctaaggatcacaacgggccacgctggaaataaaattgggctgaagtactgtacaggcccaggcccattagcactcccgatactctaacaaaacaccgaagtctaagcgacgcttcgtcttccccgccgagactctcgccatttccccattcctcgctacagtacaagactgcgccgacggagctagggttcaccaatccgccccaatccattctcaaaaatcccacgaaacttctccgcgcgtccaccgcaccgattcccccatctctttccagccttatctcgaaccaaatcaaaccatcagttcacattcatggcggaagaaagagaaagcttcgagagtcagtgggcgccctccgatgtgacggaagataatctgaaggagatggtggcgcacggcgttcttccagcgaaggagatcattgggtggcgaccggtattcggcgaagcattcccgactcccgatacgcatgaaatcgtggtatttgctcacttcttctatggcggtttctcccttccaacctcaagattttttcggggaattctgaatttctatggaatcagcctgcatcatctgaacccagactacatagttcacatcgccaactttattcatgtatgcaaagcttttcagggcattaggcctcattttgctttgttccgccgcattttctttctcaagccccagccgaacaagagcaaaccatgcgttgttgggggcgctggtttccaactcagaggaacgctaagccaaaagtatttctccatgcccttcaagacctcaaacaaaggctggcacgcaaactggttttatgttcaaaaccccgagcctgtccttcccgagtactcctgtcttcctccagtttatcgggatacttggaactcactgccaatgggagatgaagccgcacaagcagtagaactgatggagaggatgataaagctgaaagaacagggccttcaaggagaatagatcacccggcactttatcaagtgtcggttagctccaatcaaagaaagatctcgtacagccttcgaatttgacggcaagcatgacccaaaccgtgaagacccagattctcttgacttcaaggtcatgaaggaaaggatgtataagatcttttcaaatgccatcgttgtcagctactcacacttgctgccagttgtaccgttcaatgcattcaacccccctccaccggtacgcattcatacacttcgacctttctcaaaatataatcttgctttcttgttgaatcagttaacaatgaaggatattacacccaggaatttgctttgatgaagtcggatcccccaatcgctcaacgccgatctccccgccaccaaactgggcaagggagcggaggaccaagaattcggtctgaaactcaaccaagtgcttctgatccagtcggccagtcagattctcgaaagaggaagctggttctaagcgacgacgaagccgatgataccaccaggaggcctgaagaccgagagacgaccaagaaactaccaaaacaggctactccaaggaagaaaacatccagtcgccctgcgccaaagatcaggaagtcttccaggtgcaactcatataacgatccctcttgtattgatgcacacccattgcggcaataatactgataatcaaatttgtaggaaaccatctgatatagacccgtctgggaaagactctgacccgactaacatggacacaagttcttccaaagaaaccgggccaactgttggggatcacccgagtgacaatcagccggcaaccgatcatgtagaatccggtgatccacctccaactgaaacccagttggccgaagccgaagccggagttaatcaggagcccccgactggaaaccagtcggacgcaaggccaaaccaagagattccagaagtcgaaacccaagcagacaaccctcgtggacaaaacgccagcaataaccagagatctggatctcctttaagggcatccgaatccactcgttctcattcagaaatcattacgggaaaacacttttgtctgaaaccatgttgacccaaataaactctgatcaattgtctaacctttgtcagcgaatacattaggaccaatgattggtgatgaagaagaaatcccccgtatacaagcagccgaagattcgtgccctcccattctggtcaagtggtgggatgataacttgcagcctcaaggaattgtaataaaccggcaaaaagaagacgaagaggtctgcctaccgaaaaaggcactcaaccaagcgactcgcattgtaaatgtaagttctctggtacttgatctcaaccatcttgtttgccatttaattcatgcgctaattaaactgtcttgcagaggattcatctcaggaacgaagccaaaacggcaaccttagagaagttagtccctcatctcggaactctcgaagccaccaggagtcaactacacgaggccagagaacttgccaagaagaacgaacacgatctaagggatcggattgctgagctctaggagtccaatttcgaactaagtggctcatcaaaaggttcgcgcaaactctgcttaactgactcatgctgttatctttgcaatcttgattaaccgtaatcaatgtagtgcaagctgccaagatatctcagttggagaagcagattcaaattctggaaaatgacaaggcagaactggcaagacaaagagacctagctctaaaggaagttgaaggt

SEQ ID NO: 22717 - DNA, 14257 bp, Oryza sativa
  unsure (1)..(14257): unsure at all n locations
aacattccgattatgataacgacgtaacccttgcaaatatcgagtcgattgaattaaagctgcttctcgggcttcttctagtcggttgatgtcgtctactcggccctcttcatagccctcctcgttgaagttccgaaatcgtagtgattcaaattccacttcactcggcaacattgcttctgcgccataaaccaaaaagaacggcgactggccggtagcccgactaggagtagtacgtaaagaccaaagtacggacgacagctgatctacccacttgccagcataggggcgtagtcggtcgaaaactcgtgctttgatcccttgcagtatcatgccgttagcgcgctcaacttgtccgttactcatagggtgtgccatggaggcataataaattttaatgccgaagtcttcacaaaagtctttaaatgctccgccagtgaattgagtgccattatcagtgatgatccgattaggtaccccaaaccgatgcacaatgttgatgaaaaaatctctagctttatctgctatgatcatgatgaccggtttagcctcaatccacttggagaatttgtcgatagccacaaagagatgcgtgtaaccgccgactgcccttttaaatgggccgaccatgtcaagcccccagaccgcaaatggccaggacaacgggatggtttgcaactcttgggctggcaaatgagtttgtctggcaaaaaattgacaaccttcgcatgtccgcacaatcttgtccgcatcatgccggtaagctttgccgacgatggtccgtgcagcagcatgattaccacaaataccagaatgtatatccttcaacaattgtctccctttctccaaagatacacagcgctgcagtattcctgatggacttttcttgtacagttcagcttcgtgaataatgtaaagtctgctgcgcctagaaatccgctcggcttcgtttttgtcttgagggagttcttatttggtcaaaaattttatgaggggttctctccagtcggcttcaagcatgcttacgccttgagtatccatggcttcaactgcttcttttctgggcacggttggttcgtaaagatgctcgacgaacacatcagaaggggctgcttctcgttttgaaccaaaattggccagtctgtcagctgcctcattgttatgtcgaaggacatgggtgagctcgagtccatcgaatttatcttccagcttgcgtacctcttgtcggtaagcggtcatattatcatctagacatgaccactctttcatgacctgattgacaaccaactgagagtctccaaggacgattaatcggcgaatgcctaaagagattgcaatccttaatccgtggagtagcgcctcgtattccgccacgttatgggacgcagaaaaatgtatccacaatacgtagctcaatctttctccggtcggggaaattaagacgaccccagctccagtgcctgtaagcctcttcgacccatcgaaatgcatagtccagtattccatcttttcctctggcatgtcttcttggcactcggtccactcggcaaggaaatcagctaaagcttgtgacttgatcgaagttcgtggtttgaaagatatgtccaaagacatcaattctaaggcccacttcgcaattcgtccgtttgcttcgcgattatgaagtatatccccgagtggaaacgatatgaccaccgtgaccgagtgactttgaaaatagtgagataatttcctgacggtaattaagacaccatataataacttttgaacctgaggataccttgtcttggagtcggctaaaacctcgctgacaaaataaattggtcgttggactttttgaatatggccttcctcttcgcgctcgacaaccaggaccgtactcacaacctgggaggtcgccgacacatataacagtagcggctcttgcggatgtggtgaggccaaaactggtggagtggtgaggagtttcttgaagtcttcaaaggctttctgtgcttcgggtccccactggaaattgtcagtcttcttcagcaacttgaagaaaggcatcccccgctcgctgagtcgtgagacgaaccggctgagcgccgccatgcaaccagtcagcttttggacgtctttttgggagcttggcggtttcatgttgaggatggcattgattttctctgggttggcctgtatgcctctttgagataccataaatccgagcaacttccctgacggtactccgaagatgcacttttccgggtttagtttcatcttgaaagcacgaatgcttgtaaaagtttcttctaaatctgcaatcaggtcatccttccgcttggtcttgacgactacatcatcaacataggcttcaacattgcgaccgatctgagttgaaaaacacctttgaatcatgcgttgataggttgctcctgcgttcttcaatccaaagggcatggtgatgtagcagtaggccccaaagggcgtaataaacgaggtcttcaagcagtcggattcttttagtcgaatctgatgatatcccgagtaacagtccaagaagctgagtaactcacagccggccgttgagtcaaccacctggtcaatgcgaggtaacccaaaagggtctttgggacaagatttgttgaggtcggtataatcgacacacatgcgccattgccccgtctttttccgaaccaggactgggttagccagccagtcgtgatgaaggacttcattaatgaagcctgctgctaacagcttggttaattcctccttgattgcgtccttcctgtcctgtgcaaaatggcggagtcgttgcttgatgggtttggcgtcttccttaacatgtaaagagtgctcaatcacctctctggggataccaggcatatcggatggtttccacgcaaaaatatctttattattctgaagaaaggtgtcacgaccggaaataaccaaacgggcgttccttacgtgcgtgtattattccttgtcccaggaggcaaggtacaccaaaagttaatacatttcagagtttaacaagcggaagcgtaaatagttaatttatttcatgggcagcgaaggcccagcacacacaaagacaaacgagaaacagcggaagactagggcgacgaccacaggcgcttgacagcaggcacgagctagacaccaaagccttcatcttcaaggggctcctcttctggggttgggaaaaatttgagcaaggctgagtacaaccaccgtactcaacaaaacacacccacaagtgcagattaaatgcaagggagtacaaaggagttatactataaagggttagggttgcagtaaacagcatttaaagatatttagttgctcaaagctactttgtaaacatgattctagaactatacaatattatttattaaggccatgaactcacacgaacctgccttaacccaaggcctacgatgattcagaccgaactggcaacccgaccctaggtcccagctcgtcccaagccaacccaggccaaccattccacattttagttgttaagcaggttttaagaattaaaacactaacttgggtacattgctcggcttgcccataaccgagggcgcggctattcgaatagattatactctgatcagaggtgtacatctttacccacaagacacatcttcctcacgtgcaaccacgtgccacataccaccacggtatacagacggaagacgtgacatagtttccaacccatcctagccattgacaagagtaccgacccaacccacctacggccggaacctccgggacaggcaggcaggactgagcccctagcagcaggacaccggccctgtgccatgacatctcgactaccgggccgcagctcgtgtagccttcatttgtcctagagatgtccatcgacccccgacttcttccatctccatccgtgtacttttgtttataaccagactgagccacaaactaagccttacccactagacatgtggaagtacggtagtgctttgcaacagaggcccgaagaccggtccttatgtggccgaggtgctactatcaaaaccatgcaccccgagcccagcctaaaaccattttggggattttgaatagaaggagcggtgtgaagccaattccacaataaccaaaccattccatagtgtccaggtgatatgaatattcccaaagtctagagttgaaaaaccacctaatgttacctaattagatagcgaagcatctacctaaaatcatactagtggtaccatgagtagagtgtccactagttggggttttgcttattctagggtgaacaaggaaatagtaacaataacaataataataaggtcataacaaaggtaaataggcatggctaaataaaacagtgataacgcgggaatttaaataaagcgataatgcaataatttaaatcaacataattttataaactaggattcaatatgttcaaggatgatgtgacttgccttgctcgctttcccaaacgtcggcttcaacttccacgaagagcggatcttccgaagctgcagcgtctacacgaccaacggaaaagaaaaggcttttactctaataaactccatataacaagcagaaacaaagcacaaaaatgggttcttgacttcttaaggaaaaattagagacttgaacggtccaattccgagttcaaatggccaagttatggccatttgaagtttatatgctcttttaatgaatatttgcgaatttcttcatttaaattttaatttaaaaatcggatttattgcgtcagtcgaggggaggagcgcgcggaccgggtccacgggagtggggcccacgcggcagcctcacggtccacggtggaccgggcgcacgcggcttacgccggccggcgccgtgggtcccacgcgtcagccgcacccgagggcgcgggcggctgacggccgggccccacatggcagccgcgggacgcgcccgaaggcggccacgccggcacagccgacgggaggcggcgcacccgcgccccgatggtcgccgccggcgaccaccggcgcggcggagcggcgcccgagagaagggagggaagggggaagtgaaacggcggtccacggctcaccccgggtcgacggcgacgacgggaatggcgaccggagcggaggaaggcggcggcgctgctcgggtcgacggggacggcggcgttccggtggtcggcgggcgaaacggaggggtggacgaggtcggcgaggttgccgcgaaccggagaaggcgacgccgaagcgggagaaggtccggggcgacgacggcggcggaccggagctcggcggcgacggcggagagagagagcgacggcgcgagctcgattccgacggggagagagagcggcgagtggcggaacggtggagggaggcacggggagtgtttatatagggttgggagtgagagagggcggccggaggggaaggaaaccggcgcggcgatctcgggctccctcaatggcgccggcgaggtttgcgggagtgtttccaaacgaatccgagggagagagagagggaaaagtgggggggaaagggagagggcatcacggggaatgattccccccactttattgcacgcgggggcggcgggatgcggcggaatccgcggcggcggcggcgctagggcacgggcgaggcggcgggtgcggcgggtggtaggggatgacgggtgggccccacccgtcagtgagggtggcgggcgggcccgcccgtcagcggcgcgcgcgggggaaggccggatgggccgcgggggagaggagagagagggagggagctgggccgagccggcccaagaggggaagggggggaaaagactttttagggtttttctttttataaaaccattttaactttgtttatttcttcttaattattatttgtgctctgaaaattccactaaaatttatttacgcattttaggcttttaggaaatatacaaaaatcctccaagccttattcgacttttaactttgcacattttaattgttggaggctttcacatggattttacttattctatgcataattttgaggatgtattttagagtcgttttgggacgcgacaaaaggtgatgagcgcgctttcctatttacaatctaactcagcgcctattacagcagtcttgtcaggatcggagggatctaagggaatctttttcgtcttagcatcactttcttcggtcttcgtcagcttggttgtaggaacttctccctcgcttgccgtggtcgcagccagtcggatctcttcgcgggcgagagtggtctcgtgggtttgtgccatctcgcaactttctttgtcacatgtgacggcttgcttgatgtcgctccgtagtgatatgacccctcgaggaccaggcatcttcatcatcatgtaggtgtagtgcgggacggccatgaacttggctagagccggtcgtccgagtatagcatgatatgctgtctcgaaatcagcgacttcgaaacaaacattttctgtgcgaaaattctcccgagtgccgaaggaaactggaagagtgatctgcccgagtggtgtggctgacaatcctgggataacaccatggaagggtgcattactcggctttaattccgtgcgaggaatctgcatatcgtccaaggtcttagcgaaaaggatgttgagtgcgctgccaccatcgatgagagtccgtcgaagcttgacattgcgaaccactaggtctagtaccagggggtaccgccctgggtagaccactcgggcgggatgatccgagcggtcgaacttaattgctgtctctgaccaccgaagatattggggcgtgttaggctgaaccgcattgatctcccgttctgttagcttctgttttctcttggactcataagccaggggtccgccgaagatgtgattaagttctttgcgatgatcttgaaaaccagtcggggcattgtcttcatcatctttcttctttgatgtgccctgatctccgtctgcaggtttgcgggcgttcttgacgtattgctccgcgaactgtttgtagacggagcaatctttggccacgtggttggagttgggatgatgcggacattgggagttcattatcttgtcgaaggtgttgacgcgaggacgttgtcgggaagatggagaggtggtcgccacaagttcttcgggcttacgcttgcgatccttgtggttgttacttccactcccccctgcagtcggcgtgtccttatttggcttccaagtggtgcccgactgtttggacgcggtgatagcatcttcggctttggcatactcgttggctttttcgaacatctgcttaaccatcctaggaggtttacgtccgaacttgccgactagatcctcgtggcgaatgcctttagtgaaggcggcgatgatgacgtcgtcggtgatgtcggagatcttgttgcgttgttcggagaagcatcggatgtaatctcgaagggattctccagacttctgaacgatgttgtagagatcaaactgtgtgccggggcgttcaaaggtgccctggaagttggcgatgaagtgatcacgaagttccgcccatgatctgatcgtgccacagggtagtccgtggagccaggatcgggcggagtccgctagggccacaggcagataatttgccatggccttgctgtctcctcctgctgcgcggattgcgaatccgtagacggtgagccaagactccggattagtggtgccgtcatacttctcgattccagtcggcttaaagccggctggccaatccactcgacgcaggtcattagtgaaggcagctactccatccacgtcgtcatcgtagcgatttggtgaatggcggtgacctcgtgctgcacggtgctggttgatcgtctcgcgaaggtcgacgggacgctggcgaggtggagagtgaggccgttcagctcggcgctccctgtgacgttcgggaggtgagtgaacagatcgtttgtcgtgacccctgctcctgcgactagatcctgtgccggtgatgttgaggcttggctgatgataatcatgagatcggaaatgagggactcggctaccagttggggtgcgggtgcttgcggagttggttggaaccgaggcctttgtctggttcaagatgttgacaacatgatcggcttggttgagtgcgtcttccttgaggagggtgtcgaggagagtgattgctgcaaccgcgttctgctggggggtgcgaaagaccgctgtcccgtcgacgtcttgttgcccaatgagctctctcgctcggcgcccagattccaaggcgcgttgccgtcgatcttcagcctcctttgcaatccgttcgcgatcttgttgctcacgctgtagtcgttctcgctcctgtcgctgtcgctctttctccagtcggcacgttcagcttcttgccgtgcgcgatcttggcccgcttctcgggcttggcgctgttcctctgtttcgttgtcagccatgaatacgccgaagaagaggggcatgtagttatcctcatagctgtcgtcgaagttgtcgaggtcgccgtggtcgtagtggtagccgaaatcgtcgtagtcgaggatctcggttggtcaagaactgacgccgggggagctaaggtaaccatctaactcttccgtcgagactgtcccaagaggttggagtataacgccaacctccctggatctagactggatcggggccgataccggagctcgcctagatctccaagtgggagatgttttggctgtgaagacggcgaccaagtcatcaggaagtttcatcaagattgagggataggactcgtcgtcttgatatggccacggaggagtaaattggatctcgtccgagtagtttgaagccgactcggaagatatgatcttggagtaggcctcgcccgagttcggaataccgaactgcacggggacctggtctctccccgactggttcgaatccgagtcaaggagagagatcttgccgaagtcgttggtgatgaagttgaggctgccgaaccggaacgcctgcccgggagagaaggcgaagtcgtcgatggcagaaacagaacccatcgcacttagtcggcaaaaacttgacgcttcccctacctggcgcgccaactgtcgaaacaagatttcggcaataataaaagtgggtggctatcaagctaggaaagtggatgggtttggagacaaggaatttaatacaggttcaggccttcttattcaagaagtaataccctactcctgtccggngatnnnnccgccgagtgttttattgattgtatgattgggagaaaaaagaatcgtgccccaagaggcacacggaccctccttatataggggaaggaatccgtaatacaaagtacagtccatatcctaacggaatatgggattacagataaaatacaatcgtaaccgactaggatcctaggtactttcttgatatacaagtttagaatctaacccgagtcctcataaagatattctatctatatttggtactgtatatccagctagaatataactgccatgtagatatggggtaaccataatctccacacacactcacccctatgaacgcatacacgcataccctacccctatgagcacctccggaagactggaccggcatatcttgatattaacgaagtcaccacaggcgcctcgctgtcgacgggtatgtcgcctaccactaaaagaataatcaaaccaggtaacttttgactaatgattatattaacaatatctatgctaagtgttatgcatgctatataactaaattcatattttgaattactttcatttgatgctaatttcatatattcattggaaacataacatacaataaattaatggtcaaaatatattattgaaaaccgtataaaaatgtaaaccttataatttaagacggatagagtactatctagtatgcgataggatattttttagtacaataaatctggatagaggatattttctaaatgaatctgattagcctgtccagattcattgcacaaggaaatgttttatcgcatactagataggaacattgtgggatgtgggaagtataagtcagcatcgagtaaggcacattatgccgttacggctgagcgcgcgagcatttttacttggagggatttattcgggtaaggctattgcgcccctccccatataagctccctcctctccccccttcctcctccccttattctctttctactacagtatactataaaattttaaaaaataaaagaacaaagttagaaaaaaatatatatagaaatactatatataaaaaatatttaattcaaattcaaatttaaaacgggtatataaacttttgacttataaattttggatctataaactaatatttgaattcaaattcaaatttgaacgggtatgtaaacttttgacttataaactttgggtctataaactaatatttgaattcaaattcaaattttaaacgggtatgtaaacttttgacttataaactttgggtctataaactaatatttgaattcaaattcaaatttgaaacgcgtatgtaaacttttgacttataaactttgggtctataaactttaggtgtataaactttagatgtatagaaatactatatataaaaaatatttgaattccaattcaaatttgaatcggatatataaacttttgacttataaactttgggtctctaaactttagatgtgtaaacttgatgtgtacaaactttaggtgcataaatttactaaaatagaaaagtaatacggtgtcaaaaaagaaaaccaggtggagggaggggaggggggacgggctgatcgctaggggcgaccgatcgccccttagcaatctcagattgattctcagtatttaatgtttttcatgaaatcatctgtgtagtttcaaatggacttatatagagaaatcaggaatctcaaggataactatccgcgatataggaacaaggattccccaccgtggaaatggggcagcttggtgccgtcatccattcttgagctcctgaggatgtcaccaggtttcttatacaaattatattgtcagcggctcttaattatcaagtaattacaactaacagtataagctaaaacctaaatataaaaatttcaccgaacatcctttgcgtcggggagagactaccttaaatatccgcccctggtaactccatggtccttagcctagctcattggttgatcctccaataccgatatagacatantnnncanatntngaggaaaaagcagttacacaataattactactccctccgtcccagaataactaatctaaaaccggattggacatatttctctgtccagattcgtagtactaggatatgtcccatccagttataggttgctatattctgggatggagcgaagtatactatagctacactagtaacatttaatacaaaaatatttcaaatgttattaagcttattagtcaatatgatttttttttcgtcacgcaaaaggcttgcacaacaataaattataaagagcgaaaacttgttttacacaacgtgcatgagccacaacggttgtcgtgagagatggggaggagaaaaaaatataagaggaaaattagttagtaggatagtaatatactccagttgtgatctaaccctttcagtttctattgaaatagtgctgggtaacggatactccctccttccaaaactaagtgcatttagcagaggatgtaatatattctgcgactatgaatttgataagcactttgtccagattcgtagcattagaatatgtcaaaactaatttcgttttaaaaacataatatgcgataatatcatgctaatatcaagaattaatatctttttaaatgctacatatctgtattgataacgatactgatttgccaatttttggaagtgactgcatttcaaagactgaccaaatgcctacaaatagcaccagaggcttggctcacctactcacttcctcactagattcttaatacacaacccagctggtgaaagagaggaacttgagagttagctagcatggcggcagcattgtcgttcccgatcatcgacatgagtctgctcgacggggcagagaggcccgcggcgatggggctgctccgcgacgcatgcgagagctggggcttctttgaggtagaaaactgtgcgattgaatactaaacacatgtagaaatagaaatcaagatgcatgtagaattcagtttcttctaaaccaactagatgcatgttctcttgtttgatctgttggtgcggtgcgtatatatcgtgcagatcctgaaccacggcatctcgacggagctgatggacgaggtggagaagatgaccaaggaccactacaagcgtgtgcgcgagcagaggttcctcgagttcgcgagcaagacgctcaaggaaggctgcgacgacgtgaataaggcggagaagctggactgggagagcaccttcttcgtccgccacctcccggagtccaacatcgccgacatacccgacctcgacgacgactacaggcgcctcatgaagcgcttcgcggcggagctggagacgctggcggagcggctactggacctgctctgcgagaacctcggcctcgagaagggctacctcaccaaggccttccgtggccccgcgggcgcacccaccttcggcaccaaggtcagcagctacccgccgtgcccgcgccccgacctcgtcaagggcctccgcgcccacaccgacgccggcggcatcatcctgctcttccaggacgaccgcgtcggtggcctccagctgctcaaggacggcgagtgggtggacgtgccgcccatgcgccactccatcgtcgtcaacctcggcgaccagctggaggtgatcaccaacggcaggtacaagagcgtgatgcaccgggtggtggcgcagatcgacggcaacaggatgtccatcgcgtccttctacaaccctggcagcgacgccgtcatctccccggcgccggcgctggtgaaggaggaggaggccggcgagacgtatcccaagttcgtgttcgaggactacatgaagctgtacgtgcgccacaagttcgaggccaaggagccccggttcgaggcgttcaaggccatggagaacgagacccccaaccgcattgccatcgcttgatagcgtgtgtaccacagcgacccctaccgggtcggtgtcagtaaggtttagtcgtgttcgtagtgatcagtgcgtgcatggtcagctactcagctcgcgttttctacctgaataaattaagctccgtcgtcgtcgtctcgtcaccttggataattgtcagttggtgtggcgtgctgttgcacgtacggccatgtatctttgtcggctgtcctcgtgtggtacttgatagcttgtgcggcgtgctgtaccgtgtacggtttattatctactccagttctatatcgtggtgatttctgataattttcgtttttgtgttacatagcaaaagtgcccgtgcgttgcaacgggaagtgtatagaccagaaaatatgcaattatttaaaatataaatttgctgaaatatttggtatttttaagtaggtatatatataattaaatcaatttacaagtaaaacaagtgtgagaaataaaatgacatgattaaatttaattttattaaatactccatgattagttacgctctttagaattttattggaattttcagagcttaaattgctaattttaataatacaaacatcatttaacaattatttaattggaaaaagaatcaaaatccttccttttaggtttgggccgaatatggaaaagttcatctcgttccctcttgtctattctatgtggctggcctgtttccttcagcgttcaagtccattttgcatcctctgctacgcgcggtccatccggctacccaacaggccaacggtccaacgcgggagaagttggagccatccgatcgaatggacggtccagattaatcctaacctaaataaatagtgggcacccaaaattaatcaaaacactaaccctagattcattcactcccatcccccctcccaccgctggcagcctcccccgcccgacgccacatgtccccttctccccaccggcgccatctctcccctctagtggcgcagcttcccttcttctcccctctccccactggcgcgccgctccctctccccctttccctcccatctcgcctgcacggcgcgacgatggcggggtgcggaggagacgacggtgatagtcgtccctcctcctcctcctcctccctctccccgtcggcctcgatggccgtcccttc

SEQ ID NO: 22718 - DNA, 6972 bp, Oryza sativa
atcgccgatccggcttcaccgatggcgcctcgtggacggatctggtggcgacgacgatgttggtggctttcccggtgatgtttttgttcttcttcatgttctttttctcaatcggttgattgtccgattggattttgttcagtaatgaatcgggtgcgaatttatgggtgctttattgggtttctttcttcttttttttgcaatttttttcatcgctaacaaaatcgaattgggatagaacggacggacgaaaagagaggtgacgaacgaaaaattacgaatctttaattagttataagatatatactataatatttccaaattacaattgtaaaaatgatgaatcgttcttgatcaaagaaaaaaaaggaaaaaaagccttgtctgcaatacgagtgcctgactgcctgtttctgttttttttaaaaaaaacgcccagagcggtggacctgagcggagtgagagaacggcgcacggctcccagagcgagggcgcatctcgatccttccacccagctagaaggaggggaaacggcggcggcggcccagtggcggctcggcggatccctggagcagcagccggtcgacggctcccggtagcaaggcggcgtggaggtccggcaaggagcagcgctcgccctccctctcctgtgtgatttgttttgtactataatttgttgatttcctatgatctatttttttggtaatttagacccatgccattataattttgcaaagtttaagatatgtcatcgatatctcaatgacatgtaggacccacgtcattgaaggacccacatgagtcctaatggcatatcttaaattttacaaaattataatagcatggttccaattttcggtattttagatttcagatgattttgtgatgattccgatttggattagtattttgtttttggtttggattatggtggtttgggatttggagagggggcacgcgtgatgtggctgacaaatgaagaggattttttttatcgtccttttttacgggttttttttgtccgcgccattgattgaatcgaactttcttttttttcgctcgcgattgggattcgggggcgggggttgctggtgcgcaccaacgattggaaaaatatgaatcttttaattagttaagttataagatagattagattggaattggtgtgagtatgtgcttgtagatggacctagaatactgaaatcacagtttgggcttgtattgtaattctatatggaccgaaccaaaacagaatcgggtggatgaatcggatcggatgagtttagcgtgattaatgacggacgaaaatctgtgattactgcgatgtgatgaccggaaaaatccaaatatttatattagttatagataagaaagggacagggtaggtcggtatagaaccgcgttttttcgcagatcgaacatctccacgagaccacgacgaagattattaattaattagattaaagaagccttgccggccgctctgtcatagtatgtgccggctggcttcgcctcacactcacaatctcttcgttcttattgagtattcaacggaattacgaaccgcaaatcgctttaaagctaaaaaatgtggctaaacatgtcggcatagtcatattatatatgtgccccggcgccggcgcctcatctgccgctagccgacgtgttgttcagattggcgttgccctccgttacagctggatatgaaatacaaatagaaatgatagagcacaatatacctctgcatagttagtatgcgctcactcccgtgcaagagctaagcctttgctcactgcgcctgaaatccgagccacacgcaaggttagtttgcacgatcccctccctcgtccacctcggataaaaacccccctcttgtcgcgagcatgcttatcatgaaaccatgggcgaatagtgcccaactatggtaaacttgtatatataggggattggccgatgtataaggatatgtacgtacgaaggtaaaaaaataaggacaaatgagatatgagttttcatatacgtacagtttgtataatacaaaatttatatatatgtgtgtgtgtacacacacacacagacacacaaacacacacacatatacgtagagacaagagggggcgggactgatcgtgtccgcgcggatcagcggccccgactttgtgcatgcaagcgcaagcgcgagcgcggcgcctttcgagctccactctcggcgtctcgccgcctagtcgccgaaacgccgatgctacctgcgcgcgtggcggcgtgggcgtggccgcatggataagccgggaatgcgtcctcgcctgtgctcccgactgccgctcgatgcgggaatccttccgtttcggcaggtggttgttgagtttgcggctccgcgctgggccgcgtgggcactcttgccgactgcatgcctgcatggagcccttcagtttctcccgagggccatatacggaaggaataagtttattttgtgaccctcaaaagtgatcgaaatctaatccgtgaccttaaaccataaaaccggatatcttgaccccaaaactcctaaaaccgtgcaatttgactccctaggcggttttggaggacggtttcgctgacgtggcgccacgtggcacctacgtggcgatattaaccaagtcttcgttacacgtggcgttgacgtggctcttacatggcaataaaattaaaaagtatacgtgggacccattagtcattcacaaaaaagaaatgtgggccaactgacatgtgggccttcttcctccctctctcccttctctctttctctcccctttagacggcgggcgggatggcagagagagcgagcggcagtgggcggtgacggcgaggccggagctgcggaggtgggcggggagggcaccaacgccggggagcgccggcgtcggcattcggcgatctggagcccgccacaacgacggggagcggcagcgtcggcatccggcggtggggacgacgtccggcgtcggcatacgtctccgccgcttcctttttctttgccgccgccgccgctccggtggagccgctcctagccagccatcctcccttgccatgctccgttggagccgatgcggttgccgcgatgccgcaagcccacaaccccttttcccgctgtggcacggagagggaggcggtagggcagagcaaggagaggcggcatcagcgaccggtggagctcgctgtggcttccatctcggtgatctacggatctgctgccgcgaggaagtggtgaggtcgaagctcgagcgggcaagaaatgaggttggagatcgagctcccatccggcgacgggaggcagcgagatagggagagagaccacctccgccacggcaagagatggcatgcatctcgcctcccagagcacaagctgcgcaagagagggagctcgtcggattgggcatgagcaggtgagctcgacggtcgccgcggccaatatctcacgtcagcgcccaccacaacgacgtccacgatggccgcgcacacccagctcacgtgctccgagtggctcgaatctgagtgcgccggcgggtccccctcttcctgctcctcctccacctcgtcgtcgttgggaaagcgcaccgccggccacctcacgtgccagtggtggaggttggcaccggcagcggcgcctcggcatctctctcgtcggcgccgagaagagctgaaagagagagagagagagaggaggaggaggagacgggcgagcgtcgccattgccagggtgtcctgaaggcgaaggggcgagccgacctcgccgtcgccgccactcccctcgtcctcccgtcgccattgccaacgagaagagagagaatataggagggtgtcactagcaggtgggccccactttatttttttaatttatttgatgactgggatgccatgtaggcgccacgtcagcgaaaccgccctccaaaaccgtcgagggagtcaaattgcaccggttttaagagttggggggtcaagatatccggttttgtggtttagggttgcgaattaaatttcgatgaacttattcctatacggaacgtgatgggctggactgcggttggagtaggccggatggcagagatgtgggctgttcagcctctttagtctagagccctattgcctacatgggccgtaaatagttaaccaaccgagttggagtttaaactgggttgtcaaatataatgttcaaactagaacttctatcagaacgaaatgccagtcagaataaaatcatgaagacctttttaatcgttcaccgtaggggcgcagtgatttctgtattcgaatttattgattacaaagaacagggactcttgtcacgaatcaggaattaggcaattggcatgtacaaagactgatttctcgtcccaattctctgtttctcctcttacaccgcaagcaacgaatcaaccaaaccattaataatcggagatattaaagaccaccgcagaatgctcgcaccatagcgattctgcggttttttggctggcgtgtacgcttctggtggtatccacatcggcccgtgttggaactggtcatcttgcaaaaaagtcctcgattaacttgataattactcttacgtccctcaccctatgctcctgtgttttgtagtctttcgtaacagccctcaatgtcttggtatatactatgtgaaggagacgaaattctagatataggaccgcgctatgaaaaaagagaaataagggtgttttctgcaaaagagaacatccctatcctatcctctccattcccctgaaaccctatccatcactgttctcctgccctttctcttcctttcccctgtccttgcgccgccgccgccttgccttacctccccggcttctcctcgccgacgacggctttcccctcacgctctcccgtaccctcctcctctcttggcgctccctccatcaccccccctcccagtagagcaaggggatttagggactggatggcgtagcgttggatttgggtgcggtgatggagtttcgccggcgacggcctccccctcgcgctcttccatgtcctgcccatctcctgccgcaccctcaagcactctccgcctgtttctcctcgccacccgttgcagcagttaccctgttttgtgttgggctccacggagctgcgacgacggtagcctcggccaggaagcgacccatggaccaatggtgggagcatttggcaaggacacactcactcaagaaccagacattggcctgtgatgggaaacaagctcgaggatgctaggtacggtcgccattgaggtggttcccctttttatttgcttttcttcagtttttactcgctttgcctaccgtgagatagtcttgatctggttttttcctctatgtcagatggctatagacttgatccttccactctcacagccgtcaacaacatcggggcgattcgttttgctgcctggtgggctattgtttactgctgtctgcttgctgctgaatgaagcagctagcaaatattgttccaaactaaaagttgtagtggtttggtgtgatgaggaagccagaaaattaatggttaggattcagtggcctttcattttatctttatataggacttcattcccctaaatcttgcctttatatattgattttaattatgcagattttctgtacaattggcactggacattctttctgtatccagattcattgaagcatgtaatatttcatctttgtaccatgcttctatttaagaggtgtgcagactctcactgtttcgtttgaatatgccaaccatcatgtttattttgcaattacctacgacactagatgaagcacttatatgtaaatattactgcagagtgtttatcattttgcttaggttgcttcttaaaatctagcgcaggtgattggaagaaggtttagctgatcttggatatgttaggattattagaagctaaatgtttccctgattttacttaaagtagctgtttgccgcttgattttagcgattaaagtttctggtctgaaagaagttagggtgtgtttggttggtgggatatacccggataagacatggccgccgctttttggagggtgtttggatgctgggcgagagtgggatagggcagcccagaggggaatattccctccacatgctggatagagggatccggctgatttggccggatgcaaccgcccgaggctcgggcgagccgggcaagcgagttgcgtgactcgcgtcacccctcaccaccacgacgcgagcgaggcgacgagcgcggtggccggcaagagggacgacgagctcggcggccggcgtgggcgacgagaggggagatgagctcggcggccggcgagagaggcgacgagcgcggcggccggcgagagaggcgacgagctcggcggccggcgcgggcgacgagcgtggcggccggcgagagaggcgacgagctcggcggctggcgtgggtgacgagagaggaaggcggcggcgggaggaggcgagcctcggtggtgggaggaggcggccggcggcgggaggaagccggcgggaggaggctgccagcggcgtcggcgagcccagatctggcgctgctttttttttctttttcttttttctatgtgtatttataatggaatgtgtatttataatggagtgtgtatttataatggaatgtgtattatgtattaatttgatggggtatattcaccatctcaagtgagaggtgaccacacctacaaatccaccatacttcctccaaccaaacaaaaaattggatcaccaaatccacctttgtctctacaaccaaacaaaaaattagatcgccatattcacacaaccaaacaaaaattggaccgccatatccagcaaaatatggaccaccgtatcccatccaatcttgaccaggaaccaaacacacccttagtgttctatacaagcatgttgactgtttgataaaaaaatcacaatactgactgtggtttttgaaagaagttagtgttct

SEQ ID NO: 22719 - DNA, 7555 bp, Oryza sativa
tcagggcttctgtcctagatccccatccatttgtgcctatgaatcatgttgcttctcagaacagatggtaaattcaatatgcagatttatttactacagcaaaaaaataacactcaatatgcagattagttttctattaagcaagcatgtataactggaaatgtgcttaggacagaggtgatatattggtaggaaaattcctatccagattagtttcctattaagcaagcatgtataactgggtatgtgcttaggacaggggtgatatattggtaggaaaattcctatccagaatctggtatagcgccactgtaaacagaaactccgtgtgtgtttatttctacttagtgatcctggatcctgctaatatttagaccttgagatcctgctaatatttggaccttgaattatatcattcctccacatacacagcctgttgtaactgcagctcttatctgttctctctgttcttaccttgaattatgcagagttttgcatggtcaaattagatagccattaaaaaaactatggtatgttgcttctcagagcacatggtagattcgatatggagattcattttccagaaaaaagagaggcaatagcagattagttttctgtaacaaaaaatagcacatcattttctgctggcgataggaatttgcccagtaattctgtggcatgctgccaccaaagtttagcatgtgtctttcgtgttgctacatactagaacatattacctatgtgattaataagatgaatatatcacgtttggtttgtcggtttaattaggtggtgtttatagttcatcctgtgatgccttggatcctttgtgtggttcaccgtaggcatgtggttgggtgcgtgtgtgccatcggtcctaacgctctatggcccacctggaaatcaccttggtccatgctgcgtctggcctatgtagctctctccctgcctgacagccttgacttttggtgcacccccacgtttactcagcatagcctcatgtttctctatgcgatgtcactatgtgcgacagtgcgaggcaggcacgtttcttcatgattctcctaccaacgtttggtccaccgtaatccctggtcacacgagtgctcctctctgcctgtgttttgtgcgctaggagcacgttcatccagtgcaacgaacggattggacaaattacctactggttattacattggataaatgatggacatgcacctattcattgcagagccaatgacaggtggggtcggttttgtgggttgtcccatataccatgtgttatgcgtatccaagaggccgtgagtctatcgtgccatgtttttctaagcgccgcgtgctacagtgtctgacgtgccgcgtcaggccacatcaaatcgtcctgcgcacgagccgtaccggcatgcgcgcaggcatcgatgcatctggcatggccctagcctttcctatcgttcctgttacccggttagttaatagagattgaggccattcaaacagctgcgttgcttcggatgtcttcttggctcttctctcatctttccccttttcgctcttacatcaatggccaacactaggtaatctgctgccctgatttatgctccatgcctactgttctgaatgtgtgtgcgtgtgcaggggggatcgtggatgctgcgccggtgctgctgcttagaatttgcctcacgcctctagggtgctcccccagccacgcttccacgccgtcttcctctcgaatttcgcaggcgtggccctcaccaatctaccccataatttcctgcctatttatcgatgttagttccaattgttatatctgtgatgtataatgtactctagattatgcattgttctccacaaacaatgttaacattcaatctatgtattttatgtctacttaatccatcactggttttcctcataacctgaatgctatagctagtggtgctacagccaatccactgaataggctcttcagggcctccttatttattttcctcatttacacagcaagggcgccgcgaagcgcgccgtaggttctagtttcgtgaacgacatgagccctcaccggcttggttctgtccttcgtcagattaattaacaaacatacattcgatccgttcctcggtgcacgccatcctcagcctgcgcgttcagcaaaacagcacatccagataggctcattagatgccttcacacacaaaactaaacccaaattctccaaagatggcgccgctccgtgttgacatgatcagcacaaaagtactttggtagagtagtagcttacctctgacgacgtgcgactggtgctcgtcggcgtggccatggccatggccgtggtgttcgtgcagcttcaccctgttcttcttgagctgctccctgacgaacttgtcgtagatgaacgacgcccccctgaactgaggcagcaccagccacgccacgaacaggaccttcgcctcgtaccataacggtatcctgcaagacgacaattaatgtggtctagttctgcaatctgcatacccgtttgcagagcagatagaggcggtgccacgaatttaattaccagtacaagactttatggagtgccatttccatgagggtgatgagggagtacagtatccagtacaccagccattgctcgtcgtccaccttggacgtgctctccatcgcgcagatcgacgcgtacctgatccaattcaacactcttttatactcatccaactacaaaccaacagtctgaaaattcacaggcagcgatgtaaagtaaaatcagcagcctaacagagtaacagactagcagtgttcacttacagagggtatattagtgtcagggttggcctgcatgtgaagcatcgcaaattagccaaataaatgatcacaaaacgaaatgaattagaatttgcaattctcgtacatacccggcaaaagcatggaggtggctaatgagtgcccatgttttacccatctctttccttccgatatccaaccaaatcactcaacgaaggttgattttggagtttgatgggctaggagatgggacgcgaagagatccagtagcataggccttagcttgcttgagggaacggggtggttttatacggtcgcagccgcgcgctacaagttgacggcgatgcggggggatggcatcgggtgcctagcttggacgtggcgtccaaggcggggtgggtcggagcctggcccgaccagatcagccgggctcgaatcgctttgcgtggcgagtcgccttggtgcttcgccctctcgggccaaccaacacgccgtggtgcggcttttcatgaggccaggtggccatctcctctttttttttcccctcacacattctgtcttaaaaaaacaaatctagcatgacacatcatgtaccattatgttcatttttcatattatggaagaaatataatagagtacttgtacaaaacatacttatactaggtttatgttattaccttactctcttaacttttacattatcgtttttcacgcacacgtttcctaaactgctaaatttatagacaaatatagtaatatttataatactaaattagtttcatcaaatcaataattgaatatatttttataataaatttgtcttgagttgaaaatgttactattttttttataaacttggtcaaactcaaagtagtatgactttgaccaaaattaaaacgtcttataacatgaaacagaggtagtattagacaaactagttgggtggcccgcacaattgcgcggctaacacacaaacaaaatcatatattttttaagtatgattttacttaaaattttttaaatagctatctcattttcttaagtctttgaaagaccaaaccttatcatccccgtgtttctaattatatattttttaaaagtcataccagttgatatccttatatcatcttcttctttatttgcttgctcgatctaccactatttatattcattctcctttgaatctttaaaaattggcgtccattgtctcttctctttattgtcattgagattttaaaaatcgaacataattatcgtttgggttcatttttactttttagaagtcccgctaacggtttagccattgtactcctctacggctcacccgctatctcccttctttattgtcattgagattttaaaatcgaacatgattatcattgtttttttttttactttttagaagttccgaacctttaaaaattggacttgtagtttaatttttagaagtcccatcaaacgatgccactatgcccctctacagcccgtctgccgcctactctttattgtcattgtgattctaaaaatcgaacataactatcgttgcaattcattttttattttctagaagtcccatcaaccgtagcaactatactcttatacactccacccgttgcttctcctttttattgtcattgagattttaaaaatcgaatatgattaatggggtttattttttttacgttctggaagtcccggcaaccgccttacttgtttgcgtcacggcatgcctgacgtccctccttttaatcgtcattaggattctatttggtgtttcattaacaatttttatatgtcgtatcaaccgccaccactctactcgtttataggcctgttacttaattgatctcgttatgtgttttagatggtattttctttcaatagtctttatttttatcacaaattttagttatttataaattttattcctaattgtaatcttattttttttctaatttcagaatttattttttttaaaaaaaaattagttaatacaatagtattgcgttcttttaatgtttttattttttttattttcaatttcatttgtttcaaaattgtattcctacttgaagtctcttttaatttttctaattttggatattattttattttttattcgaaattttaattaatcttgtattgggttcttatatgatttttctttcaatattgcttacttttaattccaaatttcagctaattttaagttgtattcctacttgaactctttattttcttttgctaatttcgattttatttttatttttattctgaattttaattaatctcgtattggattcttatatggactcttcttttaatattcccttttttaattccaaatttcagctatttttaaattgtattcctacttggactctcctttccttttctaattttggattttattttatttttatttcgaattttgattaatctcgtattgggttcttatatggaaacttctttcaatattgcttttttttaattccgaatttcagctatttttaaattgtacttctacttggactctccttttcttttttttctttttctccgattaatgtgagaatttctagcccccacagtaaacgtggtgcctcctttcaaacctgttttaataatataatagatagatagatagatagatagatatatagatagatgatgggtcctcgaggctacttcttccctttcggaaatgccgttgctgggccatgaattgtgcatatttgagttgtgggcttatgcctatcgtatcgtagcttcacacaatggacacgcttcgtttcagtaaagcaacgcctgaagcagacgcaacagaatgcaactgatcaggcacaagcatacaaaggaaacgtgacctgtagctacacgaactcacgaagaactcgcctgttgaatctgcaacctttcgttctcgtcattgcaggatactgtgcaaaacctccaacagactaccagccagcttgacagcactatgcactatactgtagagtaatagtactgcccaggcccagctagtactggcccagctcggctgattctttgtggataaatatatttttaataatgaaatataacatctcgatctctgcttaatgagctataaccaattattacagcctaacactcagaatgaatacagttcaaatagaatcccttctttctataaagttaatgccaaaagctcaaacctcatgcttccacgtcatcatcaattgtaaaccgttagatgaatgcattagattgcttcccagccgttggatggaacgcagtatagagcccaatccatcaggcaccgggtgagtctcttcgcctcctcagtgccaaatgtagcccacatgaacacattggctcatcttcacacacatctacatgtatcaggcccatcaatccgtataaaagagctttatagtcgaatgcccattcagttaaccttacaatttgttaacttatgtcaaaccattttgcttctttgtagcttatactttgaaagttctacctaaattatctaaaaaatttagatagggttgctaaaaagaatttctccaagaaaaccatttgtttcttccgtttctttttgagattgtacctcctatctaacaaattgatgttaaccaaatccggcagcaacgcgcggggcatcctctagttatagaaataaaagacaccaatcatgaagaagaaacaaaccaaagactactaacccaagataaagagtacacaattgttaaattatgtttgcaaacctacatccgaaattggcaaacaattgcataatcgttgtcataagattacgacatgcaacctttaaaagctcaccatcttcatcacacatttgcagttgtgctcaagacttaagccaatgtgttgccttgaaaattacctgcatatacgaaacatatggtgttttataaaaaaaaaagatgttgaatcgacttatttttcatacataaacaacatttcaaacttccatttcaattcctccttgccaaattatccttagttaatagaacctctttaagcaagtaccacataaagatcttaatcttaagaggcaacttaagcttccaaataattttatttttctcaatatagccattatttattaaccctaaatatattgaccgaacagaaaactggtcattctgatgatagttccatctaaaacaatcactccattgattcaactgaatatgcacaatagaatcacataattcatgccaatttgctaaattctgaccaactaaagctctcctaaaagaaacatttagcggaacaaattccataacattagcaattgaagaacttctctttcgaacgatagcatataaagatggatacttatctttaaaagccaagttacccaaccatttatcttcccaaaatctggtttgttccccattattcacaatccaagaacccatgtttaagaaagtattcttaaccttcatgagacctgacaaaaatgagaatcaccatattttctatcaacttggcttatagactgattagagagatattttcttttcaataagtcctgccaaacccattcctcatttattaaggcaactgaagttgcagcaagtttcttctcgtctccatcaacgaggccctcgatgttgttgtggctgttgccccaccagcaaaaaaggatgaaattgaagatgccacgtggaagcatagaatgtactcccttcgtttcaggttataagacgttttgactttgggcaaagtcaaactgtttcaagtttgactaagtttatagaca

SEQ ID NO: 22720 - DNA, 4203 bp, Oryza sativa
atgtggcatcttcaatttcagccttttttgctggtggggcagcagccactacagcgtcgagggcctcgttgatgtcctgacttgcctcagtcacacgcttatcgacaggggcatcgtgggccttgttgatggcctgtcttgcctcagtcaagcgttgattgacaggggcgtcgcattccacttgcactaacacggctgatatcgcgatggctgcaaggagaagggcgacaactttggccattgccaataaaccgaacaaggattattcaatgttggaagatattgctactgcgggtggataagttgcttgagtttctagggatcattggggctttaaatagggaaacatgtaccattataacctaaggccaagagggctttacggtccaaaattggttggttgcatgcatatgtgccaagtattcggtccgtagtgcatgctctcccacgtcttaaccgttgtcagccggcgtggggtggcgtcgggcaggcgacggggagacagccgtcgggcggcctgggacggcgtcgggtggcgtgggggcgggcgacagggagacggggaccggagcaggccggtgccgggagatgtggcgcgcgacggcgggagcacgggcggcgcgcgctggtggcggcaaaccctagcgccgcgtcgaaccgatggccgggcgctcggtctcgcgaaaggggaacgggaaagaaagaaagtgcgaatcgtttttttccataatggtataggtgggtaattttacccctcaaaagccagtgaaagcaggggtagggactgcttttggatttgtactacactaaaagcagctttggagcaaaagcacttgtggcttttgggccctttggttggcttttagcttttgtaaaagcaaaagcaggttgaaaagcccaaccaaacacaccctaaacttgagagaaatgagagagctattgcttgaggtgtgtgtgaagtgaagagagtgagctccttatatagagctagttatgacggttgtggaagagaaattgtccgaagtgccctccaaccgtcattgggatgcaatcctggacgtccacgccaaaacttgaatccaacggcgccaggattggttcggccgaaccaccaagcccaatccagcccaatttcggctggtgacctcctctattgctccactccgcagacttgtgaattttggcccaattcatcgtgtcagttctgagttcttggtccatctattcataagtctggtactcgacattgtccgattgatttatcgtctgagttgatgtcgattctcctctactttatgatcattctctgcaaaaggttagtaaacctaatactagtggaatattattattctaacagatttatgcattgcaagcatcactagttctcctttattttggtagtatcgacggtcgagactgatcgataacgaccgtcaacggcatcaaacttcattaatgttacttagggtgtgtttgtgaggaggggaaagagaaaatacgtaaaaaaggtgggtcattagcgtatgattggttgagtgttaattattttaaactttaaaaaggattaataaaaaaattttaaagcaacttttattatttttttttgcgaaaaacacatcgtttagtagtttgagaagagtgcgcgcggagaacgagagagtttttcccccgatgccgaataaggccgcagcctaagaggttataaagcaaagcagaagtgaatgtagaggacatcgatggtgaatatgtcagattactcgttgaaggttacagtgaagtgggtcgtatttgggataggaagtgctttacacttggacggcgcggctatgatgctcttgttctagttttagctgctcatatagtacttacggcagagaaaagatatggcgggttgtcgtaagtcctaaatagaattcaaacgaaaaagtcatgcttttttactgaagggtacgctgaacagggagctacgtgcataaatatttctttgattaactctgcgaataggtccagcggctacaacaagaaggctagcgcagctgtgctattgattcaaggcggtttgcaacctatcaaaagtaagatacctaagaagtgagatatttaacatggaggttttgggcaaaccgaaaggtcttgcagaagtcctatggttattttacatggacgctccgcaaacaatagtcacctaacaacagtcttatatgtgcgcatatatcgaagtgttgatgatcgcaggctagtctggtttacgttacttcttacatgagatatttttactccatacttatgtttaaaaaaaattcaaatgatttcacagttgcctgtctagcagccactttgaaggattcttccatcactttaaacttctcagcaggtgcggctgtgaggacagcattagcaacattcttgtaggcaagtgaagctgtagcaagtttcttctcatctccttcggccattccgagagcagcaaaggcgaacattctctgcttccacatggcatgttcaatttcagacttttttgctggtggggcagcaaccacaacaacatcaagggccttgttgttggcctgacttgcctcagtcaagcgcttatccataagggcttcgagggccttgttgatggcttgacttgcctcagtcaagcacttatcgataggggctttgcattccacttgcactaacacggctgataccacgatggcctaaaggagaagggtgacgactttggccattgccaataaaccgaacaaggattattcaatgttggaagatattgctactgcgggtggataagttgtttgagtttctagggatcattggtgctttaaatagggaaacatgtaccatgataacctaaagtcaagagagctttatagtccaaaattggttggttgcatgcacatgtgtcaagtgttcagtccgtagtgcattctctcccatgctctctcaccggcttcatctctgaccaattttggttaatgtactgatccatgttgacaagaaggcattcgaacaacgattacgatcccaaatggacaaacagaggaaatactccatatttttcacaattagttgcatgatgctttcacctagcaaaccaaaaaaaaagcgtaaattacactgacggtacacaaatttacgatataggtataatctgatacataaacttgcaaaaacacttgttttggtgcacaaacttatctggtacgtgtgattgtgtgaacctaagccaaatgagcatgctatgattattagtacttagttgaatgttcatcaggatatcatataggcacaagatatgattagactatctagatatgtatgtactcagccaaatgtataataagggacctgagtaatataaaatatagatgaaggatgcaatgaattgaaaacattggtagaacaaaattaaatatcaaatagaggctattcgcacatgtagcgtgtatcatgaccccttatgtgtgctcataccattctaagtagactctaacttataattattagttattgtctgtcgctgtgatcttgtttcacgtattaaacaagttcatgtactgaaacgagcgttttgcaaatttgtgtattaaattgcaccatgttaagttcgtatatcattgatgtaatttactcccagaaaaaaaaaactcagttgtatgagaactataaaaaactttcacatgtacccaggttgtggctgtatacatccttaaggatgtagtggccggattttatttaatctattatctaaaaaacgtgtacccaggtttagttacttctcttggactaatatgaattccaaagctcaaccctcttgaccagaggcatctctttgatgtggtgcaccgtcattgtctcgatgagggtcggtcatagttgctctaagaccaaacaacgcctaggctacctatgcaggatacaggaggtgtttagatttaagggtgtaaagttttagcgtgtcatatcagatattatatagggtgttgcatgggagtattcgggcactaataaaaaaactaattataaaatccatcagtaaacagtgagacaaatttattaagcctaattccgtcattagcaaatgtttactgtagcaccacatcgtcaaatcatggagcaattaagcttaaaagattcgtctcacaaatttagtcgcaatttgtgtaattaattattttttagcatatatttaatacttta

SEQ ID NO: 22721 - DNA, 912 bp, Oryza sativa
gcttaaattttccaaaatcactaggaaaagagcttctttggtccctaggttgctggcattttggtgcctacttttttgctcgctgttgccgccttctctaatcccaagaggggagaaatggagtagaaggctaaaataattcagatgcagctttgctcatggcttcctcaggcagttagggcctaggggtggagaagcctgaagctttgcctgattgcctccccaatcttcttgcctcctctcctttcacttcttctctcctctccgctgtggtttcttgctggttcttggaggcctccacttggttaaatgatgggtgtaggtggtggtcttggtatggaagctactaactgtggtgctttgctcagggagcttcaggtatcctcttgcctgtgttcttgagtgagaatagaattctgtttctttggctgcaattcctgttcttaatattgctaaatgctgcctgtgtcttcctggttcttcttcctgtttggagtgacggttccaggttccctttggttaaattgttcttttatgcgtgtttcttatctgagtttattcagaattcaccgcgtttactggtgaaatattacagtagggattcatttacagattctggcacccttgtgggtttctatcatatctatttgtttactgtccctgagcctaagtttcttcagtgatgttgaagagctcagtgttcttgagcttattcttgttgcacaaaagttagaccttttctttttctttttctgtgttagtattcctcctgtttgtgttgccctcgtttttgttgttaggtgtctcttttgctgcaaagcagtaactttttttttttttggtgtaaggttctctctttttcaccttcctggttcttcagctgcacaaaaagcaatttattgattcgttttc

SEQ ID NO: 22722 - DNA, 720 bp, Oryza sativa
ccccccgagtgcacttgatgcttctgaaattttcgacaagctgagagtcgctccgaatacatatttcaagaacatcaaagaagctggaagtatgggagcaagtctggcgttggcgatgactaaatccctttatccaagagttgatattgacgccattgatggctttgcagacgggacgagcgaagaagctgctcttgacctcatcagtgatgcgcagaaatcggctgacaaaattgctgctgatgtagttgagagatttcaggacaccgatcttcgaccgactggtcctgataattctgatgatgaaaagactgatactgattaatgtaccgataattttgatgattaatgatgatggaggcacaatttgtacaatactgatgaatttatgttgtgcttgatatcttaacttagctcctgatttcttaaaagtttttgtcaaaccttgttgagcctaaaatccgcaaaagttgttaaaaaactttcagtcctcattgactaagccaagaaatcaaacagggcaatgatacatcaagtaagcaaattaaattgataaaaatcacactccattattattatagtagccccctgactgaaaacttcgaggaaaaacttgaagttagcagtcaaagaggaaagatacaaacgaaatgtctaagcgtaaaatcgacgaaggtgttcaatattccaagaatggtgatgatagtaccatcttcgcgc

SEQ ID NO: 22723 - DNA, 6459 bp, Oryza sativa
ctgatgctgaactaataacccctatctaccaggtactcttacactgctgtggttctcaattttagtcagtcatgggccttgtattgtctggttcagttctatgctgccataaaggatgaactagcccatataaagcctctgcaaagtttctgacattcaagtctatagtcttcttaacatggtggcaaggtgtggtgattgcattgctgtacaattggggcttgctaagaggtcctattgctcaagagttgcagttcaagtccagtattcaggacttcattatctgcatagaggttgtcgattcctattttaccgtgacagtgaaggatttcctgtttattcatttagtcatgcttgtgtcttttttgttgtccatttgaaacaaaccctaactagttgttttgtcatccaatacagatgggagttgcttctattgcccacctgtatgtgttccctgccaagccatatgagatgatgggtgatcgtttcattggaggggtttcagttctcggagactatgcttcagttgattgccctctagatccagatgaagttaaggacagtgagcgaccaaccaagactaggcttccccagccaggcgatcgtgtcagatgctccactggcataaaagaaagtgttcgtgacgtcgtacttggaggaggagaatatgtaagataaagatgctagctcctcattgctgtctcccatcaattttacttcaaaatatgtttcttactgtaacattgactgaatcttgcagattgtgaatgacctgaagttcaccgtcaatcatgctgtggaaccaatcaatgaaaagctgcacaggatatcacagaacatcaaaaagcatgagaaagaaaagaagaaaacaaatgacgatagctgcataaattcacaacaatccttgagcagggtaatcagcggtattgacgatcctctcctgaatgggagcttaagtgataatagtggtcagaagaaatcacggaagcatcgcaggaaatctgggtacgggagcgcagagagtggaggagagagcagtgatcaaggattaggtgggtatgaaatccgagggcacagatggattactagggagtaaggattaatgctctgaaacatgaatttcttggtctggatcttccttggaggctaaatgcttactaccacgcaaacagatgacagagactcgaattaggttgaaacctaggatctctttgtgaggacactgcaatgctgcagattgagctagcagatgacattatctccaggttgttcaactgacatttcagatgctagggtcttgatgataaacattgcaggcatgcatgcatcaaattgtgaagcatggcaggttaactaattcatgcttgcattatcagttgtaaaggacagttttttccacaaaagtatataagattctgatttgaggaagaaatgtcttgcaagctttgtttttggtgttgtcaagtttttgttatatgtacttacagtatattgttcattctttcattcaaataaattataaaggagggcgtccttttacctccctggcattagatgaatgatttgcaccgtaggtaaatccaatcattgggatataccgcatttgagttgagttgcgtcagatcatgacagaatgataactgctctgagcttgcaatttctgtaacatcccagttaacgcaaatacatttcaagtggctactttttatcaagaagacaataaatttcaagcagattaaagttgaagaggaaaataaatatgcagttcttttcttatcttttcttcaaggtttcatccagatgtccttgaatcctttttttttttctttttgacaagaaaacatatgcctttgtgccgggaattaatggaaaaagaaccttagttaagctgatcacgcgacagatttggcacaatcacgttgtgctacataacacgcatacaaagtgattatcctcctaggatgctatgagtcaccaaaagcaactgataacaagacgtgagagtaggccctgtttagatgggactaaaacttttaagtccctatcacatcggatgtttgaaaattaattataaatattaaacgtagactattaataaaacccatccataatcttggactaatttgcgagacgaatctaatgagcctaattaatccatgattagcctatgtgatgctacagtaaacattctctaattatagattaattaggcttaaaaaatttgtctcgtgaattagcttttatttatgtaattagttttgtaagtagtctatatttaatactctaaattagtgtctaaagacagggactaaagttaagtccctggatctaaacaccaccaagctgatcgagcaacaaatacgttttattcccccactgctttagctatcaaaaaggccacataattacacattttgacagaaatcaaagctgcttttaccttgtatgcatttgctttactgacagctaacagcagcaagcaacctcatttggatgaaacaagcaacagtgtcagcatagaaatctcattacctttcgcttttgtcttgtattatgatttacaggaattcggtttgtatttatttgcgtctggaaaaagaaaaggaaggagagacacgtgaaggcccatggccaattggcccaaaggctcctgggcacctcctggccgtccacgtggcaggtgtccacgtcagcactttggctttgttttctcctttttttttctcccaattttcactccactgctgcacaagcttttccgtgcttcctcgccgcctccggcctccgctccggcgctataaatcgccgccgatttcgaagctgtggaaatgggagtcgcctccacggccaccgacatccgccgcaatgctgtgtctcacctcctcttcctcctccgcgcccgctccgctccttccctctctcgctgatcgaccgagcccgggaatcgcggtcagtcaatatatagaaacttctatatatgatatgattagttttccctctctctcttgttttgttaggtgtttgggttattgatggtgtggtggtccgcagggcgggggtggcaatgttcgcctgagcgtggtttcttcgccgcgccggtcgtggcctggaaaggtaagatactgttgcaggatatctatcgaattaggaatttgatgatggtgataattaattgtggggaaaacaagtaagtctgaatttctttggccacaggcgacagccccaaaaccccgacaccccaccgccgaccacctcgccgccggcggcaccgctcccctttgccgccgtcggctctacctccttcccactctcccgtccttctcctagcctccctcctctctctctctctctcaatacttttttctacctttcatactaccttccatgttcttgttccgaatctgggttcccaagccgctgatgcgccccttccctgattcttctgatggaactaggggaggctgtgtggccatttttcccgttggagggtttcgtctagatctgtcgggtgtgggacatgcggattgcaggtgctgtcggttgtgttggcggcggcgggtcctgccgggatagttggccgccgacggccgcttggctgttgggttgcacggtgtgtgctggctggtagcgaggatggttttagggtgttgggcgaaagctctgtccgactcatagccggcctgacggcgatgaacgtccttggacatcatgcaatgcccctcctggaggcgtcgtcgcaagagcatctccagtagagaccctaaatacaattcctaaacagtttttaggtgctaaggacaaaaaataaactccagcaaaacccatactacaggtcctaaaataggaaggacctcaaatacccctccgcagtccctaggcctgggggctgtagaccgaggccctatcgccgtttttctacgcgggaggaaatttcctgacgtgtggtgtctgtcttccctcccgcggaatcgctgccacggcgccgatcttcgccagctcgctggttccgccgctcgtggccgacggtgcgaccatccagtacctccaccggccactgcttgtcgtccgcgtgcccgcttgcttgttttttcgtggtccttgatcagttcgcacactgatgcactatatggtagacaagaatgttctgaaattcatgaccatcagaaacatgttctaaacaatcctgctctcgattggtttatggctaactgtggttctaaacgatcatggcataaaaattattgttctgttcctttaaagtttgtggtgcttggtaggttgagacaattaggctgcttgcaattatgcagtagttccttcaaagattattctgcagtgttgttcttttgtgtcagttgtgagttgaagtttaacttcaaggttttttttttctaggaggatttaagctctttctgaagtttctcagatagattagattggaaaaggtatagagttaattttatctattgattatagttcttatttaattgaactacgtagtgtcttgaatacttgccggtaggatttcactcccatgtttgagaattttgaatttgaattatggtatttaaaattatggatttgaatacaattgaattctatacattagaaatattcgtatttgaattattactatgttaaactaggtgtaagcatagagtataatcagaaatacaagagaaaaagaaatgggggctaagaaatagggtctgctggtagagttggaggtaatttttgaattcttagaaaatagggacagccctcattcaacctttgaggactctaaaatagggactactgctggagatgctctaacaccctgttcccccttgctgctgggtgaaaaccctttccagtctcctgtttatgcgatggtggcgtcctttccgacgtcgtcaccttcttcaaggcatcgtttttggagaaaccctgcaaccagtccccctgctttcccatccttctcccctattccatcccctcctcctccccttttcttctgtcaagggctcctatgcttggaaactctcatgtatctcttctctgtaatatattcaggtggggaaatgttggatttttattgattggaatactgtattgggtcatctcggtgacaccaaagctgtactttggtggagtagcaatctttgcccttattgaccggataggattttggttaaatttatctacgtttttgtttgcggttcatcttttttcctaccagtcttatacaagatggtacagtttagcaactgattgttacattgcaatatataaatcgaagtgatagaagccacctcaagtaaatctaactattgttcataattcaaaggtcaagaccaatttctcagttcctgcgactgcgcgaaaaaacaaaaccatggtgactgttgtggaggaggtcgaccaccttcctatatatgatctggaccctaagttggaggaattcaaggatcacttcaactataggataaaaagatacctcgaccagaaatgcctgattgaaaaacatgaggggggccttgaagaattttctaaaggttaagttcactacttcaatttaatgcacaaatactccttcatacaagagtcggcatatgctattttctttgcatcttttaactctttatggttctctcattccatcttttgtaggctatttgaagtttgggattaatacagttgatggtgccacaatatatcgtgaatgggcgcctgctgcacagtaagttctaatgtagtcatccagctattcgctaatgtttatgtgttgtaggaaatatggatcactgatcaagttgtttaagtaccacttcttcattttattttcaatactatgctttgtctggtagcagctagcagaaagttaattttacaacataagatagctcctcaccgccggtaatagagatgttttgagttttcactcatagcacgtcttggctgtttaaggtaagtatcgggggtagaacataatgccatgaagagagaaaattatgttatctgtgtccgattgtagttggttctgaacttgtgaggctgtgatttcttaattgtcgtttttgttaagaccttaccagtatttgcaatatttaatgcatttttttgcggggaaatattcaatgcatttaacttggaggtttttcttcatgcatatagagaagcacagctcattggtgagttcaataactggaatggtgcaaaacacaagatggagaaggataaatttggcatttggtcaatcaagatttcacatgtcaatgggaagcctgccatccctcacaattccaaggttaaatttcgctttaggcatgggggtggagcatgggttgatcgtattcccgcatggattcgttatgcaacttttgatgcctctaaatttggagctccatatgatggtgtacactgggatcctccagcctgtgaaaggtcctctacttgtgccttgaactacaatgtaaa

SEQ ID NO: 22724 - DNA, 670 bp, Oryza sativa
aataaactttggtcaaagcctaacaaaatggaatattaatgacttttgggagttgtgttttgaaaaaaaaaaaggaagatccccgcaaaaaaaaaaggaagatgcttaacagtcataacatgacaaaaaaaaacaaacaaacaagacagtataagtggacaaacttatcccaggaatcctaaaatggattaaaagcaaaccaactaaccatcaaccctatataaatatgaccaagagggcataagtattctaacaggttactgcacaaatgtatactgcatttgaaatggtgagagtaaaataactccaaacatcatggctaattctcaccgaagaacatgcgaagccattaacagttctggttcacctccccacacatgtggcttcctaatccgagagacatatgcatcgaagtccccctcaacaaacctgtgaattaatgtcatagcgaagcataagaatgcgtaactcaacaatatttagatgcagagtaactaacagaataatgaggacaggtagaactaaccattcatctctgcccgtctcttgataaattcatcggcgacctaacagtgacaccatttaaatagatcttttacatgataaattcaccagaaatggctgcgttgcttccagagcaacatttagcatctaagaacagaatggatca

SEQ ID NO: 22725 - DNA, 500 bp, Oryza sativa
tttcggttcgtcgagcactcttttttccatgctttcagtgaaacaagatattttatcaattatcgtgtgttttgctcttgttgatttgtttgtgcccttgttgtgttgttgatcaaaattccctttgcttgtaaacagaaatgccacgtgaagaacaaggatatcaggaagttcttggatggtatctacgtgagcgacaagggtaccatcacagaggatgcgtaaactcctatcttcacctagtatcatgaagtgctgtttcttgtctcccgtgtctgatcatcctctgagttgcaattttctgagagactgaattttgtaatggtgggttatttaggatgtaatggagcatggtatcttatcctacatattgtttctgtttgcgattatgaagtctatttatcatcccctaaagacagtttactggaagcattcgtggttagataaacagcataatgctacttaaaagtgtgagctggtatgttttcccctgcgtatga

SEQ ID NO: 22726 - DNA, 695 bp, Oryza sativa
tagctcatcacatgggatcacaacctgataaccgcaagttcgcaacaagtacttttcagttttacaaacagtttctctgtttctgttcccgcgccggctataaaagcgccaagctttttgggacgctgcagctggagaagacgagaacgcaaaaccaatcagtcgcggcgaacgcggcgggcggaagaggcgaatcgcgtaacgatttttgttaaatttgtaaccggccatggatccgaggcgcagccactgggagagctcgtcggaggacgtgacgaggccgctgctcccgctgcacgacgacgacggcgcggcgggccggcgctcctgcgccgcgctgaggtcgctgctcgccaacaagtacctggcggtcgcgtcgggccccgtggcgtgcgcgctgatctgcggcctcgtcgacctcggcggccaccgcgccgcgcgcaacatgctcggggtgctcgcctgggtgttcctgtggtggattaccgacgccgtgccgctcgccgtcgcgtccatggcgccgctgttcctcttccccgtgttcggcatctcctcctccgacgccgtcgccaaggcctacatggacgacgtcatctccctcgtcctcgggagcttcatcctcgcgctcgccatcgagcactacaacatccaccgtcggctcgctctcaacgtacgtgatccgcgccgcgagcccg

SEQ ID NO: 22727 - DNA, 26109 bp, Oryza sativa
  unsure (1)..(26109): unsure at all n locations
acaatttctggagatgcgtcgacgtaagttcatactgctagcttattagctgcaaacactggcgatctctacattcagatcgatgtacactgaaataatgtactgcttaatttaaaaaaatcgatcgaatcatgcattcattcatatatatattggcaaagcaggagcctgaagagcatataggcgtcgtggatgcgcagttcgttgtccatcgcggtgtcccaacgctcataagccaagtaactaaaaacaatatctattatcccataatgcaactagctttggttaaattatacactactcctaccatatttaattgtgtttttctctccacatatatacagggcaacggagaacaagaagggagcagtgccaaggtaagtcgtacaattaactgtattattctaagtagctactctcttaactcctcaaatactatttgatacggcatgcacactgtttttaagtttaaacttcaatcttaccttcttttaagaatatatgaatattttaaaatatgttatattatcgaagtgtgtatatatagcatcataaatataatcgtacaacttttattcatagtatatattactctttccgtattttaatgtatgacgccgttgacttttcgaccaacgtttgaccattcgttttattcaaaatttttatgcaaatatgaaaatatttatggcatgcttaaagaacattcgataacgaatcaagtcataataaaataaatgataattacataaattttttgaataagacaaatggtcaaacgttggacaaaaagtcancggcgtcatacattaaaatatggagatagtataatctatactcttaaaatggtaaggatggtggtgtctattttgaccgtacatctccttgatacctgggacccaaaatgttggtgaagggatgacgctccagtctggatcaatcggcctctctctctctctgtgcgcacgcgcttcctccgctactggctgccgctactaggggtggacagggagctcgtggctcgttagctcgctcggctcgtgacaagctcggctcggctcagctcagctcgtttgatttttctaatgagccgagctagaagtttagctcgttagagataacatgaggtacttgagaaggtaccatgaggtaccattttttctattgtaaatttggtacctcatgagatacttgaggaggtaccataaggtaccattttttctattgtaaatttggtacctaggtaccatgaggtacaaaattttacactaaatttttggtacctcgtggtacatcctcaaggatcgtagaattgctcctctctctctctctctctctctctctctctctctctctctctctctctctctccgcgcgcgcttcctccgctactggctaccgctaccaagccttcatatacttctcacgtagcctactctctctagcccccttcctcaacccgtgcacctactccctccgtcccaaaacaattcaacctaggatgggatgtgaccctttctacgacaacgaatctagataagcctttattcagcttcgttatcctaagatgggttattttgagatggagggagtatttcagatatgcaagaaaaaaatccaaaaaaaaagttgggtttaggtgccacctactgagcttattgggtctatgaggcaaatttggtctctttggctaggaataagttcactataggtccctcaatctatcgccgagtttgcaattcatccctgaaccaaataccagatataatgggtccctaaacttacaaaatcgaatcactcgaggtcctaagcaatattatattcggtttgttttttttttcttaagggctcattagatatgccatcttttacaagagggcccaggtaaattaaaaaaaaattgagggttatgtaaccaatcaattcaatgtatttacaataaggaaaattatataaaatttactatagttggattaaatatgtgttcaattgttttgataagctaggaatttggcttttgactagttattaaaaagtaatttgtgtactagttattaaatatattaatgtataaaaaaacttgacgtaatatatatattcctgtagatgttaattaatacatatctggtgtgtaaatacgtaggtgagatcccggcagtttgacgagatgcgcaccttctaccgcagaatcgccgacgccgaaaaggctcaagccgacgccacggcagctgcagcagatcatcatcgctgagttattaattaacaattaacgtcagcctagacctctacatcatatatatcgtctcggatgatcaaattaaccagatttagttacaaagaggcaggttctttggggggcaaaattaactaggctcacgagagcacatatgaactagtttagtatacatggcatggttaatttgaaagttaaaaaaacatttgacagccaaagagataatgtgagcactttaattgagaaatcgaatatgggatcatggggttaaaactgcaccctacagtaccaaatatacatctcaagccaaatagtactaaaaacgacttcaattgatttgcattgattgcctcaaaagaaatttgtgttgattcaattcttcctctagctaccttctctttttctcctcttttaatttgactcattgcgtacgtgttgactttatgttgattaagctaggtctcgtttaatttctgtaataaatcagttgaacttctggtgtagtaatatatagtatctacacaatattggtcggttcataatataatattatattgtttgttgttgtcaataacatactccctccgtcccaaaaaaagacaaaccctagtttccgtgtccaacgtttgactgtccgtcttatttaaaaaaattatgaaaaaaattaaaaagacaagtcacgcataaaatattaatcatgttttatcatctaacaataatgaaaatacgaattataaaaaaatttcatataagacggacagtcaaagttgaacatgaaaacctagggtttatctttttttttttgggacgaagggagtatggagtatggcttaatttgtcaacatgtacatgcatggctacgtgtcgagagaaaggaaaagcatgcttgtggagagaaattgcttctgctatagctagcacttcatatttgacttcagagcatatatagtaatcttcaggtttatagactaaagtatagttaaattcatggctttctaggcgacggctgactaattaaactaggccggccggtttccgaaccaggcaagttgtgtactatatatactagtagtactaattgaccgattaattcattggttcacagagattgagtacatatatatgcttgataccgatgaaatcgatggtatatagcagcagactcaacggccggattcaattataaaatcgacattatgttcattgtatttcatgctgagatcgatgatggctttttccaataatcaatcatatatgtgtgtatgttgaccttggagcctgtgctggtcaatgccaacgatatggttgatcggactggatttaatttgtcgcttgcttaatttcaccctaattaaacgaaaccctcatatatagtttcatcatcaaaatccgcaagtgcgtgcagcatgcatgttaagacacagagaaatcaacgtctgagtgcattgattgagtctaacctactccctccgttccgaaaaacccaacctagaaagagatgtaagagatgtaacctttatagtacaacgaatctggacaaactatagtaggaggggtcggttgggtttttttggacagagtactctcttcttcttaaatatgttctataatctagtatgaaatgtgacacattctataggcttctatctagatttgcaatatcataatttgtatcacattttatattagattaatttattctgtgacagaagtagtacaaatgactagatcttaattaatgtgcacatttgcgagtggtgacctatctaatcaatttaaccaccttggcaccttcacatgaaaaaaattaaccaccttggtttatctgaaaaataagcattataccctagctatagatggccaaatgggccgcctacatggtccggcccaaacacaactaaggcacggttcaagatcagttgagcccgcatggcccgactgacacgtcgtgttatgcccgctcatgggctgcacctatgttctaggcatgacgagcaaaacccactgtgctcgtccttggaataattatatttcgcctccctcatctctttatgccgtgccttatatatgactggaataagtctatttacctcccttatctctttgagtcggccgccaacggactacagcctgcaggagcgggggatgtcgggctgcggttgtgctgatcgttgggtcatgccgtgccgaggaagagtcccaggtacaatccaacggccgggttgggccgtgctgtgtttgggttgggccaaatctctgtgtcggacgtaagtcgggccgtcggggtacgagcctttggcgaactggctttaatttgtatgcatttttcctaagctaataaagtcaatcttacctgaaaatttaatttaacaaagaaaaccctgatacacagtaggttccattcgctgcggctggcgggctgcagcagcaagctagcacatacggtttttcttttctttttcttttttttcatttgctgctgcagcatagccacagcgctgtcaaagattgggctcccaacaaacgcataaatacccacactgccacacagacgcaaaaacaaatatactacatttgtcctaagttcaacatttcaatatttataaattcatatagtttaacatcataagttttatattctcaaaacttgtcgtgagaaatgctttcttaatattcagttcatatgttgttaaactatacaagtttctaagaattaatggtttggtatagaaatatttgatttgggataaacctaaaatgatgtactaccataataaaaatgtccagtaccattaggttggaaagaaagtgagcttagagcacaaccaaattaatctaactagtgttgatttttttttaaaaaaaattgctagtgttactaaatttctagtgtgtactatagtagtatatactaacagttagcagaagcaatagttaaactgctcacagttgtgtacatcaaatttgtattagtgtacattaaatctcacgctagtacttgatggactctcattctgtcgtgcttaatacagcaacaaataaagtcaataagcgtaagcgatgaagaaaatggatggtgtggcagagatattaagcaggaagaacacacaacggctcttcttcaattcggagatgagaatcagacagacaccaccgagatcgacgcgatgaagacgatcgatcgccgacggcagccgtagccgccgccgccccctaagccggccgccggagcagccgcctccatcccctcgcgaaccgccggccgtacgtgcaaccttcggtatccaaatttacagttttaaaaaacctacgcacttttttattcaacagttatatactctcaattttaattagcacaccactgcttaagtcgttggtaggactaggagatccttttcattaaactagtggatttcccgcgtaaatttcttggagccttgattttcaaagcagaataggattcgatatacaacttttagtttatgtttttcgtttgtacagttgtagccttttatatacagtaggattttaaagatatacatgtattgggtgtacaatactttttttttcctcatatgtagtgtgcaactgtattttatatacaactttatcaatcaatttgtacggttataatctaaactcacaatgaccaaatggtgtatatcttttttattctctgatatgattaacctggtaatttctacacctccaaaacagagatggcggcttctttttttagctatcttagtaatacagtataatataagagaaattttacagtacttaagaaagtaactggaggtatcaacttttacactacaaatgtcatacattctcaaggatgataaaaattacccataacataagtatgataatagatacaaggtagataaaactaggtggtgtttggatccagagactaattagaagtattaaacgtcggatgtttgaacactaattagaagtattaaacgtagactaataataaaactaattgcataaatgtgagctaattcgcgagacaaattttttaagcctaattaatccataattagcacatgtttactgtagcatcacataggctaatcatgtattaattaggctcaatagattcgtctcgcgaattagttcagggttgtggaatgagttttgtcattagtctacgtttaatacttctaattagtgtccaaacatccgatatgacagggaataaaattttagtccctgatccaaacaccattgtttctgttactggtagggaccgctgtaaccattgtcaaaagttaatctagagaagtataataatataatacgtgcagaccttgagagcaatgctggccttactttgtgtgcaaacttgctagctagcataccttatgaaacaagttgcagagtagctagattgtaggatcgggagtcagctgctttgagtgcaagtgtaaggaactcaactccatacttcccctgcataagttagccggattctactctatcaatcatgttattttagttatccctttatttcacaaccaaatcaaggctaaacagcagtccaagcagagtagcttagccagccagcataacaagtcatatataggtcagtcggtgcttaattttcatcctctttgcatacctgcacccgtgtacaggacgtcaattctgtttgtgcctgtaagtctgcagctccttcttgttttccttcttgtgtgtactgctgccattgcctgaatgttgtttggttgctcctctgaaacatgggttttttacagttcagttgggtcactgaagagtaaaagaccttgttagcagacagcgaacgcaaactgcgctgtttaatttacttgcagttctcaagagaaataatgtgagctcttaccactctcttttcttgatgttttcatcttttcctaaggactaactaggtgtactaactaacatttgagatgatcttgttagtaaacagtgagaatgagagcaaaccccattgtgaccgcattatctgcggcggtatttggattcttcattggcatttcttttccagtacagatcacaccacaggtaatagatagatacagtatgtactatttatgatatctgtttttgcccatgaaatttgagagatgatctttatctgatgaatcaatgagtctccttttgtgtgatgcatgcagcttcagtgtggcttattaccttgcagcagtggtgatggtgcgaactacagctttagtggcagcagcatgataggcatactgtggtcaccattcagaaacaccactatcctgtcaaatggcacttcagaggtaaaatttgagagcttctagtttctcagctggtagtagataaactcattatcttctgttgtttgatggttttagaatcctgcgttgacaaagccgaaaggtgcagagaagctaccaccaggattagtagttacagagtctgatcttcacatgagacggctgtggggatcaccaagggaggtaggcagctctctgaactctgattctggtttgttaacttaaatatggacagtaaagttgatataagagcttcatatatgtgtttgtgcactgatcgatcatcaggacgtggcgactggcaagtaccttttggcactcgcggtgggatactctgagaaagccaatgtgaatgcaactgttctcaaggtaaaaggaattaagattcaggaagaggcaggaaatcatctctctgaatgtttttcttgcttctggtagctagcactgcatctctgaactgaacatgtggcgtttggatgttcagtttctgaactttaccatatgtcgtcagctgtaaactttaatctcagaagtgaacaatgtgcagttctctgataagttcgacgtggttctgttccactacgacgggcgcacgactgaatgggatgacttggagtggtcgaagcaggctgttcacgtcagcgccaagaagcagaccaaatggtgagcactgagcagcagcattatgcttacagtagtactccaatctgtagctgatgggctaatgacaaatgattgatcgaaggtggtttgcaaagaggttcctgcatccgagcatcgtggcgccatacgaatacatcttcttgtgggacgaggatctgggagtcgacaacttcaccgcggaagagtacgtgtgtgtctggtttctgaactctgaattttgcttattggagctgatcaagtaatgtgttgtggcctttgaacaaccaaccaaccaacaaatcgatcggaaacacataggtacgtgaaggtggcgaagaagaatgggttggagatatcgcagccaggattggacagcacaagagggaagaagacgtatgaagtcaccgttcgaagaaacgacggccgggaaatgcacaagtaagtaaagcagctgaaaacgaaccatggaaatcgatctgaagaaattcaggctcttgttacttcagtagagacactgactgacgcagacagtttgtgtgtggtaaaatttggaacaggacgaatgagggagggcgttgccctgatgtgcaccaacgaccctgcagcgggtgacatgaatttcctcttactccactactactgtcttatttggtctctgaaactcctcgagtctgaaagacataacgatcgacacgcaggttcgtggaggtgatggcgcccgtcttctccagggaagcctggacatgcgtctggcacatgattcaggcaagtatatattaattcattcacaattatttctcactaacacttaatttcaaccaaaagtaaacgagccaatggaactgtatatgcttataaatatgcagaatgacttggttcatggctggggtctggacttcaatttctggagatgcgtcgacgtaagtactagtacactagtgttcattcagatggtactactactcaaatagcttgctgaagaaataaggttaaacacatgatcatcatgcatgaatggcagaatcctgaagagcagatcggcatcgtggacgcgcagtacgtgtcccatcatggagttcccacgctcattgcccaggttaataaataatttcttcttaactgtaatttgcttgctcgttactgaattcagggtctcctttgtttgtttgtttgtgttactaatcaatttctcgatctctttcttcagggtaacggtgaacaacaaggaagcagcgaaaaggtaactcagtaattctttagttcaatatgaaatgaagcccattctttgcaccaatatgaaatgatacagtaattactactgttgtagtacatagtgcatgcatgttaactgaagaagcattctattagtgtgtgattaattaagtattatctaaagtgttcagttgaagacgtactccctctggttctatattaattgacgttttagacaaggttgaggttaaacttttataactttgaccatcaataattttaaaaatatttagtttaaagaaactagaaaaacatatatagatttgtctttcaaaacactataataaaaataaacatgcatttatttattgtatatattataatagaaaaacaatgtcaaaggtatatcttgtagagcgtgttattgttcaaagcatcaattaaaatgaaaccggagggagtaatcgatgatgttaattacgtgcgtgcgtgcaggttcgagcccgacaatgggcggagatgcgcaccttccacgacagaatttccaacgccgaaaagaagcttggggattcgtcgcaggcactagaagagtatcacccttgaacttggacatatgcaaccaccaacacttaattgtttgcatagttcagcactggcatcacatgcatctttttttcccaaatgaaattaagcgagaatatatatatatagagagagagagagatggaggcatatatccctagctatatatatacgcgtacatgctgaagactgcgtgaagaattgaagagatattaccaaattaactgcacacacttccttttcatcattgattcttcccgccatttttttttgtgaattatctatggtcactgaccgatcatgtatgaattatcacgcgtttgtatacttttcatggtcaatttctctgaaagagatacacacagatatcttaaagatggtgaaattgttgtatttttatgtgtcgacgtttgagaccataactacagtatttacatggtatgagaatcgttggtactagggtatatataagattgagataaaagagacaaagaaaaggattttttttatatatgttcggaccccttcatcggaaggtaataacctaatcctgttggccgaagccagtattggtcttatttatcagaatcacacaagtacaatacttaggataatcaatctagtcatcatcgacttggcgacatagaacaccaacacgtagtcaacaatggggtaatcttccttctcgaatacgtactcggcgatatcagagatagcgttagatccatcttatcggcatgacaccagattggatctgtctagggtaatctaatatctgatgtcaatgtctggtggcgtgtattggtatctattctaactgagcttgttgatttattcgggtttgtcctcccctccctaaagggtcttgtatttatacccatatatatcaccttgtccaaatagaattagagagacaagtataaatacaattcgagtagtatttataattttcatgtggaactctgcttgtcatttcttatccgaaacttcttctatatacgaggtatgattctgtataaaacttggtatataatgggtcctgccgagcttaattgattattattgtatatgtgttattcataaccctaacaatggggagcccattaattgaagaaattaaggtgataaatgttgagcctttaatcctactgctttgtagtattgtgtagtgtgagtagcgtggcatcacattcacaaaccatcagctagctgattagaattttagggcccctttgaatcaaaggaattacgaagaaatttcataggattgaaatcctataggaaatttcctatgtagctctttgattcaaaggattgaagttttccaaatcctacaaaattcatatggaatggcttatagcatataggttttggaggaaacttagcaagagttccaacctcttggaaaaaatccttcgattctatctcatccgattcctatgtttttcctatggtccaatcaaacgatcattcctgtgtttttcctgtgtttttgtagcgcccgttccgtcgtggcgcctagcgggaaaactatctcttaaaaaccctaattgcgaaatctgtttctttgcttgttgtctagtgtccgtgtcatctcagatctcaaatccccgatctatcgtcaagttcaatcccgaatccaaatccttcccaaatcaaatccctccccaaaagtctattttgcctccctcgggttcgatgggccgaactcctctcggcccatctctccctccctccccatctctccctctctctctctccccgctctgcccgcgcgccgcgcgtgcgtgcgcgtgagccgcgccgagccgagccctccctctccgctctcgctgcccgagccgcgccgcccattgcttcccgcgcacgcgtgccgtggtggccgaccgcctagtcgtcgccgccgtcaccctctgccgcgcctgtccgcgcctgccgtccgtgtcgccgctccgctccacaccgcccggccgtcatcgccgtcgtcatcgactcgaccccgcctctccccgcgcgtgcttccaaggaaaggaggcagggctcctcctcatcgccctctctccctcctccttttcccaaagtggcaagggggcaagccccctttctctcccccctttctcccttttctctcccgccggcgtcatcctcctccccccctgtcgccgtttgggccgcgaccgccgagcgctagccctctcccttgaccgccctaggtcggttcccaaaccgacattgtcgcccctataaacccaagctcctccctcctccatttcctcccccccccctcgttttcatctctcgccgccacaccctgtcgcccctgttccgtcgtcgccgttcgtcgtcgtgcgtgtcggaggagccggcacgagcaaggacgcggaagcggactccgggcgtgccctcttcttcctcttccccggcccgaggccggagagatcactcccgtgccgtcggcctctcgtcactgcgccccgtcccgcatggtagtgcatccctccgttctccctcctcgctccatctcttccccttagctttgagtagccgctcgagtagtaccccagtagctagctggcgccgccccgactgctgccgtcgctcgccgtgtgctcgccgccgtcgccgcccgagctcggaagcgtctctcgtcgccggcctccctcgatgcgtttcctcctaatccggcgcaagagatgggttcccgtatccgcgtagatgctctcaccgccgggaatcggcccctcgtgacctcgtcgccgtttcccccttttctctccgtcggttgccaccgccgcaatccgccgccgacgaactcccttcggcgaatccaagccgttggcttgctccctctcgttctccctcgtcatcccggtgtacaccccgtcgcccctcgtcgtcgcacggcgttccggagaaaccgccgccgcccgccgtccattcgcggccggcaccttcgtcttcctccagccggcctgcgtggcagccacgtaggcgccacatcggagccacctcgacacgaccggatcggctgacccggccagccgctccctccgttcccccccggtgcgcatggtccgcagtgagccgtgaggctgcgcatgggcccgccgcaccgcgtcctccgcgaaccgtgcgcatgcgccgcgcctccctccccaaaccctagcacgccccgcgtgcacctcgctcacgatgagccgagtcgccgacaagcgggtcccacccgagaccacgcgggatggacccggcccaccggctctctctctctctctcctccccgcccgcgcgcgcgctttgggccgccttcttgggccggccggcccattaagctcggccgggccgcccctttctctcgggccgcgccctagccgcccgaggaaagtctaatttccctccctccttcttttcttttcttttctttttcaaaaaggatttaaataaatccttttcctttagaccaaaaatccaataatcttagaaattcaatatcttcccaaccgtaagtccgtttgactccgttcaacttccaaaattcctcaaatctcgagatctatttaatggcacacttagaggtcaataatagggctttattttcgccgttggcttagttgtcccgtttcgcgtgtagtttcggagcccgaagacccgcagtgcgaggatttcgaggatcaagctcaagatctcgagcgaggcaagccacctttgaacatcttgagcctatatttgaacttaattatgttgcttgaaaaatattatgcattgataggattgcacttaatctgcttgtcccgtctgcaaggcagattggcggacctacctaacttgttgcatttgacccttccattgtaattgttataccatgttcccttgtaaccgcctagttgcgcctcagtaatcgtgcactctgcacgagtatcgacggtcgccttcaaacttaaaatctgagaaacatcttgggtaaaacttgggttttacaaaagatttggaaaacccgacacctgggtcggtgcttgcgaacctaaatgaatttccaaaatcgcggaccggggaacgtaccgggtgtatggtttcccgctcttgcacttaaggaccgtttccttggaatttcatccgaacataagacaagtacgaccacatgggtggaatgggacacccctggctgagtaactagctaatcgggggagccatgatgccaagagacatgtggattcaacgggatggtgtcggggaggacccccgggtttcctggcacagtatggtctgggacctaatctggtgttggtctgggacccctctcattggcatatggtgaacctgtgtcggcttttgaaatgccttgtcataaaagccttaaggtctctagtcgtggctgttctgcacgggctggatgatccgggttagtaatgtcgtgtgggtaaagtgtaccctctctgcagaggttattaaactgttcgaacagccgtgcccacggtcatgggcggatgtgaggtgattcctagcgtagttttgtttgactactgcttgtgaaatttgctgatgtggtttgggttcgatgtttggaaaacctgcggctgatgggatcagccaggcccgggtggccgtttaaaagccgttggccgggtgccaaccttgatcaattcaaaagactgataccttgcacatactccgaccggacaagacgcactgtctcatccgtgtcgtttgagaagcactcacttagttgtttcagaaaagagtttaaataaaatcaattgcaaaaacaacagcctttccttgaagcctgcattaaacacttatttcccatggcttgctgagtactcccgtgctcacccttgctctatataaataatcccccccagttgctgaagaagatgaagcggatcccgctgacgaggagttcttccaggagtaagccggctacgatgagttttagggtttcggcctagttcccaagtcgcgcctgtgatgtctggcccaagtcttggcttccgctttccttttgtaatgcagttgtgagctcgggatctgtccgcagcccaacatgactgtaatcctactctataataaagagacctctattgctgtgatattctgtcttcctgtgataccagcactgttacctgggactggtatcgattaacaggttaatttggagcgtcatgggctagttccgctcgggactagttcggaacgtgacagttttgcaatcctctgttttacacttacatttctatcagaatcctatgttttttctattcctctgtttttttattcctataattcaaagagacccttagtgcctgtttgtttcctcttcgcctttgcatggaggaatacttttaccacccttgcagacaacgtaccacagattccacacaatattgatcatctctctctctctctctctctctctctctctctctctctttctctttagttaattatattaggacctacctggattaattagtttgataaagtcgtaattgtaatacagcatgcatgcagctgctggtatatatatatcgcccccatagatcatattgataacgcacaacaaaacaaagatagaaacaaagtgctgttgaattaattgataaaagagtactagcacgcagtaacaatataacgacgtggaatagctcctgttctacgaagaccacactaacttgctctgaccatgactgccgtgtcctacacattaatccaagctataattacttgattcttaatttgcttacaattccttcaactactaattaagtatatcaatatattgccggcacaattcgcacatatactatatatctagtctaatggaattagtggagtatagaaatgcttgggaactttctcaagtctttcatgcatgcagatatatattctctatagataatatgctccggatatgcaatggagtccggaccaaaagtgtggatgcatgcttaattggttcgttagttagttatcttcaatcgtatcgatcgatcgcatcaaaatagggatatcatatatcgatcggatcgatcttgatttttttttcctctcttcatccatcgccgccatgcaggcgcgccggcggcacgccaggcagtgccgtctggtcgtcgccggcctcatcatcgtcaccacgctcctcttcttcaccggcgacgcccctcgcgtcttcatcgacgcgcccacgcagaaccagctgccgcgccgcctgccgctcagcctcgccgccgtccgggaggccgccacatggcccgccgacgccgtcctgctcccggactgggaggtcctcctgctcctgcatcccaacgccaccgccatcgcccacaacgccacctgcgcgttccagggcgccgcgtcgtcccccgcgcgcgcgctcgggaggctgccgtcctcgggccgccacgcctacacctgcgccatgccggagccggcgcgccgccaccagccgttccacgcgccgcggatcgtggctatggacgccgtccatgcctcaccgcatgatgatgatgagctggtgatgatggtcaagtggagcggccgcctcgtgtacgactcggtcgtggtcgacggcggcgacgtgctcgtcttcgccaagggcgtcaacccacgccagggagtcaaccgcccggcctcggacgtaaggtgcgtctactaccgcggccgcggcggcagcgccgacgacgtggtggcgtcgctccccgcagccacgtcggcgcagcaggtgttccggtgcccgcctccgccaccagcagcgttgctacgcgtgacgctcgccctcgccggcgaggaggagcccatcccctcggtggcgacctacagtctgcctccagcatcggcggcggcgacgcacaagagacgacataaaatctgcgcgtgcaccatggtgcgcgacgtgggcaagttcgtgcgggagtgggtggcgtaccacgcggcggtgggcgtgggccgattcatcctctacgacaacggcagcgaggacgacctagacgagcaggtgcggcgtctcacggcggagggcatggacgtcaccacgctggcctggccgtggcccaagacgcaggaggccggcttctcccacagcgcggcggtgcaccgagacgcgtgcgagtggatggcgttcatcgacgtggacgagttcatcttctcccccaactgggccaccgccgcctccccatccagctccatgctccggtcgatcgtcgccgtgaagccggacgtgggacaggtgtcgctcgggtgcgtggacttcgggccgtcggggagaaccacccacccgccggagggggtgacgcaggggtacacgtgccggcggcgagcggtggagcggcacaagtcgctgctccggctggaggcggcggagaggtcgctggtgaactcggtgcaccacttcgagctccgggaggggaagcgcggcgagtggaatcggcgggcgcgggtgaaccactacaagttccaggcgtgggacgagttccgcctcaagttccgccgccgggtctctgcctacgtggcagactggacccaccgggtcaacctccagtcaaaggaccggacgcccggtctgggcttcgacccggtccaaccggccggttgggccgccaagttctgcgaggtgaacgacacgctgctccgggacgtcacgcggcggtggttcgccgccgccggcgagagtcagctccaagcagcccgttgatcgatcgtgcgcgattaggagatcgatgatgatgcttcattattagcgcgctacaggtatattacatgcatacaacagacaattaattaaagattgattaggtttgagttgatcgaacaactcaatcgttgattcgttcatccatttttcctttttgttggttgtttttggcatgtatatatacagttggctaaaaaaattttcttcccaaaggaaataatatatatgtagcttagctgtagagattaaattaacacgcatggttatgaactgtatgcgttacagcaggctgaattcttttcttgctgcaacaggcaagttaagtatagacgcagggtacaaaaggtctctcaaacgttgaatatacacttcattcatttgtttatatgctcaaatctcatccgctatatatgtatatatatatacgtatacgtatatacatatatacgtatacgcgtgtgtgtatgtatatgtatgtatgtatgtatacatagatatacatatatatatatatatatatatatatatatatatatatatatatatattctattaatcctagtggacttaggaacaggaaagagaaaaagatatggagaaggtactgtgaaaaacgaaggagaaagagaaagaccagctagggcagcaggaaaatgcccccctgatagagaagaattttcatataactatataccaggacaatataggcacatgggtactaagagaagagactttgagaagcctgttaaatttcaaaaccagaggagtgatggtgctatattaaatttagccgcacatgaccctattgattggcctaatattattaatatttggaaatgtttaatagttcaaaaatatatacaaaaccagcacaatataggaagtaaagttgaagatatgataacctacttagaaacatttttaggtgaatctgctaaggttctatgggaacaattggttgaaaagaatcctaataattatgaagaattgaaaagagctggtagcaatccgcataattttgcaaatgttatatctaacattattatagctgaagatccggaattaggttatacaactttgtagaatgaaagattaaaagaaatagaaaaattaacgttaacaagttggaaaggcataaaagaattctcccaacattatttatataatgctacaactgctaaacaaggatataacaggggaatagttgaacgttatttcaataaattacctgacccactaggaagtatgatatttgaagaatataaaaaggaaactgaaggagctgaaatcaacatctcgcaagccataacttttgtgtttaagcaactaagaaaaatatgcacgggtatccaagtctaaagatctatgaaacactcggattacaatttctgcaataaaatagttcaaatacccttgtcatatggagaagacaagcctagaagtaaaatgatttataaacatcaaaatagaaacaacaacaacgaagacaccattcagagcaaagcttccaagcgcgctctcaccctccattccaccgttcttagtagtagtgactttagcctaccttgcatagtatattgaagcaaggagttgtgttataacgctgtgtaaggtaagaacagcttgcttgtacttaccttcgggtttcccgaaagggaaaaccgtatgtaagcttatctgtttaatatgaagtaattttccttaagtattcctgcacgtttgttctaaacaagtgtttatgctaaggaccctataggagaaacctctttggtttgttctcgtttttagtctgcatcttgcataggcgtctggagaatcggtatccgtagagaagtgttcccttctggtggaactgcctggggagacgataaactcttagctagaacaagtgtgacttggaatatctttttaagttgcttctaaaaagacagataggtaaggcatacggtgagtaccgagtaggactttacatcatctgaaacaagcttctgaggctgtctaagtaggattcgccaccctgcaaagatcctaaagttaaaatatctctcgaagtgaacagtattgaacagtaatttgaacagtaaactgaatagtaatcagccgaataaatagtgttcttgaaatattgtatattgtctgaagtatagttatatatatatatgtgtgtgtgtgtatgtatatgtgtatgtgtatgtatatatatatatgtatatgtgtatgtgtatatatatatatatatatgtatatgtgtgtgtgtatatatatatatgtatatatatatatatatgtatatatatatatatatgtatatatatatatgtatatatgtatgtatgtatatatatatatatatatgatacccatatgggactccatggtgcccaggctccaaggtataaaacacacaaattctctcaaatttttaaaaattttcaaattgtgagtatatacctaggtatatgaatttgattcatacatatacctaacaacaaaacaactcaaactcaactttatttcacaattcattattacatacctaacgaattatatgtttgaatgttatatacctagaaccaaaatctaaccaaaaaaagttcaaactcagttcaaacttgtttgaacttgttagtaaagaagttaatgttcatatctaaatattttttaaaaaattcatgctcattcaaattgggtatatactcaatttgaatcttggagcccatactccatgtagcaccagttaatttacctatatatatatatatatatatatatatatgtgtgtgtgtgtgtgtgtgtgcgcgcgcgcgcgcgcgcgcgcgcttgtacctcgtgctttggtttaggatgagttgtactaatttggcagcaaataatttgggaatttttgtgttgtggtgtagttatactgtaatcacattaaaaatctcttacatgtgaatatgtttctatctctcctgctccctctgttccaatatacttgcattcaacctttttaatcaaaatgtatgatttctacattctaaagcaattttagaggtgactatgtattactccacaatacaacttttatgtttgatttgaaaaaatattgctacaccttatttgccacgagattttctacagtgccaagtaaatttaaaagtaaaataaaacctgtaggggtgatatgaattactaggtccttaaaaatattgcacgtttatggcctgttcagattgtagccaaaataaaccttaccgaattttggataccaaaatttttccgatttggcaatattgccaagatttcttatttatttatcagaatttggtaagaaaataaatagatggacatatttggtaactttactcaaaaaataatatagtttaaaatgacattaatctgaacaagcccttagatctgtaaactcaaaaagggccatataagtgcaaaaaggcaactgaaaagtgaaaaggtccatatgtagagcccgattatactagactggtccaagtgtgcgtgttccgatgaagagaggagcccacacgataccggcctgttttaagtctaatattgggcctagtagccttatgctaggatggaatataatatgggcttttcggcctgcaacatttgttggtaatcgtaggcccatcccattggactgacagacatatagacatatcagtaatcagtagtctactagagtattaatttggatttgtttgccaacaaaactttgtggtaattcttgagaggcttatttgtgttgtttttttgttgagtgtgcttaattgatatatgatgcacacaggccggattaagtcatcttatttttacaacaatgaaagatgtactactgtctgtgcttttgatgcagacttcttgacgtgtgaatgagagattaggaagaccattccatgacaacattgctgaaggatacaaatagaagccgtgtatatgaaaaaatgacagtatgtacattgattagtatagcaaaaacgtagcattgtgctatggtttttgtgtttcatgcggctaatgtagatgctcactgcgctagtagtaaggtactccagtacattatggaatatacaaagctgtaatactcgtatcagcaagagagaggcacacaagttgtagcagtagcacaggattagaaaaacgggacgacaaatagtaatggaaaaacaaaaaaaaacaaggaaacacatggcaatataaatggagaaatcacaagaggaacagaatccgggcaatacgctgcgaaagtactcgtacgtaaaaaaaagaggcgcattcatgtgtggacagcgtgcagcagaagcagggatttgaaaccactcaaatccaccactgcaaaccttcaaacgaggccatggtttgaagcatagaaagcacaggtaagaagcacaacgccctcgctctccaccctcccacccaatcgcgacgcacctcgcggatcggtgacgtggcctcgccccccaaaaatatcccgcggcgtgaagctgacaccccgggcccacccacctgtcacgttggcacatgttggttatggttcccggccgcaccaaaatatcaacgcggcgcggcccaaaatttccaaaatcccgcccaagcccctggcgcgtgccgctcttccacccaggtccctctcgtaatccataatggcgtgtgtaccctcggctggttgtacgtgggcgggttaccctgggggtgtgggtggatgacgggtgggcccggaggaggtccggccccgcgcgtcatcgcggggcggggtgtagcgggtgcgaaaaggaggcgatcggtacgaaaattcaaattaggaggtggggggcggggcccttggagaataagcggaatcgcagatatgcccctgacttggcttggctcctcttcttcttatcccttgtcctcgcaaccccgcttccttctctcctctcctcttctcttctcttctctggtggtgtgggtgtgtccctgtctcccctctccttcctcctctcctttcccctcctctcttcccccctctcacaagagagagagcgccagactctccccaggtgaggtgagaccagtctttttgctcgattcgacgcgcctttcacgccgcctcgcgcggatctgaccgcttccctcgcccttctcgcaggattcagccatgaagggggccaaatccaagggcgccgccaagcccgacgccaagtaataatcaatctattctcatctccctttaacatctctattctatgttcacgccgtcgcagatctgttgattttcgccgccgcagattagattttgacttgatttttgttggttgcaggttggctgtgaagagtaagggcgcggagaagcccgccgccaagggcaggaaggggaaggccggcaaggaccccaacaagcccaagagggctccctccgctttcttcgtttttatgtcagaccacttccccgattttcttctgccttcttttttttttttggaggggattttcgtttgatcttgtttcgctcagggaggagttccgtaaggagttcaaggagaagaaccccaagaataaatctgtcgctgctgtaagtttttcttttttgtttcccctctcgttcgtaaataaaaactccactactagagtctctggcttacaattacaattattattattagttgcaccgcttattagatgttgtatcatgattcgtggattttattttttcaaaacaaaaaattcaggtaggaaaagcagccggtgataggtggaaatccctgaccgaagcggtgagtttcgtctcgtcgcacatagagatagtatgatttatttaagtgttagattccttgtgcccaagcttatatgtagccatggctgtttgattctaggacaaggctccctatgtagccaaggccaacaagctcaaggccgagtacaacaaggccattgctgcctacaacaagggcgaggtataaacaactagattaccttgtatgcttgccaccgcgtccaatttgtttattgttctaaacatatgctctggtttgtttgttcagagcactgccaagaaggcacccgccaaggaggaagaggaggacgacgaggaggaatctgacaagtccaagtccgaggtcaatgatgaggatgacgacgagggcagcgaagaggtactacatacataatccttgtgatcaattcagaaaatagtatcgcattagttcgttgtgtgaagcttagctgactatgcctgaggcttgtacgattaggagtacgattcacactttgattaggctaatgcctcatgggtagatatagaacaatagttagtttgagagatgtatacaaataggctaatgtctcatgggtagacagaagaacaaataggtagtttgaaagatgtattttcaagtgtgacattctcaaaacggaaactgatgaaattaaaaatggttttggggattgcaggatgaagacgatgacgagtgagccttccagtggacaagatgggagcagcaagacgctaagggcggcgggcgtcctaaggagcctatccatcatcatcatcgtctactagaattattcagtttcacttcacatcgtgatgttttactttttctctcgtcctataacggatagcgctccttgttggcgccactggtgggtgttgtggtgcagccaatgtcttgtctccaccgtcaatgatccgcttgtacctagattactctttccattgtcatcggctaacattgtgataatatcagtttgcgtatgttagattaaattgtttctaattccgtcgttttcttcttccttgcacttagcttgtgataaaattgctttgcggtaggtaggtactccgctagctaattgtggtcgatcgattgcttgtttgattgcggatcacactagccagtgttgattttaagatttgtttttcttgatgctccttgtctgtgcgcatgttgcctacagtattaataggctttgaaggattagtctgactgaccctccttgagaaaatgagatgagatgagatgtgtatgaacaaggcaacgttgctgtttgtgcattatagtgggggctaccacacgggtttaactccatctttcgagtgagatggagttggttgatgattattgcaaagagagtattgcaagtaatagtagtaatgaaaatgcagtggttgggattttccattttcttaatcggtggttgtggtgttttggtgaaataatagtgagtgaggtacaccagtagaagaggtttcggcaggtctgtgtcctacggattgccgacgtcttctttggtatgatatggtttggcctcgacgaagttgatgctgcctcctactatagatagttgcaggatggttttgaagttgatgtctcctggtccctccctggcctgtgtgttgcatttgcaattttgcattgacgatgcatagcacagcacggaacggaggaggcaatgctgcaggtaggagtaacaacgtagtagggcctctggctggtgatggagtgagcgtccttttgctgctcgaaatttacatcgactgtctggattggtcagcacaggaaggagccgttagatatgtgaaagtgattatgatgagtgaggggactactatacgctcctacggcggattcatttcgtttcgttggccttgtctccatgcaccaatcaatttgacgccgatgtttaaaatactcgtctatttattcaatactccctccgtcccataatttacaaccgaccctagaactacgaatctggacataagggaagtagtaacattatgggacggagggagtagtaccagtacatattactactccctccgtcccataaaaaacgaatctgtcttcgtccgttttctaaccaggatttgaatctaaataaaaagagttaattgaattcatatatcatatcataaatttacatgttttaaaaatactcttattatgtactcgctctctctagtcctaatattgttgacgttttgaaatgagaaaaatcccctgtgtacccttgaaagttcacctaatcccttacgtacccatgaattttagtttggaccccttccatgccctttccgctagttgaccgttaaattcttatgaaaaagtctattttgccctttggtataaacaagcgtataaattaatggagtatattgttggagcatagaaatttgttatatgagactattatgtttataagatagttatgcaccatactatttgcgataaacatacttttagatatgaaataaaaaaataatacttatttattagttattaaaagatttttttagcatatatgttctgaagtaataacaaatctgttatattactatgaaaacacatatgctacataaaagaacttttaataactaataaataagtatcaacctttttatatcatatgtaaaagtaaatctgtcacaaatgatatggtgcatcacatactcataaatatgggctgcagga

SEQ ID NO: 22728 - DNA, 2201 bp, Oryza sativa
atttcatcaaagcagccggcctctatatatacacccctcattccctctttccatggaagtagttagagtgtgtatagtgagccaatcagttacagtgccacgctcttgagcaagaagacggcgggctccgattttgcggcgcaaccatacctaaatgtgctgtactttctatgaactccagtaagcttcccatgtcctgctttttggtggagctcaaccatcatcttggagcactccctgcaaggcaaagataacaaaataactgtcagtacaagaggacagttttagtttatatggtactgaaatgcaggaattggggacagttttggtacatcagctgttcttcagagtattttgtatgcagctcacagcatttgttccaggacttgaacccattaatggtgcactgagcagtgtagatggcagcagccgccagcattgacggctggaatttgagcatctcatactcgacaaggctcagctcaattatgaagaaagacatgagctcaagctgtttcagtaggcacttgggtcagacaatgcactcacatagcaaagctactgtatatcaatacaaagatggatgcaccagtgtgtttttgtcctaccttcttgtcagattgtgcagccttgaggaaccttctcatgaaacagtatggagttggaactgacatatcaaactgaagagtgtttacaatcatcctctcctgcacaaatacaaatgacactttcacttctctgaacatatatcgatcgctctggaaaaaaacaggtacagtattcttcttaccatttcgagaatatctgttcttgtgtaggcgcggtcgcagattaggataagatcctccactacaggaacgctcacttcttcatacttgcaggcgagcagcatggcagtcacgccaaccaactgaagcttctttcgcaccacattttcgcgagccaagaatcggtctatgatattcacagtaaggaagagggtctcatccaatagctctaacttgtaatgcacctgcattggtcaagttattgtcagaaactaagaattcccaaaccacatgatgaatatgctgaatgaaatacttgcctctatcagccaatcgatgagaatgccgcgcatcttctcatttatgtcattttggctcaacatgtaattaggagagacacagctcaaaccctgtgcacacagaatttgcaatgagattgattacccaggtaacacatcaaaacaacttctcaggttccacaaaaaagttacctcactcctcctgtagaagctgtaaatttcatcaacatattcaactactgcaagggagttatttgcatcacagctgtcaatatcaggtgctgcctcctcaatgtcttccatctcaatttctttcagttcagaacccatctgaaataacaagttggactgctgattagtgatgaatcctacctaccaagtgctaattgctaaataatgcattccaagtatatcatgtcatttaccacttcgtccatctcagacatcattggcaatggcaaatcatcagatgtgatcttggtgcactccatatctgctggaccatgaaatgcagaatctgctgtccttttttgcctctcacttccaatgggtgcctgccacaataaagacagcttcttcagactactagtatttgttcaaagcagctcacagaattgttgttctgctatgcatctgtaaatttactagttatggaatatgtaaatagaagtcagaaaactgtaggcgttaagtcctagagctgtcattcgaactaaattctacatcactggattaaattagaagatgcagtgtacaggcaacattaatatctcatttgcaactttccgatttaccatttcgagtttctgcatgtaaatctgaataaccacatgtactaattcaaagttaaacaaaatcaaatagaaagagcacagcattttcagagcatatcaaaacaacagcaaacctaaagaacaattaggaaagcattggatatatgatggggaagttgacatatcagaacagcagcagtatcaatatagcaacaactttaatatggctttcatgagtaattaccaggggagcactggagggttggtttgccagtgttgcagcaaatttcctgtcaaaaaatcaaacttatcacaaaacatttcacttaattcagtacagaacggtaagatcaagaacagct

SEQ ID NO: 22729 - DNA, 1120 bp, Oryza sativa
aagaggccaccgctgcctcgcctatggacttatgggcctcaccgtcatcgtccaccgtcgctagctgtgagtcgaggatgagagaagagggtggagatcgatggagtacttgcgatgttgacttaaggcctggtttctcttattaattagtcgtactagctagctaggcacgtggatgagtggaaaatcgttcctatcaataccggtttttggctaaaccggcactaataaagcgtatatataattgggccattctattgtagtagtagtgtatgattttattcttaactgatcatatatggagtatgtatgtacgtaatgtgtatacaggacgttgcgagtggcaagcagtaccttgtgacgctgacggtggggtacactgagaaagacaacatcaatgcaactgttcacaaggtcgctcgctcattaacttattactcgatcctatatatttgcagacttaatgaataataataggaatataatacatgcagttatcggacaagtttgacatagtgctgttccattacgacggtcggacgactgaatgggaggagttcgagtggtccaagaaggttgttcatgtcagcgccaagaagcagaccaaatggtaattaactacctactccaattaatccaactgttaattaattagctgaattgattgatcatcatatcgatcagtatatagtaaatgcatatgaattgaattgaaattgaataggtggtttgcgaagagattcatgcatccgagcatcgtggcgccatacgagtacatattcctgtgggatgaggatctgggagtggacaacttcagtgcggaggagtacatcagcatcgccaggaagcatggcctggggatctcgcagccggggctcgacgccaccaaagggaagagatcacgctacacggccaccgccaggaggcccgccggcgacatgcacacctccggcaggttcgtcgaggtcatggcgcccgtcttctccagagacgcctgggcatgcgtctggcacatgatcccggcaagtgtcctatccatcgcattcattatattaattctgacttacagtagtattggttagtatttcagtcagacataaacgaactaacgatcaatata

SEQ ID NO: 22730 - DNA, 2746 bp, Oryza sativa
ggattacgtcacctgctgccacacatcgacgagcagcttcctccccggcgacacgccggtgctgtcgacgacccaccgccacagcgacgacccggtcttcgtgctacccatcatggtgatctcaagcgcttcgttcgccaggtcgaacagcatcctgtgatcagctgcatcttcttcagtgttgtaggtctcctctacctcgtcgaagacgtagtcgcagatcggccttcttgccattgagtccacccgggcattgttcatcatcgatggagacgagtacgacgacccgtcttcgtatagtcccacggcaatgaggacttgctttatgtacgccatctcagtatagctctcctcggtttcagttgcgttcgtcctgttcttgcatgatgatgattcattgctggctatgggtgttgtatcaaatttgaccaacttttcgggctcagttctgcacaacattggactcattgttttacacttcaggtctcagtgaaactctgaaatgtaacgaacgacagagagagggccgtagttttttcatacctggcaagttgcagttcagatcgctgaagaaatggcgggaactgctgcctttaacctccaacggggacaccgggctaggaggcagctcggtgaaattctcctgaaacaaatgcagcaaaggaagtgaatccattgtacaaaagaaagttattctgatcctctcaaggtcaggcctgaaatacagatttgattttgacaaatgtagtacagtgcttgcctgtgcaacgatgaaagggctcaaaatttcaggaggtgacggtggtaacatgccgatcgccatcttgtgtgggtggaactcgcccaacgatggcttcagtgaccaatgcgtcttcttcccgaacagcttgttggctctcgatctcaagctgttccgcagatttgacactgtccctctcaaactgaagctgctgctgttcttgctcgctgctactgctgcaccttcagaaaccgcgtctgaattcccatgcctaccgctgtccacattattgtcctctgcaaacaggcgacctcgagagatccctgacgccggtgcagagaatgaccggactagtgcccgtggcgacacgacgttggcgtcagcaaacttgcattctcctgtgtagctttggtcatcaaagccagaagctggaactgactctgacactgacactgacagaggcatatctgtcaacgaccttattcttcctctgcttcttctgattattggaggagaacaatcattggacccttgattggttccactggttcttgaggtgacactcgtcggactgacgtgctccggagatgcatttcttgcagcagtagcagcagcgttgcgcttgcggtcactcctgaatgctctgaatgattctgatcgggagtacagcctcttaccaagatcctgccttctcactgtctctctgatctgcttcgcgatgtctcgagcgatttgcttcgggtcagtagtaccccagcttctcctgacaacctcacttttggacttgagcttgagctctttcttgagcctctccttcacctcctcaagaaactcctccatgttcccttccctcttcaccttggatgaactgaacaacgattcttggtcactggcaacaatgtcacaagtactaggcttgaggagcactatccgtttctgggaacgtggtttcgcagacgtgcttatactgttattatgttcatcctccaaatctctgaacttgtccggcatcgttgcacagtggctcacccttaaaacctttatgaccttatctccaggagatatgttagattctgctgcagcttttgctgaagtaatctctgtatcactactattatctgtagcattcttcagggtgtctttctctgccatggaaatcgtgcagcttccatagccaaatttggccatcttttccttgtgcaggttctcctgtgcaagaatctgaatgtacctaccttcttccatgcggtgtctactactagtaatagtaggacaccctgaagctgtaaaaacggttcttgcattctccagtgctttggatgtttgccatgcctggaaatcctccctgatcttctcaagcagctcctcctgtggatgatgctgacgcgaacgacttcttcgcggtctcattttcttgagacaatgcctgtaagtgtaatcaacactgctgctaccgtaggagatcaggctgcatttggattgcctgaatgttgcagaacggggtgatgtgacagtgatcatttccagtttacttggcagcttcaggttgctgacttcttctgcatggatcatcacttcatccctttttgcagataccgggattgtgccgatgcccatcagacgtgcaatgacactcggctggctgggaaaaatatccttgtggatcacattctttgcagtggttctgtcttgaggggtgcttcccttgggtggcttctgcctcatctaaatatttttattaaagaaaaacagtaaatacgatggtactaattgattgcattaacaagaaacttgagcattaagcataggagcaattaagtacaacatacagtactagtcatggtgatggtggtatggtcgtacagtggagagtcaaggctattccggggagcttcagggcctacaacaacaactagtagagtctccattaaccattcagaggtctgcagataatccataggattgctatctaaatacgcactgtttccatgtattcgggctgcagga

SEQ ID NO: 22731 - DNA, 1769 bp, Oryza sativa
atttcttatttttcttatatcataattataaatgatgatggatatttttacctgtatgttatgttcttttttataattcctgtttgattaactcttcgccatcttactgtatccaatataccattatggttcctgtaggtattccgacgcaaaagaaaggaggataggacccaggagttgcttcaggtggacagggaggctgaactcaacatgagaaatgtggccacagacagatcaaggaacttcagtaataaagtaagagccagctacaacatatggaggccggggtttcaccatactaacacagattcaaccctcagactcatgaaagatcagattataatggccaaggtgtatgccacaattgcacattcccagaagcaacctgacctgtacgtgttgctcatgacatgcataaaacaaagccaagaaggtattggggatgcacacatggattacaaacttgatttgaggtactttattctacgcctttgaagacttaccagttcagttgcttgtttgctgtgactctaaaggttcagttatttattgctgtgactctgaaggttcaattatttatcacccacatttcttatgcagtgctttagagcgagcaaaagcaatggggcatgccctgtcttcagctagagatgttctgtacaactctggtgaagtatccagacgattgcgtgttatgctacagtctacagaactaaatatcgatagtgttaagaagcagaactcattcctggtgcagcatgctgcaaagacagtccccatgcctttgcactgtctgcatatgcagctgacaaccgattatcattttcgtgatggtgtggtcaaggaatattttcgtgatgctgctttgaaggaggaagaagataaggcaaagcgtgaggatcggtctctataccactacgctatattttcagataacgtccttgcagcctcagtagttgttagatcaacggtgacacatgccaaggaaccagagaagcatgtattccacattgtcactgatagacttaattttgcagctatgacaatgtggttcataagcaatcctcctctacctgctactgtccatgtggaaaacattgacaacttcaagtggctcaattcgtcatactgttcagttctacgacaacttgagtcagctcggctcaaagagtactatttcaaagcacatgatccatcgtcactctctgatggaaatgaaaatctgaagtacaggaaccccaaatatctgtctatgcttaaccatctaaggttctacatgccagaaatacaccccaagcttgacaagatactgtttctcgatgacgatgttgttgtgcgaaggacttgacaccgctatgggatgttgatcttaaagggatagtaaatggtgcagttgaaacctgcaaagaaagtttccatcgcttcaacacatacctcaatttctcacacccaaagatctcagagaactttgatccacatgcttgtgggtgggcttttgggatgaacatgtttgacctgaaagagtggaagaagcaaaatatcactggaatataccattattggcaagatctggtaagtagtggaacaagaaagctgtgcttgattatattgttcgaatacatttatcccaccatgcattctgtctatgaactgaaggtcatgcaactgcaacaattggtatttatcttttgtttgtttcatttgataagagaatgtgtttttgcagaatgaggatcgtaagctgtggaagctggatacattgcctccag

SEQ ID NO: 22732 - DNA, 1537 bp, Oryza sativa
ttctgcaaagaagttatcaatgtttttgttcaggaccagtccgtccaactggctgcagggggatgatatcctctggccatgtcttggtgacatcaagaggatcgaagtcaaatctgtcctcatgatcaggatcaatagtctggatgtaaagcttccactctgggtaattccctgctgcaatagaatcagtcaagtccttcgtggcatggctgtggcaggtgccgccaacagtcacagcttcatcatccaacaggcatttgacaccacaggtaggcttccagtggaatttgacaaggtgaggctttccatccttattgattagggtgtaggtgttgacaccaaaaccctccatgtgcctgtagttgagtgggatgcctacatcgtcaaagaggaaggagaacatgtgcaggctctctgggtggtgtgaaaagaaatcaactattctccagttctcctgcatattggtctttggacttggcttgaaagcatggaccatgtcagggaatttcatcccatctcggataaaaaagacaggcatattgttcccaacaagatcaaaattaccctgaaaagcattgactcagaaaatatcaaaatatggcagcactgaatgcaaatcagtaaataaacagtaagacaaagttgtaggtgacactggttagatatatgtccaatgtgtgagacttttgagatatataagaccaaattaccctcatttgctttagtagatataagattaagcaatgcactggacctatggagtgtggaggtaaaggacaaccaatctttcatgttctacttaaccaactgagaacaactagacatttgattctacagccttatgcttgaagaatacattatactgaatgtctccctcctacaatcctatgaaagaaagaagcgaaagagcaagtacctctctagtgtaaaacttgacagcaaaccacgtggatccctcaatgtctcagggcttccacgctcatgcacgactgtggagaaccgaacaataactggggtctgaacaccaggagcacggagaaaatcagcacatgtgaggtgagaaatatcatgagtaacctcaaaaaatcccttggcactggctccccttgcatgaacgacacgttcagggatacgctccctgtcaaactgtgcaagcttttcaatcagatgatagtcctcaaggaggatagggcctgtcgattgaagaattcatcatgtcaaaccacaaaacagccatgattacagattgcaaaaatacaggagttgctgagtataaataaagggaaaacactagaaagaaaacttcacagatcgatgatagaagcacttagttctagatgcaaatacatctttgtcagagtttggtacttttagtgaccatgacatttggaacatgacttccagtcactttcgaaacttgagtcatgttggatatatgtatgaaatagacttgtgcttctctggtactccagtaaatttgatcgtcatcagattactttgtaaagtgaaccgataatggtaaaaaacccccaaaaaa

SEQ ID NO: 22733 - DNA, 23630 bp, Oryza sativa
gatcgatctagaagataagaaaatcaggaaaagaaggcaccttgtagggacccatggcgtgatttgttgtgggagagatgagaatcgaactggatgtggggaagaagagaagagaagagaagaggatcggattggtggtgataaggacgaggagagaagaaaggggcggccttttttgtagtgcaatttggggacgaagagaaggggggtttcgtagcgtgctagtatgcttcttgccggcctcccttctcttcgtccacgtcgtgtttgtttattaatggccgtcttggggtgtgtggggcccacaggcagcgacacaggtacctgcttcggttggtgcgcgtgcttgtcacgtactacgaacatggatcgatccaaaaaaagggatcacgaggagataagacttttttaacgcgaaccaaacggattattattatccggactctaggattatacgtacgtactctattttgttttggagcttactagctcgctcatcgtgatcgatcggatcactgcttttttcgtttttgtttaaaaagaaagccagagactgggaaatcaggaatccggccggcatcccaaatgctaaatcctgtataatttctatatgtgttttctcaatctcaaaatataagatgcaaccattcctaataaaagaaaaacattatagttgctcttagtttacatggtaagttgagaccattgctaggagcgatcttcaatgcttgttgcagtgatcttgtgctcgagcgagtaggtacatacttatatctacatattattctctttgctttaaaatatacaaatctaatgtaagatatttagatttatagtatttttttttaaaaaaaaatgggatgggtagagtagccttcgcgatggatgcggcaaactaaactgaactgacgtcgccgtcagtcgtcgtgtagtatagcagtgctagaatattatgcaagtggcaaagaatcacggtgtgttcatacgacgtgcatgcatgtgggccatgtcccatgtggctgacttgctactaatactgtactcgctccggttcgatattaatcgacattttggacgagtttgatatcaaacttttataactttaaccattaataactttaataatatttagtttaaaggaactagaacaacatatatagatttatcttttaaagtactataataaaagtaaacatatatttatttattatatatattataatggaaaaataagatcaaagatgtatcttgtagaccgtgtcattgtccaaaacgttaattaaaatgaaactggagggagtactattcaaccattgcaaatttaccaacaacatactccctccatccaaaaaaaagacaaaccctggtttccgtgcctaacgtttgaccgaccatcttatttgaaaaaattatgaaaaaaataaaaaagaaaagtcacacacaaagtattaatcatgttttatcatctaacaataataaaaatacgaattataaaaaaaattcatataagacggacagtcaaagttagacatggaaacccagggtttgtcttttttggacggtgggagtaagttagcccaataactaattaaggctcacctctccagccttcattgatcaactttttagcccaaaactataatagtaatatatcatccaattaattttatttacaagcatgaatataaaaatattagaatagaaaaaacacatagggcttgtttgatttgataccaatttattgccctaccaaaactttggtaacttcaattgtagcaagtgtatgtttattttgctaccaggttttgcccacaatagttcaaatttaacactacccaatttagtagtgctaaaacttaccaatattttggagctaccaagattttggtatggcaaaaattggctccaaaccaaacaaccccaaaaatataataagattatatataaaaacatagtattggaaagcacagaataaatactatagcatgttgtctggaataagggaatagagcaaaacacatgatttttgctatttaagtattaaaaatagtttttattgcttgatgagtgcttaaatatgctcatttaaggtcacatatattgatttgtctcggagttctcaaaggaaaatgaaacagtggttgctatggaattcctataaaagcattgggtgaaagaaaaaaaaaccttcatttttctcatatgatatcatgcacatttcctccaataatccaaatgagtgaataatatttatatccaggaggaattgaatccttcaattttcctctaaagttcctacgctccgagaaagccttaaagccatccgtgtaatgttacactatttgcctgctcctagttttatgggcttatataattaggttgtttttagttcacgtcaaaattagaagtttgattgaaattggaacgatgtgatggaaaagttggaagtttatgtgtgtaggaaagttttgatatgatgaaaaagttagaggtttgaagaaaaagttgggaactaaaccaagccttagtccgggccgttcctatgtacactattcattctttgtttagtagccacttgagtccatcatgccctccctctctctctcttgaatgtcaggctgtgttcttctcttctttctcaacttctactcgctcatttttatccacatattttttaaactacttaacggtatgtttttattaaatttttatatatgagagttgctttaaaagaaatcacattaatctatttatcatgtttttagctaataattaatcaatcatgcgctaataaagtcacctcattttttgtgttaggagaaaaatttccaaacactggttcaaacacagccttaatatgttatattactagctactatcactatgtgaatgccacatcaaaattttagtaaatttactatgtgcatgttgccatagcaatttttacatgtacatgttataggaaattcagtttattagacctatgtcatggcaaattacaactgtaagggtttgtttgtaaatatgtttacaaaatatttatttctatataaatttacataagggtctactataatcagttgtacttaaggtgtaaaccataagatgttcacttattcctttgttgcttacacatatctttctttaggttctttttgaattgtaggaatgaaaaaaaaaggaggaatatgaaaaaaacacatgattctgtcacgtatgcaagtgcaaaacggatgattgcaaaacacatgaataatcgtttgattggaccgtaggaaaaatatagaaattgaatgagaaaaataaacacatgaattatcatgttggcatgcaattaatgcaaaataaaaatattatttgtaacagaaatgcacattcattttgaacatgcaattaatgcaaaataaaatattatttgtaacagaaatgcatattcattttgaacgaaaaaattccggtctgatatgttaatttacagtagtgcatatatacaacacgtaaaattataaataaacatatgcaattgaacataaatactacaaaacattactagttagtattcacatgagtatatattttgcaatttacacagcaatataggcaaaataatgtgaataacctgggagcgggcctttccagcctttcggcctatttggcgtggacatgatggatagggccatcgtccttaactttcagccaccagcccacttcatcagcgcccgccagcccatgggaaagagaaggcccaccatcccaacaatggtcttttgacatttcggccgtaaagctacagctgcaggtacgtacgtgtacaccacgacgacgacgacgactatacgtacgccattacaccagcatagccggagtgacgacgcagatggatagatagatgagatagatgtgaagctcatgggttgacctgcttagagctagctaaaacaaaataagccgttgattagagatgtactccctctatcccatataaaatctaatcctaacatcccaatgcaaaaatagtgaagggtgaaaatggctaaaatgctccccattattaaaaaagtagtggtggtgataggtagttaaagggtattgaaggaataaaatttctcgttttatgtactgagggtaggtagaaagatagaagttagttttttatggaacaaaatttaaactctagaagttgattattattatttttgggacggagtgagtatatggcaaagaaagcctttgactgcgtacctccattgcatgcccctccgacgacggacaatcgatcctctcgtatgcatctgtctcaagcttttctatggttgtgttcgttcctccaggttgggacggacaattctaccctagagagcgaggtcatgatgggcaggttccgcagagtgtacgagaagataaatatggcactggactggatgttgtacggtgagctgggagtctccacccctcgcttccactggtggagaaaccatctttgatcggtccggcaaaatccacaatagtcttggatccaaaaaaaaccaggagtaaagattgtttttagtcccggttataaaatttttgatctttagtcccggttcatcccctgtcagatgtatgtcagggggccgaggatctttaatcccggttggtgtcaataaccgggactaaagatcaccactttagtcatggttggtactatcaaccgggatgatctttagtcccggttgatatcaaccgggactaaaattaaacacgtagtatataatccctatcccttatcctctcctccacagttacaacttaacagatcgaatctcaccccctctcctcagatctatcctctctaactctcttctccaactcctccccttccacctatcctcccccttctctccccttcctcctccccttcccggccagcctccccttcccatctggcgggccggcgggcggcagggccgcgtgctacggcggccggcggcggccggcggggcggcgcccagcggggtcgtgcccggcggagggcggcggggcttcgggcggcggggccgcggcggcggcgggcggcggggccacgcccggcgaccggcggccggtggggccgcgcctgtcgttcgtggcgaccggcggcggcagcggcattctttttttttttaatttgtgatgattcactgagatgtatttgactaagaagttacaaatttgtgattcattgtttggatctgtgatgtatttgagtaatttcttaggatattgtgatgtatttatttgtgtgtataagtaactttgatttgtgatgtagatttgagatgttacttcgatttgtggattgggggtttgatttgggatatgtatcccacttgatttgggagaaaataaaaaaaaagaaaaaggggatcatctcactgccgtaaccctctctttagtcccggttggtgttactaaccgagactaaagatctatttttagtcccggatatttaaaccgggactaaagatagcgaactttagtcccggattggtaatcgggggttacgaaccgtgactaaaaagtatttctccaccagtgtccctccctacccccacccccacctcaccgcgtacacacacccatctcccgcacacccacacacatgctcgcccccttcacactaaaatattaggcacacattgtagaatcttttataggttaatctaaaagtgttgagcacacaatttaaaatttttcttaggatcatgtgtcagaggcgttatatgtatgattgtattttctaccgattaaaatcttactttaccatatattatatacatattaatgccgcatgaacaaaagtgtagtttgatagaaatgtatggatggccgtcctctcgtagagttgcaacgttcatatttatggtaaggtgcctaatcaaaacgttaaaaataaacaaagaaagccataagtggcaatgatatcggtaaggcaaatatacgatgaaggctacacaaccctacctacgtaaaaccgttttagaccattgaattgagtggatgttccctcgtttatatacgctcaattagttatgaatttttttaaaaaaataacaacattcatacatcatatatatagcacttcataaaattccagatccaaactcaactcacacattgagatataaatcatacctagattttttttattgtttttcagtgtgtagatcgaatttgaagttaatttttagtagagtgctaaatatcaatatgctctatattgtcaagtttttataattatttgtaattgaatttaaaaggaaaaggaatcagaatacaatccctacttgtagtctgtagacgacgatgattatacgccatttaacaccagcatatatagctggagtgacgctcgctagctatacacagatggacgtgaggctggggtttggggagactatgaccgggaaggagactaattagtacgtagtgacaacaaccacctagctagtactagtaattaggagtagtaatcagctagcttacaagtgtagctggagtgacgcgcgcctagctagcatgctgccgcaggccggcacaatgcttatctcttgtgagttgtgacttgcttaattagagccaactcttaccctgctgtgaaaagaaaagaaagggtaacgttggacgagaggactcacatgtaatgtaagcaacaaatacacttgcttcgtcttgctcttgcgtgtttggcattgtgcgaattcatatctatctatctagcttggaatttacataggcggggtagatatgtgttgcaaatttggttatttagttgtatataatttttttttcatttcactgaaaatgtcagctatatgtgacacttttatatcttgtattcttgtgcatgactctgctagctagtgtagtgtttattttggacgacctgtgtcaagctgttgacattattgaaagtgcatatgcatgccatcttagtatacctcacggtagttcttgttttttttaataatgaaatagatatatcccggcctttactcaacagagttacagccaattattacaatatgtcactcaacaaagagtgtagttcaaataaaattaaacacacccaagcataatagaaagtgaccacactaggataagaagaacacaattatttaagtctatttgttaatctccatccatagttggcaaaaagttgcataaccgtcgtttcaagcttacaacatacaactttcagaaactctccatcattatcacatccgtgcagctgtgcccaaggccaaagtcaataagttgccctgaaaattacttgtatatataagatatatggtgaattgtcaaaaaccaaatcatttctactcaaccacagagcccatcatattgtagatgctcctacgagaattacgcggtagttcttgtgcatagttggttcaattcgggacgatgaaatgaatcttgtatgtttttttttcttgaaaacgtaactagctagttatatatctatggcatatacataaactaatctagccttaataagctccatgctcgtactcgatcgagcgagctaatagagagcccggtctgcagccatgagctcgccggacgtcgtcgccggcggtggcaggcagcggtcaaagggatggatcgacggccggggcgcgagtggactcatgtagcgcatgtacattttggcatcacatcgatcggctggtagctagctgcagcttggtgtacacgtgtgatgagtagtacgccattacagcagcatagctggagtgacgctactcagctgtacccaccggcgctgcgccgcgctatataacaccggtacccccctccgtgcacatccatccatcaggtcttccacatacattttgctgtctcgccaccggagacaggtagtatagctatggccggtcaggtgttcgtccatcacctcggcggcggctccggcggcgacgaccccacccacccatggctgtccctcaagtcgtcccatgagatggacgacgccgtggcgagctggcgcgagaagctggcggacatggccgccgccgacgaacgcgccggcaggtacccgtgcccgctgtgcgaccgccacttccccacggagaaggccgtgcacgggcacatgcgcagccacccggggcgcggctggcgcggcatggagccgccccgcgagccgtcccccggcgacctcgccctcgccgccgacgggaagcggtaccgctacgtgtgcgaccgatgcaaggcgccgttcgagacgcggcaggcgctgggtgggcaccgtgccagccacagcaccaagaagggctgctcctggcacgccaagcagctcgccatggccaagccgcccaagaacgacttcgacctcaaccatctctcacttgaggccatccaggcggcggcgcaagaggaacaagctgctcaagaggggaacaaggatgaggagcctaagaattaattaattaggaataattgaacttgcttagggttcgttcggtcggtcgatcgatcgacttcttgtgcttgcgttgcgtcggtctgggcttgtgttggttcgtagctagccaactccatggctcatgcagcatatgcacatatgtctctttctcttctttttcttttttagtttttgtttctctttgattttttgtaagctcgatcgatcgacaagaaaaataaacaaatattgcaacctggatgatatatgtgcatatatgttcatcatttgtgggtgatttgggggaatgtgtgtttcccacattttatatgaatgtctacacaatttgaggtatatcgattggacctgtttgacaagaacagttcaagctatatatgtcctgcgttttcagtccggcctgttttacaagaacagttcaactatattggtgcaaagatcgatcgatcgtatcaaacaaaaaattgctactctaggtgatgcacttctcatttaccatctcaaaaatttatgcctcctacattgtttttcaccctgaatggtccctgactccatgccactagaagaactaacatcatcacggccgttcaaccgatgaacaaacgttccggatttgtggttgtacccacggttttgtagaaaccatcctggttttcagtttcacctttgagaaaataatttacttttttaatatattttttcgtcttagcgtgagtcaatagagcattgcacaggtgtgctgtacattgtcgtccctagcacttcccagtgtttgttcttggtggtcgaccggcatgactcaacttttgaactcgatgtcaagagaaatagagtttactacgagtcttagtttatcttttgacttttgggtagagaatcgacatgaattttcttgttaaactatgcgtacacaccttccccattcaagcaacaaaaatcttcaccattcttgtgagactgtttttgcccttaaactagctaagtctttcatgtacttagaccttaattttacaatagttatttatcttctttgaataaaaaactatcatttactcatgcctgtaaatggctacttggaaaaaaaatctagttagctacatgtgtagtatatgcttttttatatagacatgaacgaaaataccatgtaaaatgctattaattagtaagttatagttgtcagtcactaacaaaggcaactgataccgcctaataccctaacgtacgtgtggcgcttatgagggcgcgaaagatcacgtgcatgcatgcatgcacattcggctagccttcgtaacgtccatgtgcataggcgcgctcagcctatattaattaattcttgttggtatggagaaaggtggacttaactttctttttgccaatgaaattttccacccaataaatttctattcatactacaaatttttccatgttacttcctactggcatagtgtctaccagtagaaaatagtagaaaactctgctcgaagctgttaatagtacaaactttatatggagaattttatgcggcggcaaaaaaaaaaaaaccttctatacttcaaaacttgttataggagcaaatatttctgttttgctcagaaactttccagtccggattaattctttttttatacaaaatatggaattttgagttacaagctactatattctagtgtgctacaactatcacgaattttcgtgactgatccaatgaggaatggaagtgtagtaaattaaaccaaaatcattttagatattcatattcacgcatctgcaattgtggtattctgttgggttagaacctcaaaatgccaaggaacaagtggtataccatcaaaataatattgattggattaatttatactatactaattggggaagcatcaatgatgtggtggaataatatgtcccgatacctataaatattacatatatacaattaagtgaactttcagtatgaatttaataagattataaatgtgccgttggttttttttagcatataagtttgtcatataatttaaacaaaatatactaccggtcactactaataatatcatgcatttatgcataatggacgttagcatgggagttactccagtatatggtttttggagaggctctttcgaaacccacagctttctacaaaaccacactggttttcagtttccctttgcaaggaaaatagaatttttgtttttcgtatcttgcagtgacgacacaattacagagtcaaagagtcctactagcgctgggaccggagtcaaccttcctcctgcgatatacatcagcgaagaacagcccagaatttaataccatcatgattcttcttcttttctttgttagagaattgatattcttttctgaaactacaccataacgctaggtggatgtatgagatatttgttgagatttactagcaaggaagcatgcatgatgccacagttatgtatagtataatatgaaaactatcgtgggataaagaaatggacatctgagatttgtctacatcattatgagtaaaatttttactcgcaaattaatcatgagtaaaagttttactcaggataacgtgcataaatatcatacgtttattttagctatgtacctacccactgagaaggcagggtaggtacgtgcttcaaatttgtttatttagctatttttatttttcactaaaaagacaatctatatatgacatgtgatgcagactctactggtgtaatgtagtgttaatttggaatgatacgcgttcagccgttgacattggaagcgaatgcatgtcatcctctagctagcactccatatctcagcagtttctcatatattctgctcatgttgtctctactagctaattaactgactaagaccagtatctgaagattgaaaacgatgattttctttttccttcgaaatgatatgaatcactcatatataagaatccttttggaaaaaaaacgtaacaatatactccagtataagccacacatacagttcattgcgcttgcttgcttcttgcaatctaatcgaggcgatcgaatgatatgaatatatatatagcgcatatataggttttctttttgaaaagaaaaggtaacataataactaccttagctagctagcatggcatgtatcaataatctagcctttaattaattaaactccagtgaatgacaagctgagcaagcgagtacgagatatctcatgagctcgccggccgatatcgagtgatcgacgtcgtcgtcgccggcgctggccgcggccagacatggccggctctagctaggggactcatgtaaggcattatgcttatatacggtagctagctagagcgaacaatacagggtaggtgtacacgtacgacgacgactatacgtacgccggccattaattaacaccggccagcatatagctggagtgacgctagctagtttttttttaagtaaatttcaaaaaactacaaatgcttcaattaaattatcccaaaactatatatttaactaaagtgatgtattacaaaactatagattttaacaataaatttatttcaaaattatatgtttaatgctaagtatcgtaaaactacatatttaacaataagattatcacaaaactatatatcttggggtttaaattcttagtactaacacctactatgtttgagttataaatgtccaaattttgttattaaattgacgctaaacatgtatatgtacgtagtttcatgataagtttgttactaaatctgttgtttaatttgcgatacttcaccttaaatataaaatttagtgataagtttggtgttaaatctgtagttttttttatacatcatcttaaatatatatatatagttttgtgataatattctaattaagtaaagtatacacagtttcataaaatttactcttttatttacagacgctagctacacagatagatgtgaggctggggagccggccggtgactgggaaggggatcgactaattagtacgtactgacaacaaccacctgctaattaggccctgtttgattcagtttagaattattataatctgaattattaagagtaagctgaaataaacaagtagattattatgatagattattataatttataagccagattattataatctaataatctcctctggaggagctttttttagattattgggtggctaaagacccattacccttagataccttcaataatccagataaacaaacagctcgcagtttattctatgttagcttattataatccagcttaaaataatctgatttaataatctagattataataattttaagctgaaacaaacaggaccttactctagtaaccagcttatgttgctggagtgacgcctagcatgcttgctgccgtaagtatatatctcttgtgacttgcttagagccaacaaggccgttgattagagatgtagcaaaagcaatattcctttgaccacctacctgtaatggcccttcctccttacgcatatgcatcttctcaagcttctatccaagtgtcacatactcggccctttgttaattcagcctgatgacccccttccatttttcttaattgattcgaccgggtgctgaataacattttattccttgacgtgatcagcttaattattttggttaattaattctcaaaacttacaccttgggttaattattagttcttgattgtaaattttacgatcaaggtagcatttaattgattacgtaccaacttttcatgacttgtaaacaattgtgtacatcgttatgaactagcactgaaatatatacatttacctttttcttataaaaacaatcaaattttgaaccaataaacttctatggaaccgtcaaagtattcgccttattaattttctatacataccccccctcccctcccacacacgtatctcccgcaccccccaagccccacacacatgtacgcgtgtgcacggacgccacacagcaccgcgtgtgtcctctttcacactaaaaatgttaggcacacaacgtaaaatttttcatagattaatctaaaatattggacatataatttaatgtttcttttattcatgtgccgtaggcattgtatgtacatcgtattttctttcgattaaagccttattctactttattttatattaatgccgcatgaacaaaagtgtagtttgatggaaatatatggataaccgtcctctcagggagttgcaacgttcatatttatggtgcttaacgaaaacgtcctggggtctttcgactagctccataaggtggtgggctagacgacctgggtttaaagcatcaccccttctaattatttgatattaggtcctttctaatattcgccttttttaagttgatttttgatagagtgctaagctagatgtcactatactctataatattatagaaaagttgatttttggtcgacttcgatctcaacgatcactggtggagaaacactttgttgtcccagttggtaaccctttatagtcccggttcaaataaccgggactaaaatcgatttttagtcccggttggtgactaaaaatatggtcccggttgttgttaccaaccgggactaaaaagttttggtttttttttcttttcctttcatcccgttggtcttttcccttttttattgttttttagctttcgctcgtggatcgaatgaataaaatcaacaacaaagcctaaatcaatcatagatcgaatgaataaaatcaaacaacaaagcatccatattgtttacacttgttcagatctacaacatctcatcacagagagcattcatcacagagaacaaagaaaggaaaaagaaagttcgcatctacaacatcttcagcattcatcagatagcacaaagaagagaaaaaaaaaattctcctgtcgccgccttccgatcggcgtcggctgccgccatcccgaccggcgccggccgccgccatcccgaccggcgccggccgccgcctcccgcccggcgccggccgctgccctctcgaccggcgccagccgccccatcttgtcgccccgcgcccaacacagccggccgccgccgcccccgacgcagcccgccgccgcctccatctcgccgccccgcgtcgggtcgccggcggcggcctccatcccgtcgccccgcccggggccgccgcggccggcctccatcccgccgccccgccggaggggaagggaggggaggagggggaggagagaggggaggaggagatagggtgagagaagaaggaagagaaggatgggaggagaggagagaagaagataagatggagatggctgaatgggagaggaggagataaggatggaattaataggagactttgcatgcgcgtgtggatagaggttttgtttttcctaactttagttccggttggtaacaccaaccggaagtaaagatcaccgctgacaacatacgaaccgggactaaagatgatctttagtccaaagatcaaatatgcccactgtagctaccaaccaggactaaagatttttagtcatctttagtcccagtttttagtggaaccgggactattgtggattttggtcgaccgaccaaagatggtttctccactagtggatctgtcactgaagatccaggcaacacaggagtgaagaagctgttgctgctgaagaggggaagaaagatgatgagacgaagaattagagagagagatcaacaagtgaagtgttttagggttcgttcggtcggttgatcgtcttgctggtgtccatgtgcgttgtgtgttggtttgtactccctccgtatcctaatatgatattttatttgcactatttgaccacttgtcttattaaaaaaaattgtgcaaatataaaaaatgagaagttgtgcttaaaatactttggataataaagcaagtcaaaaaaaataataattctaaatttttttgaataagacgaatagccaaacagtgcaagtaaaatattaaaattccttatattacgggacggagggagtagctagctagcttcctactccatggctccatgcatgcagcgcgcctatgtgcacatgcccttttctctttcttctttttattagtttttgtttctctttgacacttttggtcctgtcgggactttgtaagctcgatcgattgacaagaaaaataaacaaacattacaacctagatcatatgtatgcatgtttgggctccgcaatttaaattcttctctcctgagtttcttatctgtttccatatctctctctctatatatatgttcttaatttgtgtgtagctagtgttggggaatgtgtgtttcccacattatttatgaatgtctaattttttaggcatattgaacctgtttgacaataacagttcaagctatgtccagcttaattttttcagttatattttataacagcagttcaagtatatcggttgccctaaaaaaggtatattggtgcaaagatcgatcgtatcaaaatggaactatatgtgattttctaaatctccactttataatttaccatctcaaaaattttcaacctcctacattgttattcacctgaatattggtccctgcttcccgaagaactagcttcatcatggccgttcaacgggtaaacatacgttcaggatttgtcatttgtggttgtacccatagtttttatagaaaccatgtggctttcagtttctaatttgagaaaatattttttcatcgtaccgtgaataaatagagcattaatgcacacgtgagcggtatattaccgaccctgttagagcttgtatcagatatgtgtataaaattggtgacggtttagagaattgtaattataatatgtgcagaatagaattagagtcgaactttactctaggctcttttttaaataaagagacacgtataaccatatgacgacagtagtatagatatgggtacgattagccggtggttagctgtagatcgagggtcatactacctggatacacagtaagttgttgttgttgttgaggaggggaagaaagatcaagaggcgaagaattaattagctagagatcaataagctagcttagggttcttttggggtgtgtttagttcacaccaaaattgaaagtttggttaaaattggaatgatgtgacggaaaagttggaagtttgtgctataagaaagttttaatgtgatgaaaaagttggaagtttgaagaaaaaacttggaactaaactcggccttggtcgattgacgtgttggtgtccgtgcacatctcaaaggcttcatttttaggtttttttttctaacgtttgaccatccgtcttatttgaaaattttatacaaaagtaaaaaaaatagtcacgtataaaatactattcatattttatcatctaataataataaaaacactaatcatagaaaatttttaaataaaacgaagagtcaaacgttatatcaaaaactgaaaaatgaagctgtgggacggcatctctctctgtgcgtgtgtgttatttctctttggcttttagtctgaacttcatttaagtttcttagctcgatcgatcgacaagacaaatgatataattaaatatttataaactgctaagctcatatatatacatgtttgtgttaattccttgatttcaactcttctcttctcctgattttcatatatgttgcctatctatatatgttcttaattaatttgtgggtacctagacttggggaatgtgtatttcccacattttgtatatatatgactgcacgcagtcaaaaaaaataataatttgaagcatatgggcctgtttttataacagtacgttcaatgcatgtttccctaattaatcctcagtgttcactacttcgtgcataaatcgtccccatatatatgaggctaacaattcatagatttcatctagaaagtacagctccagagagctattgcaagagcatcaaaattttgatcgagtagagcaaacggcacgcgacgaaattaaacaaagtaccctagctagaaaaacatcgagagggaagggcgcgaggatcttgcgagagaggaggctggagccgaggtggagaagcgtatgtctccctctccaccgtcggtgcgcgcgtcgcggcgattccgatccggccgggagaggagacggaagggaagtccctcccggtggtcggacatcagaggagaggatggcaacgacggtgagatagagctgggccggcctgtgcgagtaaggaggttttctacttgtagttgggctgatgtgttgttagttgggcttctttttttcagtaacctcacaaagggtctgtttgggagagctttagattctgagaagcagctgtttggtagccagcttctgataatctggaaaatctctgaaacccagcttctggcttcttagttcattttttagaatctgtaactacagattctcagaagctgtggactgtttggggcagcttctaacagaagcagcttttggaaaaagctgcagctgggacaagctcccccaaatagggccaaagtcactgtcaatgtactgcgaaactagtactaataatttaacctgaataagatactagtaaattaattttgcttggtttcctattaaaacaccaacaacgacttctcttatacatttaccatagcatagtatagagacttaattacaacaaaaattgcagtaatgccaacaaacaattaatctttgtaatttctcacttacatgttagttgttgtacgtgtgtgtgtgaacatgacagattagctatctactattgatccaaaactagtggagtatataaaagaataattactgttgcggtttctgacagttggttcgtattaactcgatcttcttcttctcatgaacacttgcgagctagctggatgagagaattggccttcctctgcgctctgctggtgccgttcttggcaatgtcggccagatggtcatggagatcgaagccgagggcgtgcgccatgagggcgttgttgctggagcccagctcgagaagaaccgagaccgcgcactccttgttcttgggagtcccttccttgatgatctgcaccagcttctccacgaaatgctccgtcccaacctcgccccggcacgtagggttggaggccagcaggaggaagatggagagcgcctcgtcgaccatggcggccttcttgtcgtcgagcagcttgagcagcgtgggcaggatgccggcctcgatggctctcagcttgttgccattgttgagcatgaggttgaagatggccgtggaggcgtccttcttgcctctgacggtgccgttctgcaggaggtccaccagcggaggtatgcctcccagggtcccaatggcgaccttgttctcgtccaccatggacaggctgaagagcgccgccgcggagttctcctgcccctccacgctgccgttcctgagcacgtcgatgatcaaggggatggccccgcccctggcgatgaggagcttgttggcctcgtcgatggagaggttgagcagcgaggtgacggtgttctcctgcatcttcttgtcggggtaagggaggaggccgatgagcgccgggatgccggcgttgtcggtgacgagcagcctgttctcggggttctccttggacagcgtccggatcttcttgacggccttgcgctgcacgtcgaggttgggcgaggagaggtccttgaccagcgtggggatgaccaccttggggtcctcgggtggctccggcggcgggtcgccggagtggatctccaccttgttcttgtcgcaccattgcatgatgaggttcttgagggcgtagttgggcgccagggagagatggcccagcggctgctgcgtcttggggcacgtcctctgccctgcgtccagccatttctggatgctgcggcgttcataggtctgcattatttgaatccatcagataattgatatccatggatggatcgaggaagaagatgatgatgatgaatagaatacttgcccttccggtggcgatgatgacgggatcggtcatgatctcgagggagatggggcagaggaagtcgttggggatcatgagggaggggcacttctcgaggtacttggggatgaagacgtcgccgaggatgttcttctcgtcgacgccggcgatggccttgaggcggtggaggaggtcgacaatctggttggtggagtcggactggtggtcgttgatgagcttcttgatggccatggtctcggcgcggaggtcggcgaggctctggagctggaggcgcttggcgaggcggtccaggatggggcggtcggcgttgttggcgtcctgctccttgctctgcaggatcatcatcaggtccatggccagctccatgtcctgcgtctccgtccgcttcttgctccgcttcttcagctgcgcgctgatcagctccacctgctccttcacctcgtccgacacccccagctccgcgtacggcatcccctccagcgccatgttcatcttctcgtacacccccctgaacctccccatcaccgcctcgctctccagcgtcaggtagatcttgctcccgtcgtggcagcaccggaggagccgccgcgccgcctggaacgcccgccccagcagggccagccgccggtacgcgtcgtccgacagcgccggcgccgactcccggagctcctggaccagcgggaggaggagctgcagccaccgcagcaggttgaagcactccttccgctgcgactgccggaactcgtggaacgcgcgcgctgcgttcgccgtcgacaggagctcctcaagcaggtcgccgtcggacagctgccgccccgacggctccgcctccgccaccgccgcgcccatccgcagcatatccttcgatcttcgacccttgcctgtacgtgcttgatggatcgtcgttggagatgagattcatttcattgtccctgccaccatgcaatacttctgcatgcaacaaactaacttaattgccggcttcacctcaattccaggatcatctacctctatttagcatttcactacatgcatatgcacttcaacctcatactacatgttggtattctttgagtttgtgcctttgtggtgatctcaattttttttcttttactaaaaaaaattttattttcgtccttttcagcactagcccaatatgctacctcttttcaacccaacccacaagtgaagctgtaggtccagttggcacatcctactaccgtcttcaacctttgttggtagttttgtgcccatgagatgccggagttgatcctcccaaatccggctgaatttttctcgatcttccaaaattgataaaggacttttgatcactaatctactctttccattttcccaaaatcggagcgaatcaagctcaccgattgggcatcatcggcggctgttaaatagagattaaattcagcgaattaaagccgaattgaaataataaatcatggataaaatgatgatggaggagtggggaatagatatttatgcaatcaattggaggaggaaatgtacgggcgaattgaaataatacatcatgggtaaaataatgatggaggagtggggaatagatttttacaatcaattggaggaggaaatgtacggggaggtagattgtagtggcaacgatgctaggatttggcccgatagcggctgcggcgtgcggatcataccggaggaaattgaaaaaaaccagacttaccacatgcgcgcataaaaaaccgttctaccaaaaaaagaaaacggcgaaaaaaacggaatggaccagacggactttggtccgatggcggctgaggtgtacgaattggactagaggagattgaaaaatatggacttaatgcatgagggtaggaaaaaaccgttcggtctaaaaaaaatggcaaaaaaaacagatggactaaaaacaaaatcagaagccttacttttttttttaattattaggtatagacttacctagtgcgcgcaggaaaaaaccgttcagcctgaaaaaaaggcaaaaaatcatatggaccaaaatcaaaatggaatctggccttacttattttttaattagatatagacttatcgcgtgcacgcagaaaaaaaaatcaatcggcctagaaaaaaaaggcgaaaaaattgttcggcctagaaaacaaaggcgaaaaaccagatagacacaaacaaaatcgaaagccttacttatgttttaattaggtatacagatatagttgtacttgtatacatatctctctttttggtacagcacgatactactgacacactaacgattgcaggcaaaaatgttgttctggtgtcccagtaaaattaccaaacagtaagtatagcctgaacttttactgtgaccgtgatgcttctctacctaggaaaacaaataaaaatggtggagacataacggtaaggactggactgaacaggaggaccatgtggacccaaaaagcaacaagaaaccaacggcattattaagccgtcactaggaaaaggacggcatgtagcatgtccctcaaacattcattcattcgtttttcccaatcccacgatatctatactccttaaaaaaaaagtaaaaaatatattttcttcattcaaatataagtggcagcataatatagatgtgatatatctaaaactatgaatttgaataacagtctattcagatttatagtcgtagaatatgtcatatttgtagtatgttgcatttatattggaacggagatagtagtaatttatcccacaatatttatattcctttaaaaaacagtgatggttacagtaaatatgttatcctacctactctcattttaaattttgcaaataaacccctaaactttaaatcaaatccaaatggctagccccataaaaaattagagcaagacgaatattcctatacatattaataaattttcttttatccatagcaaagaagggcatttagctagtgatcatgatttctcagtcattttcctttgatttacttcaagctatgaaactatactgcatacagtatgtgttaagtgttaacgataatttaatttgcctcatcttttatatttcactcattctctccatgacgcatgggcccgattctccttttcgtatagacaatatttgagggatttccaaattttagtggcagaaatcgatccaaaatacatctgccttgtgcctacacgtgcatgagtgtctatcagtctaattgtttggcctacgtacagctaatgtaaaatgttttatcggtaaaaaaaattatgggtaaaacttgtgtacacgtcaacaaagtcaatgttgaaatatatagtatgataaaaagaaactctaaaattaactccaaaatcaaaattttaaaacttaaattttagcagcgccttataagcaaaaggcacacgatgggaggctatattttcaccccattgccacacaaagcaagtattagtttccatgaaaataaatggcaagtattacttttcaaatattttatttcctgatatgatttatcccattaaacttggccacctcatattgaacaaaatgaaaaaaaaaatcaagctatgatttaaaccatttgggccaacctggtgtatacttaaaaaataattaaaaagcttccttctatgatttaggtcattaagtcagccacctcatattgaacaaaatcaaaaaaaaaaatccagctatggtttaaaccatttgggccacctagcatatattaaaagtaattaattacagaattccttctatagtgtaggtcattaagagtcagccacctcatattaaacaaaatgaaaaaaaaagaatcttgcagttaatggtgtagcccactaaatcacacattaaacaaaaatgaaaaggatatacacaaacaggccgacgccaaccaccgttgtttttgccgattccgctagcaatcttcctagtcgtcgaccaagatcctttcatcaactccatctacttattcatccaagtaaattgcaccaccatcacattggttggtgttgaaataccctagggagatagctatgccaaccacaaccctatgtgttgttgccggtttcgctagatccaacagtcttcttagtcgttgaccatggtcctcccatcgctccctcaaaataccatagccaccattgagaggtggccatgccaatcgccattgttgtttgctgattccactggatctagcggctttcctagtcatcgaccacccctacatatgccaccgccacatc

SEQ ID NO: 22734 - DNA, 510 bp, Oryza sativa
tatatatatatatatatatatatatatatatatatatatatatatatatatatatatatatatatatatatatatatatatatatatatatatatatatatatatatatatatatatatatatatatatatatatatattctattaatcctagtggacttaggaacaggaaagagaaaaagatatggagaaggtactgtgaaaaacgaaggagaaagagaaagaccagctagggcagcaggaaaatgcccccctgatagagaagaattttcatataactatataccaggacaatataggcacatgggtactaagagaagagactttgagaagcctgttaaatttcaaaaccagaggagtgatggtgctatattaaatttagccgcacatgaccctattgattggcctaatattattaatatttggaaatgtttaatagttcaaaaatatatacaaaaccagcacaatataggaagtaaagttgaagatatgataacctacttagaaacat

SEQ ID NO: 22735 - DNA, 1191 bp, Oryza sativa
gagagtgtacagggaacggagcaatgggaggtgattatcatgtcccaccaattgcttatctaaacatatttcttttgttaatttcattataaattgcttaattgattctcaggaagattctattttttcttgaaatcagggggctaaggcagccagtgttcaatattctcaaaccattggtagatttagttttgaaaaatactgtcatatagtttggaattgctcaagctgcaatcaccattttcatgctcatgacagggtggagcttgctggccctttgcattacttgccactcttgtcatgatctgataatattgcactacttatgtgatgtcttctctgtgccttgttaactgttatgtcggttgattctattaataaccagcaataaaaatctctggtggctctagtttgtttttcttgcctacatcatttcatactctatttacttacttttagagcataatccagtaccgttctcccatgagttgctgatggtaaaagtggtactactttccatgcttttctgttacgtgcttctctcaaaaggaactatgtgtttccgatcagtctgaagtgaatttccttgggaggatttcacaccccaaccttgtcaaactcttgggctattgcaaggataatgacgaactacttcttgtgtacgagttcatggcaaaggggagtttggagaatcatctgttccgcagtgagtcttttcttggattccctttttttaatgataatatctgaaacatttctttttatgtcaatttgtttacctctctttatgcctactctctatacaatgcatcactttgcagatgttggtgcaattgcaacatcgttttcatcatgtattatatattaagcaccatattccatagtgctatacaactaatgaaacggactttttgaggacatcagcatcaacgaaattgtctggacctagacagttccttgttgctgctaccttcaattattctttccttgttatgttaatgtttcaatataatatgaaaattattactctaatttttttgctagggtgtcaagggaatttatgatcaaacatcctattttcctagttctgatgctaattcttcatcatcaggaggagcagtttacgagccactgccttggagcctcacactgaagattctcattggtgcagctcgtggccttgccttcctt

SEQ ID NO: 22736 - DNA, 2175 bp, Oryza sativa
  unsure (1)..(2175): unsure at all n locations
aaactgtaaaagcagattagaaatcaaagttgaaacaaaggctcggcggaattactctagcaaacccctcttgctcacagccatgtgctggtgaggtctccgatgatgttcttgatgtcccgcagagccctcctgttggtgtttgccatctcgggcgcatgcttgacgccctccattgaaacaccttcgcccaaatttacatgttagagcagcaaacaaaggccacacagaacaagcctgaattccagatgcggataaagttggtaccttggttaaagttctcagatctcatgttctccattgctgacgttctactgtagaaaaaccaaaccgaaattttgtcagaacacgaacgctttttttgtcagaaatcgaaaaacaggcagcgatatgaacatgtagcattacgagccacgcggatctacaaaaggcaagacattattatttgaattcgctcctgatatttcgctagatgtcttaaaaattccagttttgaccacgaaacgacccccaagaagtcaaatatggcagaaaccaagagaagaaacagattagaaccctcgtaattccaactcgagagacttgctgtgcttgaactctctcgtcagggtggagagatcgaagaaattccacagcagaaaataaaagaaaagaaaaaacacccacaaaaaaaggaaggctgtccaagaagttgctgaacatgccttccaagaagcggaatcatctccctgtcgagtttcctccgttcttggtagaaaaaaccaggaggaagaacccatcaaaaacatcaaagatctaatcttgaaccaatcctacaggctagagtaccgacgattcgatttcagctagctgctaatctttttccctgaattactcgtccacgtctccatccaagcggagatccaagggaaaacgagctcagggaaccaaatcgaacgcaaaaccacatcaaaaaaaacccctcaaaatgaaaatctcctcctctagcccaaatttccgaccaagaacgcatcaatctaccgcaagaaggagccttacacgatctagaagacgagagaggaggaagaagattgntgccctgccacctctctccccctctctctctctctctctctcgatgctccagaagaagaagaagcagcagaggggagaggcctagctgcgagtgcgagctgcggtggttggaggagcggaggagaggggagacaaaggagagataaaataggggaggtaggaaggcgtaatttggccgaaaaggcaagggctcacccggcctctcctgtttaaacgcaacggtcgtgggatctgggccgtcggatctgcatcctgcggcggaggagtcaccccgcggccttaacggctacccgcaccccacaaggcccgattcccacatgtgctttcaaattagaagctggtctcacttgtttccttctcccctcctcatctcatcgccagccaacaccttttaggggtctatttttagtcacttgcttcacaattctcctttaaatgcaccccccctactgtcatgtcaggttttattaacaaatattgcttgattcgaatgcaacagattttgcaaaaactatcttccctgttacaaagataattatatatcatggccccactcaatatatcgcacaatacaaatcatggtagtaacttgtacaatttggttagcccttgaatcttaggttttcaatatattcttataattttctgtttaccaacacgcagaataccgggggaaatatgtgtgctctttcgacaatagacccactgttttactttgcagctgataagccgtgaaaaaatgaacgaagcaaccaaaaataatttatagttaaaaagtttatatttatgttcttagcaattcaaaagccaatgatagaaaagaaactacgatgaaaaaaaactccaaaaccaactctaaaattaggtttaaaaaaattcaaaattttgtagtggctagtaagccaattagaaaacaataggtgtgaatgaccttttttttttgccaaagatctaactttacaaaactatgccatgtttatatcatgtgtaatttaattagttgagttcataaagctttcattatctttgaaacaactaaggacataaggaacgtgattaggttgtgttcttatgagtcttcctcttggcacgcaaatggag

SEQ ID NO: 22737 - DNA, 19684 bp, Oryza sativa
agaagagtattggaacacttaaaacatatacaagaaggtcaaggaaaaactacctcagtagaggggaagtaataaccagctcaatcttttgtgcaagtccactttttttcacgtgctcacgcaggcagtcaacctacaaatgtacacaaacaaactaataatggaacttgcaattatttttttttgcgctgttttcctgcaggtaggggctaggagatatatatacactaacataacattttgcatctgatatgcctggagtaccagacatttctactttgtataagaacatgaataccattcatgactaaaaatataaccttccatgcttcatccatccacatggaagtttcacacaaaatcagtaaacgcaatacagtgtttctttgcataagccagtttatgaatgaaaagatgatctcgtcacacaaagtcagatttttcagggatgtaaaacgaatatagcaggccttactttatgatctcaaactaaaagtataaaaaaaatctttctgttaaagattttttgcatcatactacttctgttcatttttacttaataagacattttgcatcatactacttctgttcattttttttgttttataactaggtcatcgatatggtccacaatgcatattttatgttatcttcaattttttataaccatatgaaagtgtctttcatgataaatgtactaatgtcattttcaaatatcagaccatcatagttttacaaatattagtgatgtgaaaatggagagtgtaagcgtcttcagaattctatttatttatttatttatcatggatgaggatgagttaataccgaaatcacaccaagtgagtgtggattccaatattcattttgtgcaacaaatttactttggtttgattgaacaagtgaacaatagaatatcagaaagaaggaaaggtcactgtagggtggtaagagatccactcctttgtgttgtatactgaactaagagcccagactagcatgattgaaacaggaaaagtacgtagatcaatttgtgaaagaaagaaagaaagagagagagagagagagagagagagagagagagagaaggctgaaattacttggttccagcccaatggagtaaggtgggcgtcaaagagttggggcgacatgtaggcgctgtgatccttctcgccttccacattgtgaacaccctgggcatgcctgacctgcagggacaggaaaggattactgatggctaaggaaatacagtacattgtgatcgatgagcagtagtaggagtatttggaaaagcataggaggaagtagtaaccaggtagatggttttgcagcggtggagaggatacatggcggtggtaggaggattggcgtccattggagctcctaaaagacaaagaaaatagaatctgcgtccattagaataacaacagtgggggttaactcactcaaaaaaataaaagagcagtgaaaaggaaaggaagaaagaaatcctttaaatttgcaggaaggaagaaattggaatcggggagggatcgttgggtttggggcccggccggcagtgatggggatttttgtgtggatccaatccgatccgatgggatgggatattgcgaatgtacagatagaggaagaagctaggagaggagaggggatccggagaaagaagtggtcgtatgaatgaatcaggcggggcaaggataagtaggtggaagctatatatgaggtacctgaggaggaggaggaggaggaggaggtgcagcgaggaagaagaacaagggaggtggggaatttggcacggcggcggggaaactgtccgactccgatggtggtggtcgcggcggcgaatacagtgtgcagatgcgagtgctggagcagctggaccattactactttgaggctttcagctcgtgccaaaaaaactgtgagtcgtgtcagagttgggcacaaagaaagaaagaaagaaagaaagaaagacggggatgcgttcggattggctacttggcttgccacttttgtttgtttatttgcccactcacccaaagacacccacagatctggagctgctgcttcgctcctctcctactagcagtagtagtaatactctatgaaaaatctatttactattagccctctgacatcagtttttctgtattgctggaagaaagatggtgcgagagcaagtttaatagtatagccaagtatagccaatgtaatagtcaattcatacaatagttgcttgctatactattaatacctggtcctatatgtcatacacacattaagtcttaaagtccatgctgcagctgactacagatttatagcatatgctgctcttctctctcttcctttaatctctttaaaatatgtttatacagtgtgcagatttcagcgccagatacactgacgttgtccttttttctgtgcaaaagatgcgagtagactacttaataaggccgatcacagtgcgggaacgtggaccggtgctccacctcgccagctcggatgtgggcttgcgtggagcgaggaagcatgccccaacagagccgctcgcccccacggagggcgacaagaaagctccctgttgcgagttcatgcgcggcggagaaaacggctagcacccgcaccaaggacggcgtggcttcgaggcgtcttaccctcgtgcgaagaaatccccggtttgctcacgaaaattcccctcccaccaccgagtcaagaaaaggcaagaaaattttggggattgaaagataagaaattgaagaacatatcgggttcaacaagatgaaaaaaagaaaaaggaagcaaaatcatcacaattcatagggccaaatcggcgttgccccccaaatccgctggagcagtagagaggaggcattgcccccaaatccggcgctgcaactcggatccgggcccttgagtgcagacaacaacgacggcctcctcatcaagtccgccgctcgaggtctccctcggcgaggtcgccacggtggaggcgtcccccgctcgagcgtcgcgtcaccggagtagcagagaggaggaatccaccatttggcatcgcgttgtccactcccgccgccaccaccgctcccgagtccgtgcaggaggagaagcgagcggcgcagtcgacggcgagacgaggcgcatggcagcggcgtccctacgagggaggagcggcgggtgaggtggaggaggcgaactcgagcacgggagcgagatgaagggtaggtgaaggaaatgatttcttgcgctcggtcgtgctaaccgcacccaggtcacgcgcgttgtgagagtagttgctttgcacagcgatttcatccaattaagctacacaacttggggtgcttgcactgtgggatgggtgtctttgagccaactttttgggttaggggtacgagccccatggcttgcattgtgagtgccctaagagcatcaccaacaacttacgtataatctttccccaaaaaattgtttgtgggtttcctaaattgaaaataggaagtaaaaaaaactcctccctccaacagatagcctaaattcaatccccaaaacttgaaagtggacccttctgttaaactacatatataggaaattcctttttttttctttcacgcgcagaaagatcgctttctccacgcgtggaaacgggaagggagaggcgggagtgcgagattgggagcgagtttcgcgtccgcatataaacggagctagaaatcgggagaagggaactccaaagctcgggtaaaagagtaggagatttgttgaagctgttttttttttactaaaatctctcaaaatcagttttggaaatcagataagtagactgttggtgatgctctaagtagctgaagtgaacatagcctggtggttgagctcttttgattccattgtacaaggttcaaatcccaccagcccgaattgatttttcataaaaatgtcatgtgttttgtataaaaacttaaacatttaaaaaatatatcacattttttaaaaatatatttttatttaaaaaaatcataaaatttcatgtgttttgtttaaattaaaaaacttgaacacttaaaataaatatcacattttcaaaatttatttttatttaaaaatatcccgttcagtacatatttaaaaatagaagaatggattaaaaaaactctttacaaagaaaattcaaacagcaagttgataaatatgggtaaatgttattttaaaatgtcacgtgttttgtttagggtttagggtttaaaattaaaatggcaagttgagaactaagggtaagcggaatttttttttgtaaaaagaaggtagaggaggggttcgaaccttggttgcatctgccaccaagctaaaccaaaccacatgctttcacacctatttagacggtacagtggtcagtggcgcaaagatcccttgacgtggagatttcgtgccaactcaaataagatcttggtgcgccaaccccaatgtgccacgagaatgctaattgcgcgtacgcgccgccggcgcgtacgctgccaaaaaaacccataaaagcccgcgttcactgccaaaagcccacacgtatgtttctttcatgttttttttttccatttttagcagccacgtttctttttttcccttgaaactttcaactcagatttaaaaattttcaactcaaaatttaaaactttcaactcgaaatttgaaaactttcaattcagatttgaaaactttcaagtcgaaatttgaaattttcgaagtcaaactttaaaaactttcaactgaaatttgaaactttcaactgaaatttgaaaactttcaattcagatttgaaaactttcaattcgaaatttgaaattttgaagtcaaactttgaaaactttcaacttttcatctcaatttttaaaaactttcaactgaaatttgaaactttcaactgaaatttgaaactttcaactgaaatttgaaaactttcaattcagatttgaaaactttcaactcaaatttttaaaactttcaacccaaaatacaaaaaaattctaactcggatttgaaaactttcaaatcgatattttgaaaaactttcaaatcgtattttgaaaattttcaaaatcaattgttttcatttttttattgggaaattattgtagcattttcactaatcaccatgattaacgctaatggtcaggattagcgacgtcgtcacacgcatcgttaaatgtcgctattgaggatgctgaggcccgcgtgcgcgcgagttagcgtcctcgcgcgtacgcgtgctagccatgcccatgcgctaatgtcacggatcatttctaaaattagtttttatgtggtttatttttaattaagttttatgaaaggatcaatttgttaaattatcggtatattaccactatacttttcatcttaaaaatacttcagtacaagcaaaagcttcgactgtacaagtatacttatctattggcacacatacctactatttacatacacttctattatagctttagcatttatatttatagtcgactaaggcaaagtttgagaaggagatagagaagaatgggaagatacgtaaaatgaggtgagctattagtgcatgattaattgagtattaattattttaaaatagattaatataattttttaaatcaactttcctatatataaaatttgtgcaaaaaaactcaccgtttagtagttcgggaagagcgcgcgtggaaaacgagagaaatcttctctctgtcacccctaccgaacgcagcgtaagtgttcttgcagataaacaaaagttacattaccatgatggccattgccaattcatggacttaaaaatagagaaaattcttcatataccactcaaaatttatgaatttccttatatgccatccaacgaaaatttacatcctttatatgccactattgaggtcaaactgtcttaccttgtcagttttttttttgcgaagcagtagcatataaagaaatacttccttcgtattttaatagatgacgtcgttgactttttctcacatgtttgatcatttgtcttattcaaaaaatttacgtaattataatttattttgttatgagttgttttatcactcatgatactttaagtatgatttatatcttatatatttacataaaatttttgaataaaaagaatggtcaaacatgtgagaaaaagtcaacggcgtcgtagtatcaactttttgatggtatacaaggaaactagtgagttttgagtggcaaatatttgagtgtgttctgtaacgtgtttcataaaaatgtacttccaaaattggcttgtgtggagttgacttggacttggtgggctcgacctctagaagcatcgatctcagtaatgtttcggtcagccatacaggcacatataatatacagtattaattcatgtaagatatccatactccatgtagtagtacaagtcaaaggcgatccatccaatgccaatttgtattttttcttttagagaagttctgatccattaccgaaaggacatgcagaacaaatgctacagcacatcaggcttcagcttgtgggcttgctggctcaaatctatataacctatacaatacaaatgatcctctcatatagtgtagttattaatattttttttatgtggtgttttcacgtcactttaattatctacaagccacataggccttgtttagtttgagaaaaatttagatttaattgtcacatcggatatacagacatacatttaagtattaaacatagtctaataacaaaacaaattacagattccgtcaggaaactgtgagacgaatttattaagcctaattaatccgtcattagtaaatatttactgtagcaccacattgtcaaatcatggcgcaattaggcttaaaagatttatctcgcaatttacacgcaaactgtataattggttttattttttatccacatttaatactccatgcatgtgtccaaacattcgatgtgatgggtgaaaagtttttgttttgggaactaaacaaggccatagtcgcgcatagtcgcgcgttgcgcgactgttgattccgtataagaactatttgttatatatgaggttttagcatgaattaatttatttacaaagtatctattggtctagctaactatacatttaactaaattgtactatatgagaaatcactataagcttcttggtttttattttttttcattatctttgcctcctctctctctgtaccatgtgccctagaaatctccggaaatttccatacgtttatccaattgttattttttagtgcatatgtaactttctgatctaatggctattatttattcaacggttgatatatttttgatgatgtggcgtgttctcatgtaagaaagcttgcagctttcactatataaaataacataagataagatatcaattagaatcacacttaattaacgtcggagatcatcccaaagtcatattattattgatcattggattattttttgttggcttatatttctattagtgatacatgtttcatcccgtgcatttctttctcctcatcatggttagcataaccatgcaacctcaattaatcaagcaaacaatagggcaccaataccatgcataaatctaaacagtcctttaccatcttgttttcaatttgtgtacatatatgcttaatgaacatatcacatgtatatgatagcctatgcatttatggttgtctctaaattatatttaaataaaaatgatcttctgttttaataagatagttcaataatcgatctttcacggtatcaacatactatcataataatagtatcaatttttttctatatgtcaagtttttcttataaattataattaatattttgtatttctattttgacttaagttatagccagcatttttatatatacctaatttcttgtcatcaaaattgcaaacgtaagttttattggatggcactaggtgatgcatgcatggttgtgggatgttgggcctggatagtcggcactaggggccggccaccgccgccacttgggggaggggagggattgatggcgcatggacctcacctccggcgccgccactactttaattttttcgatcgggagaggcgcgagtgttggggtgagaagcagcacaatatacatatatgtactatgggccgatgcacaatatatttagcgggccgccaattgaagcccatttctctggctaactgcacctaatagtgtcaaacttaagtgtagcggcaaaatggacatatccgagggatgattaattgttcctagcagatttgaaaccatggaccggatccacagcgacgacatggtgatggtggcatggctgtggaacaggctagtcctcttcgtatatatacatgtagcagcggttacagccaccctaaaattctcagttcaaatctttatatgagcgaatttcaaattgggttgttgtctgagaggctaaggttgtgttcgtttcaggaggatgggaactaattcctcccgcacggaaaacagaacgatccattagcgcgtcattaattaagtattagctatttttttcaaaaatgttttaatatgattttttaaagcaactttcgtatagaaactttttacaaaaattgtactgtttagcagttccaaaagcatgcgcgcggaaaacgagagggggagttgggaaccccgagatttattcaagagtactcttggcagcacggataaatattagatgtttatttttaaatctagcggtagtttacagatttcactacataagtgatttgcgctactaaaatcttgaactcttctatcaaaagtccatattcacacccaactttttgaaatatgtagctacagaatccataagataaattagcagccaggatctggaaaactcagtttttcagattcttaactagctaccaaatagcaattctatgctcttccaaataggtctgaacctccttatccgttgggttacattttagctagacatgtttggttccatctccctcctggctcttccagtaatatattggatcgaaaagaagtatgacgagactaattggagaattccggccgtcacctagacatcccattaattatttaattaaaatttaaagttagacctgggcgatcgatcgagtacttaaactgatggtacttcagttattagtcgtcaaacctggttaggcgaagtgagactttatatgcaatttagtgccctttataataaagaagaaaagatgagatcgatgatgtgaagttaggtccatcatgtgtacgtgtgttctccttccagaaaagaaatataatcaagtccacacaaagggcataattaatctgtgatctaggccacaatgaaattagtggaaacacctatacatatcaacaacacaaaagctaatctctaattaatacatatgtatactcacatgaaaaggacgacactacttagaaaattgattttcataggctgctcatgtttaactacgtatacgtattgttatagttttgtttggtgaaattataagcacataatgatttaatttattccataaatgaatcatgacattccatatgtaaactagcataaacacatcattagatctacacatgtaaactaagcagtaaaacatgaacagatcaaatatgcgcaacatgtcgaacacgtaccgaggtggcggaaataccggttgctcggcaggaactactcgcggttgtgggcgtcgacaaagacgcgcagcacgcgagcggagaggaaggcgagccgtcgcggacgaacagggagcagtcgcacgaagcgcttcccaaaaaccttattgccgccttctctcggtgcaggacgtcgaagacagaggttccggagacctgctctcccgatcgccggtgcacgccggcgagcgggatggagtagtctacgagcgacggcgcaccacagagtaggaggcaaaccctagattgatttcgcgtgtgttgcgtgaaggcggcggctcggtttatatagagataggtcgcttgatcagggcgcccgcacgatctccactccacgtaacagaaccggataagtcgtgcgtaacttacccggactccacgccgttttcacgcaccggatttttcggaatgtttccaaaacaaaacaaatccgaatttcccgtagcaaaacaaaactgcaaaaggatgctgcatctacgcaagggtgaggagccaattttgcggaccattcgacgcgtacgccgtgcatgcgcgtgttccccctcttctctacaccacacatgcttcaagtggctagtagggaatcctcccttttaaggagatccccctctcctagaataagcaatgtggtactaaactccacatgcatgccatcccatgaggtgggcttttgtgatttttaaaagaattaatctttgagtggggtttagcccatccattaattccaacaatcccccaccaaatctcaaaatcccactgagatttgccttttccaatgtactgtttatataccagcggttcgatggagaccgattaaggttgaacatccatctagaactccaagctacacttactcaacacttgaacaatggactacaccttgaattgcaagtcttgtgcaagcaagtttcactcagagtcttatctggtactagaccgtctataaactacccctcgggtgtagcgtataagtcatactcctaggtctttagtaagcttcctagaagattcacccaaaatctccatagactgcgaccaacagtcaagctcacaaaggtgagttctttcaagaatgctctgcaagacatcatcttcgctaattaaagccaatagaactcattaagtcatagccaagctgccttgcagctcatgagagtacatgcatcttcacttagagagagtatagattagtactctcctctagtttactaatggtttgttcttcccatattctaattcacgagatcttcgatcacatagattgggttacaaccatagtataattcacatgggtctcaaacccatctccttcgatgcattgtctatcacatttcgtgatagtcccttcgtgaagggatctgccaggtttttagctgtttggatgtaatccaacgttataactccgaagtttctcaatttcctgacagacttcaatcgtcttttcacatgtctagacgatttcatattatccttataactattcactttgacaattaccgtttgattatcacagttcataaggatagccggcactggtttttcaacaataggcagatccattaatagatcacgcatccattctgcctcaacagtagcagtatccaatgccgtcagctctgcttccatggttgacctcgtcaaaatggtctgtttggaagacctccacgaaacagcaccaccacctagtgtgaagacatatccactagtggctttgatctcatccacatcagagatccagttagaatcactataaccctccagtaccgcatgatacccagtatagtgaagccccaattccatagtaactttcagatagcgcattactcgctcaagcgcacgccagtgatcatctcccggattagaggtaaaccggctcaacttgctcacagcaaaggagatatcaggcctagttgcactagccaggtacatcagcgagccaatgatttgggagtattccagttgattcctagcaattctcttgttcttgcgaagcaacaagctaggatcataaggtgttggagaaggcttactatcaatgtaaccaaagtgattcaagatcttctccacataatgggactgcaagagtgtaatcccattctcacctctaattagctcaatgtttaagataacatcagctactcccaaatccttcgtatcaaaattttgagacaagaatgatttaacctcatttatcacctcaaggtttgtcccaaatatcagtatgtcatcaacatacaaacacagaataacttccttacccccaccatgacaatagtacacacatttatctgcctcattgactgcgaagcctgcagatgtcaatgttttgtcaaatttctcatgccattgcttaggagcttgtttcagaccatacaaagacttcaacaatttgcacaccttgccttcttgaccttcaactacaaacccattaggttgatccatataggtctcctcatccagctctccattaagaaaagttgtcttaacgtccatttgatgaacgagaagaccatgtgaggctgcagggaaagtagcacacgaattgtggtcaatctagcaacaaatgagtaagtgtcaaagaaatcttcgccttctttatgagtgtagcccttagcaacaagccgagccttgtacttttctatagtaccgtcaggcctaagcttcttcttgaacacccacttgcaccccataggtttacactcatagggtcgctctgtcacctcccaagtcccgttagcgataatggaatccatttcactacggacagcctccttccagtagtctgcatcaggagatgcatatgcttctgaaattgacttaggagtgtcatccacgaggtacacagtgaaatcatcaccaaaagacttagccgtcctttgtctcttactccttcgaggagcttcactgtcatcctcctcagtgacatgttcatgtgtatgttcagattgttctggtggtgtgattgaactgggaattatttcagcgggttggctataactactatgtgtatccttcattgggaagaagctctcaaagaaggtagcatcacgagactccataattgtaccatgtcaggtacctcagatttaactattaaaaatctataggcaatgttgtgatgagcatatcccaaaaagacacagtccacagtcttaggtccaagtttgcgcttcttcgttattggtacattgaatttcgccaagcacccccatgtgcgcaaataagaaagtgatggttttcttccaatccatatctcatatggtgttttgtccttatttctgttaggaactctgtttaacacatgattcgaggtcaacaatacctcccccaccatgccttaggtagtcccgcgtgtccaacatggcattcaccaagtcagtcagtgtgcggttcttcctttcagcaatcccattagactcgggagaatagggaggcgtcctctcatgtatgatgccatgttcctcacagaataagtcaaactcgtttgagaaaaactctccaccacgatcagacctaagtctttttatctttctgtcaagttgattttcaatttctgccttataaattttaaaatagtttagagcctcgtctttcttttcaacaagtacacatagcaaaatctagtagcatcatcaatcaacgtcatgaaatattgttttccacccttcatcaacaccccattcatttcacaaagatctgaatgtaggagttctagtggtgccaagtttctctcctcggcagccttgtgaggcttgcgaggttgcttcgattgcacacaactatggtacttagaacctttgacaatagaaaacttaggaattaaacacatgctggaaagccgagacatcaagccaaaattaatatgacataaacatgagtgccaaacattagcctcatcatccacactgccacaaatatggttcacagacttattttagaaatcagaaagggaaaagcggaataggcctccgcactcataacctttaccaataaaatatccatgtttagacacgactactttattagactcaaaaaccaacttaaatccgtctctagtcagacgggagccactaacaagattcttgttgatagaagggacatgctgcacgatctttcccgaagtaaacttcagatctactgtgccaacaccatgaacagaagcatgtgacccattccccattaggatggtggaaccccgtgcgacctgataagaagaaaacaatgagatgtcagcacaaacatgtacattagccccagtatcaacccaccaattagtagactgattaactgaaaaaacagtaggtaaattaccatacccgctttcatctccagtgttgccaatggttacattagtagacttagaagtctgccctgcaggtgccttcatccccttgcgttgtggacacgtcctagccagatgactaggttggccacacagaaagcaagtcctctcatcctgattagtattattgttgttcttcttttgcttcttgaagttggtggtctattgagctttgtatttccccttgctcttattctgggccttgtgcacaacattggcactaaactgcccaccatcgcccttagacatggtgtccttttcccgagctttttcgtcaacatcaagagacgctatcaactcctcaatggagtattcctgtctcttgtgtttgagtgcagtaccgaaacccctccaagatggaggtagtttcgcaataatgcactcggccacacatttgtcgggtaagacacacttaaggagttcgagttccttagccatggtttatatctcatgagcctgctcgactacagaacggttgtcagccatattgcagtcatgaaattgctccatgatatatagatcattgctagcatcagtagcaccgaatttagtattaagtgcatcccacaactccctagcgtcggtcatacgcatgtacacctcgactagacgatcaccaagaatgctaagaatgcatcccacaaagagagtagtggcctcatcgaattctttctactggtcagcagtaagaactcccataggtctaccagcactcacccagaagcatttcgtagctgtcagccacatgatgaccctgatctgccatctcttaaagtgcacaccggtgaatttttccggcctcagtgcatcggcaaaaccagccatagtaaaaccacagtgcctataataagttttttggattgttgaaattataagcacataatgatttaatttattccataaatatatcatgacattacagacgtaaactagcgtgaacgcatcattagatctacacatgtaaactaagcagtaaaacatgaatagatcaaatatgcgcaacatgtcgaacacgtactgaggtggcggaaagaccagttgctcagtaggaactactcgcggttgcgggcgtcgacgaaggcacgtagcacacgagcggagaggaaggcgagccgtcgcggacgaacagggagcagtcgcacaaagcgcttcccaaaaaccttattgccgtcttctcccggtgcaggacgtcaaagacagaggttccggagacctgctctcccgatcgccggtgcacgccggcgagcgggatggagtagtctacgagcgacggcgcaccacagagtaggaggcaaatcctagattgatttcgcgtgtgttgcgtgaaggcggcggctcggtttatatagagataggtcgcttgatcagggcgcccgcacgatctccactccgcgtaaccgaactggataagtcgtgcgtaacttacccggactccacgccgttttcacgcaccggattttttggaatgtttccaaaataaaacaaatccgaatttcccgcggcaaaacaaaactgcaaaaggaggctgcatctgcgcaagagtgaggagccaattttgcggaccattcgacgcgtacgtcgtgcacccgcagggtgaggagccagttttgcggaccattcgacgcgtacgtcatgcacccgcgccgcctgccaggctaggcgagcgagcacgcgcgtgtgttccccctcttctctacaccacacatgtttcaagtggctaggagggcatcctcccttttaaggaggtccccctctcctagaataagcaaggtggtactaaactccacatgcatgccatcccatgaggtgggcttttgtgattttccaaagaattaatcttcgagtgggccttagcccatccattaattccaacactattaagtaaaaactttaaccattaactattgcataaagaatacaaaatgtactatcaaacttagtggtaggggtttattattgaccattttcattagtattacctcatatatatatcatgttgatcactcctcatgtcgcgacgaagatgtcgatgttgagcacacttatccccaattgtcttgcgtatccttgacattgttagtagaaaacaagaaacataaacgaaagtatacatgttcctatttactactaggtagtggaggctcaaaagataaacgctcaaacttttaaccaagctcttacaagttcttactaatgtaagaggaatggtgatatacaccagcgcaaccaattaccctaatgaaggttggatgtatcgatgccttggcaaacacttgttgtgcggctgcaataaaatttgtggaggtgtaggtaggcttatatatgtagcaaaggaatagcaaatactcaaatcagagaaaacaaagttgaatatcgttcaaagacagtaccgtgttggtccttggctagaacgtactaagagacgtgagcctagacacagatgataccacaacatagcactaaaaataactaagcacaactctgatatatgaaagcaatctcaaagataataattaagtgattctctcttttcattccttcttctttttttctttctttttttcattctgctcttttcttttcttttatgtgcggcttttcttttctatttttaagcaaaacagtctcaagaacctcactgcaagattacatgtactcaaatgtaaatataaaaattataaggacttaaatataaaagttcaaacccaaagatttgaactatacaaaaaaatgaagtgatgaagctatgtcagttccatttttgcaaacagattctaaatccgatgacgaaatttttttcatcaaggtgtctagtaactcacggtatggtagaggaaacaaccgtactgtgggggtggaaggatacggtcatttgtccagatttggtgcacaagcacgagataaaatggaaactgacttttagccgatccaatctactatttctgcccgaactgaacataagtacttccaaaatccgttatagtctcttcttatactttttgtgcagcacaaaaaagcatggcaaaaacacacactgggcaaccctatatcaactccaaaacctatcgacaataccctaatgacataaacttctgagaatcgaaccctagcagcgagatgattatgttttcgtaggtcccgacgacaacaaagacacgtcagcgacggtgacagtggtagtatacgtgatcagaactagaaaccctaaatggactggacgctaagaccaacaatacgactcgacgatgcattgcaaaactcaacaaagaaaataccaaaaataacaattcagtggcacaaatatggctagataaatgatggattttttatggttattttcttgttataggtagataaaaattcactaagcaacgaaagctttgataccacttaataaaccctgagctgcacttgatacgctcacggctctggttggcttgatctttcgatgagtggatgattacaatttgggagaagcactaacgatctgactacaaccatacaagatgttgtgttgtgttttagcgaccaatacacctctccgtgggttgttgattttgttggtgcgaatcaaccttatgcctacaagtaaatcgaagaaacaagcaagaacaacacataaacaatctggtgttgcagataggaattgaatacacacaataagttggggttttaaagatgagtacttaggcggtctagccgacatgcgtaactagaatatagagtagcaatagctaaactttaatctaaacaaaacccgagaaaccatgaagaggtatctagctatttaaagaagtgggaggatgaccaagaggttctagtgtcatgcttcaccagattggggtgcactccacatgggctgcacttgggccaggtcccaaatgaagttatgagtccataagaccattataggtgatgcaacaccttgtttttgtgattgcggtcaattgagatggaatttggagatgagactcgatacggatccaaagaggacacctagagttttccatcaagtactgacgggccgaaaataaagctcgtatgcacattctatggctgtttgaagaaaacaatataagcgggtggccgaaccagattgcaccacttggaccgcttgatcttgatgtcttcaaattgatccatgatgcgaacaatcattgtatccatagtaggcatgatcatgtcatgggcactccttgcaagactgttgcagaggccatgccgtagtgccacctcatgtcatacattgctccaccacctaatctgtcaattgtcttgaaagtatctcttttactaacaatgtaaaaggcaattgtaggcactcatataaacatacgcacactcactatatgaatatacacacatatactctaactctacccatatgagagaaaaatataaagattgctttgttcataaagtaatctttggtatatatatggtgagatagaacttattttagtattccttttacaaatagttaataaagggtttagggttcattgttagccataaagggtataaaggcctaaaccctgtatacgtatctgcgggtgctttcttcctagttagtcataaaggccatgcatccatccggttcattgttgactttgctggtgaatctcattattccattatcgatcgatcgtattaattagcctattaatcaaaacacacacacacccgcgcgcatatattaatttatagagtagtatacacacacatatataatgatcaatctctgcaactttcttctaattaattaaactgcataatatatgcaacatgcgtacgagcatgtgcagtaggccaacaagctgcatgcatttgatcatatcttcatttgccatatactagtagtttaaaattaaatcgtactacgttaggacagatagatagaggccagtgcccctagtaagagctacttcaggtgatatacgcaatgatccattccatttcttaaatctggcgtaaaagttagagggtgatgtggatggaggtggaggtaaggtgaagagagtgatcgatgcagccatgcagatagggacaacctacacattaccgatgatatatagttctacttgatcatagaaatatatgttatgaaagttattcttatagtgaatccaaaattatgatgttatacttatatgaatatttaaaaattaatggccagagatacaaatgttaacttaaagatatagaacgataagaaattaatttgaagcgcagagagagacgtaatttaggaaaatatctattatataataaaagttcaatctttcaaacgctctcaagctgctacgtagtgctcccaaaatgcttttaaattatcacatggtgctttaataaaataaaaaaattctaaaaattctataaaaaagcaatagcccttaattttcacttaaattagtcaacacattgttttataacattagcttatatctattgaaaaaaataatccctccctcctaatatcaagaaaacgtacttacctaacctacccacaaagtgtcagtgttacaacctacccacaaaatgtcagtgttacggattagttatacctcctatgttttaatttgtagccaccaggaataccgcatatatagtattatacataaaggtatattcaaatatggggaatataatgga

SEQ ID NO: 22738 - DNA, 36356 bp, Oryza sativa
aaatcaatagctagttgtcagatcaattctcggtgaatactaattggtaggctaaatttagctagcttgctccccattgtaattggtatgatacatcttagagctattcaaataaactggattatggctattacccatctaggggcctaaaccagtataaaaatactttgttccctgtcttttaccgcaatcttgcgcatactttagtatcaacgcccacaatactatactaataccgttgtcgagtataacccatcgatagaattggggaaaacatataaagccgagaaaccacactacatacatacccctgcatagtacgatcatagaaaaaacaaccatccttaaactttccatcataaagaaaactacacataacatgcacaattaaaatagtgctaaatacacgacacatggagctaacatgtgttataaaaaatttccaaataatctcaaatcatattttatggtgtcagataaatgggaaccagggtctccatatcagatacttgggcgtacctgccgcctgctcacgaatgtggttccccggctatgctcggggcatatccgcccacagtgtgttaatgccaaaatttgataaaattctttattggatttggttagggaaagaacataatcaaccgatggaaagcttatctagaagaaaccgagttcaagaaagaatcgtcaagaccacgacatggtagcttaatttatctattaattatacatggtttagtatttttcctttttatctttaggaaagtttgattagtgtctgattaagacttgtgtattatctttaggaattgtgagtcatgtccgattgggactcatatcagcccgagattataaatatgtacacccagggtcttcgtaatctatctccatagaccgatgcaattactttcgacgcatcgccacccttttatcccagcgagttattagtttcgagcatggctgcattggttaagttcgatctccggcaaggaagttccatcaactttgcttgtatcagcctggcgagaactttctcgattaagtctaatattctatctaggttgatgcaagcattgcctatttgatatattgattctatcttcaattgcattactgtttagagttgtataatcttagttaggactttcttagttgggtctgatattctagctaagttggtagttctctaattgtactattattttagatagatttattatatccatcacgtttgtatagatctatcggctaagtaggtttttcttattatctttagtcttatactgtctcggtcaggcccaatctattagatttttgctaataagtttaattcttgtaagccggtaaggtttttatgcagcgttcattggagcgctacccgatgttatcattattttgggcttcaactatcagatgtatcagttagttagccgatatacactttaatttacttacattagatctccagccaatgtatgttttaaccatcagatgtacatctaccacattatattagttttagacgatttgttcacattatattatctcattgcatcttctgagttacatcggcttacactcaaacttgtataatctttagttaaatctatatttatcaacttctatcttatattgtctcagtttggtctgatctatcaagattgcttttgataaagaacggttgtttagttccagccgatgataacatagtttagttccagctggtgataacacaaatctcattgcttatctgattatctgaatttacattagacctatagccgattattcaaaaccctattgacattggttggcctcgcaacatcatatcagtttattggtcgattgactccttgatcttatacgatctatctatctatctatctatctatcttgctagttgcaggatcaaattaattgttatgccctacactggagataagcatatttccaaggccttcgtgtgtcacgaagaatttcacatcagcagggtgcaacccccaagggctatgctcagggcacatttgtcacctaccctccgagagtggccccctatgggttgttgttggtatttattctgaccacataatagtctgcaaacgcacagataccgttgtaaccttcacccaagggtattccaaggtatcgtattcacatggaacgtgtgtgtataatctaagaacaagattcttccaaggaaaacaactaaatggtaggtataggatagagaggactcccatgggttagttatcttaatgaagttatggtaaaactctatcaatttcttcgacactggcgtacccctggtctgcgaaggaaactctgccctatagctctaggctggcaccacctgccgcctgcttctacaacccgtgaaacaccaacaaacaaaggtaaccttctacctagataccggtgccggtgacaatggcaacgacgcgctgtccggctcaagtgctagcaacaagcggtccaaatctgaggtatgggccaactttgaagaactctttaaatcacgcaatggcaatcagattcgccgctaaatgcaattattgccataaaacaaatattcacatgcctcccttccatgagatgggaccttgtaatttacttagaaattaatattgacatgaaccttagcatacacattaattccaacagttcgcagacactactgcatcggaaaggaggaggtggccaatgggggcaagctagggcgtggccaatggcagcctcgcattttttttctcgagtggtgtttgaatcttataaagatgaagataaaaataaagattaagtgtttaatgtaaaacaaggtggtaataatgtatgattaattgagtttttaattattacaaactttaaaaaatcgattaatctgatattttataacaactttcatatagaaagttttcacacaaaatgcaccgcttagcggtttgaaaaacgtgccacgaatatctaaaagtttatccaacttttgttggagaaaaaaacagcgccggtcaccattgtaaagggaaaagtgtacgcaagcggctattttaaagaaccaactctgtataaacacatttgttgttacaccaaagaagatgattatcaatgttaatactgaacaaagacttaagatatattgcagctattttccggaacaattagttagtcaattagggccacaaagggttgaatgacccaacaatatagcaccccggttttgatctatttccaccggccaaccatggattttcggctagaatttgagtccagtgatatatatatctaatttattttgaacgcggccatgtggtttttaagatggctacagtaacctgctgtcgcattaaaaatagaaatacgagagtttataatcaaataaggttgcagttagtcactgttgtatggtcgacaataaattgccgtatcctttagcagttggtgatgttttatttttctaacaaaaaagtatcgttgttgtttattgaattttatttattttcttgtcaattggacgtttcggtcggtgcacttcaattccactaagcaattgaagtgaatcggaggtcgcatgcatgacgacgtggccggctggctaatcattaatcacatcaatgatatatacatggaagctactctctctgtcaaaaaaaaactattcctaccactattcctagcattccaaggtaggatttgtgaagatgaagaatgattaaaatgtccttaatcattggaaaaagtagtaaaggtgataggtaggtaaagggtatcgaagggataaaacttctcgttttacgtgctgagggtaagtaggatgatagaagttggttttgtgtggaacaaaatttaaactctagaagttgagttttttaggacggagggaatagagtaggatcatggatccaaacctccctgtaggatgtagtttttggcattttagtccttcaacgaacttattttataatattagcgtcaacctttgaatggtacgcagaatatatttaggaagagaagagactacctgtttttgaagaaaacaggatgtgactagattgtgcacggtagtgtgttagtctgtttatgcgaaaacatagcggcctagaagttctgcttagctccagtgtaggtccaaatatcgcttcggattcagaacatgtcagttggttcaatcctgcaaccaacaagaataacaatatgtttgaactagtaaacgatagtcaattggccaataagccaatgacgtatcgtcatgacctagccgagccgatgcaactgagctgaatcggctataaagtatggaatgaaaagataaatatgaaagatccttacacatgttccatcagcaacagaaactaacaatatgtaatctataattcaagattttcaagcaattgggatagattgaactaaaccgagattttataaactgcttgtatccaagattgaataaattgcaaactacaagtatttgtatcatagccgataagaccgtttaggtaagaaaagataatgtattggctatagctccgatacaaccttatacaaaatatcaatctaaagcaaatatactaaacaagcattaattctaaatatttaaatctggtcaagattgaatacaagcttagcatatttgaatgaatgattttcttatataaggggcttatataacatattaagcaatattaatcatattaaaaaaacatgtaaaacaaatatattaggtaagattggctaaaactcgaatactatccttcttggcaatcaatgagcaagttagttcttacaattccaaacatgactcagtagttcaaactttaaacccaattaatgcagcactaagtatgaaaggaaatataaggtctaaacaatcgagctcttgattgattttcagggtggtagatacccttactaatctaaatcaatgaaaattgtttagctgatgtcggtgaaaccctaacagatcgagtcgattgttaacgccaaaatttggtaagattctttaatggattcggttaaggaaagagtgcaaccagctgatggaaacttatctagaagtgattgagttcaagaaggaatcataaagaccatggcatagcggcttaattctatctattaactagatgatgtcccacgctttgctgcaggatatatgttaaataatggagaaatgatgaaatgatttggatggaaatattatgaaaatgatttgagaatgatgatttagcatatgtatgtttagttttagaatgaagtaaattgtagatataattactatatgcttgcatgttgagctttgtgtgcttaatgggttgatgtggcatgcttgcttgtaggttataggagtgctaataaatactatgcttgcatattgagctgtaggtgtttagtgggcattagctttatagaaagaagggattagacaagatttagtaattcccttttatcttttggaaagtgtgtttagtgtccgataaggactttatgttttgccttttatctttaggaaagtttgtatggtgtccaataaggactagtatctaccaattggtataaatatctacacctgggatccctgtaaactatctcacgatgaatacaactactcggcgcatcgccaccctctttttcgaggtttttacttatcattggtagaacttggcacctgacgtgggctgcatcgacttcgatctccagcgaagggtaagtcctacattccaccggccctagctattgtatcgactacattggttttgtttaaggctgcattgcttcgacctcttggatcgctctggttcggttgatatatttgcctaccaatttatcatatatcttagttaatctaagtcgattattcaactttcttgtatcggtcagaacttttctagggttttgccagtatcagctaaaatgtttcgtcgatctagattagctaagatatctaccaccctgaaaatcagtcaaaggcttgattgtctagatattatatttcttttcatacttagtgttgcatcaattgggtttgacctactaagtcattcttagaaccatagtctctagcctgccttttgattgccaataagggttccatcggggtttcagccgatgagttatctgaacgttgcatcggcttataagaattacttacaagttggttttagccgattgtaacaaaggtgccattgattatctaatcgtttggatttagtgacatcgaaacaccagccgatgtatgctttaaccgtcagatcagtactcattctattatattattattagccgattggtttatgttggattatattattgttttatacattatcatcagccggttgtctttatattactcaagtgtcagaatctacactggacatacagtcgattgttgaaaaccctatcgacatcggctagtatcgacttattggccgatcaacactttgattttcactttataaatcttgtcagttgtaggatcaaactgactagcacacccgcatcttatcagtattttagacctgcactagagctaattaagcagatctcctaggccgttgtgttcgtcgacttagttcgcgccaacacagatctggcaccatcagccgagtgcgtatttttcgtcaacaccgatataggtaaatagagtcatccacttagattagctaagatatatgataatagacaagtcttatatcttgccaaagatcgaagccaatgcagctcgactcgaaacaagaactcatcgagacaaccaaaaatgaaaagggtggcgatgcgtcgagagtatattgaactattgttatcctccttacaagaccctaggcatatatttatacccataatacaaaactcatccatatcagacacgactcaaacttaacctggctcttatcctaattaacagatacaattatccatattagactcgatttcttgtttagaaatatctacaatctcttctctgagtccgacaaaaacacgacttgcttctatcggcaacacttagtcaacatggcaccgccgatgcctaccagctgattcattttctatttgtccaaccgaaatcatgtcgttgatcccgctcatatcttattccttcttttaacggaatatgccaaattttaccgtcaacataatcctaaccagcgaccactccatcgcatatatgaatccccctttagctaaaaaaattacaatggtgcatgtctttttttaacctttttaatgacctatatcttttaaatcacatattatttttaagatctatttgcatcactgtactctactcaaaatatgtgacaaaacgatatccatattgaatacattcaaacattttatcaattttaaataatttatgtaaattgtagaagtaacttagatattcaacaaaagtaactctctatagcattagaaataattacattatgactgagttcaagtaagaaactatgtggagtaaattcacaagtgtagagaagatttttaagtaaatacatttatgaaagttaattaaataaagtttgaaagtaatttttataaatcataaaagtaacttagtaaaaaaggaagtaagttgttacaacattagaagtaaatctgttgtagggataaaaacatgagtttatttggaaattaaatttaatcaacacaaattatgaaattgactaaaagcaataataaaagtatcaactcagagcattatgaatgtatagctagtaatttaataaaatctaaaattaatttatatatatgataaaagtaacttacatatataataaaagtaagttgcatatgtaataaaattattttacaaacataaatattttttcatcataatataatcatgtaagatcttgttataaagatttaattgcaacgaacacaatagtataatcggattatagatctataataagtaatttaagagaaaattttataaggaaaaatggacatgtatgacataatagaaaaaaaacatgcatgtctgtagatatgtagtagtacttctctgttgtatggctggcatcatttgttaagcctagcctatcggagttggattcttgagttggggtttaacagccgctcaagcgaacgaaactagtgtggcggagtgatttacaacgagggcaacatagctctaggtggtggcaaagagaaggctaggagtgtggagattatggataccccatacctccacggcatgtataatccgactgggtatggggtgctgtgacatcctggcccagggcttaataggattaatagaatactcatataaacaagttgcaacttctttttcggaagccaatctcccaagaactccagggttaagcgtgcttggcctggagcaatttgggatgggtggcttggcctggagcaatttgggatgggggaccgaccgggaaattcttcccgggtgtgcacgagtgaggacaaattgtgcagaaaagactattgttggtctgtgagggtagtctatatcctaggatatctgccagatgtagagagggcccggccttggagagtagtgttggtctgtgagggtagtctatatcctaggatagctgccagatgtagagagggcccggcctcggagagtgtgttggtctgtgagggaatcctaggatagctgccagatgtagagggtagtctatatcctaggatagctgccagatgtagagagggcccggccttggagagtgtggggcgtcacagatggtatcagagccaacccttgcagctatacgtatatatgaatatgtacgcgggcatacggtgtatacaggatgatccacgatgtggtcgtatggcatgacgtatgtgcgccgaaaattgtgtgtatatacgtggtgctaataggggacgttcctggcctgggttgaccgacgaggacgtcggtatcttaagggggtgagaatgtgacatcccggcccagggcttaataggattaatagaatactcatataaacaagttgcaacttcttttccggaaaccaatctccaaagaactccagggttaagcgtccttggcctagagcaatttggaatgggtgaccaaccgggaaattcttcccgggtgtgcacgagtgaggacaaagtgtgcagaaaaggtgccatgtatcgggaaattcttcccgggtgtgcacgagtgaggacaaagtgtgcagaaaaggtgccatgtatagatagaatatctttaaagggactcggattaaattccaaacttgtacgtcaaggaaatacccggatcctagtcggttacgattgtatcttatctgtagctacctattccgttaaggatatgggctgtactttgtaatacggaccccttcccctatataaggaggggttcgggtgcctctcggggcacgattttttcccagatcatacgatcaataatacactcggtggatcaatccccggacaggagtagggtattacttcttgattaagaaggcctgaacctgtataaaattccttgtctctaaacccatccacttttccagcttgatagccacccccttttagtattgccgaaatcttgtttcgatagttggcgcgccaggtaggggtagcgtcaagttcttcgccgactagtgcgatgggtttcgtctccagcatcgacgacttcgtcttcccacccgggcaggcgttccagttcggcagcctcgacttcatcaccaacgacttcggcaagatttctctcctcgactcggattcgaaccagtcgggaagaggccaggtctccgccccgttcggtatcccgaactcggccgagatctaccccaagatcatctcaactgagttggccccaaaccactcagacgagatccaatctactccaacacgatctgatcaaggcgatggagcctatccgccaatcctgatgaaactccccgatgatttggctgctgtcttcaccacaagggtgtcttctccccgtaggtctaggctggatccggccccggccccgatccagtctagctccagggaagtcggcgtcatactctagcctctcggcacggtttcgatggaacaactagacggctacctcagctcccctggtgtcgactcacgaccaacggagatcgtggagtacgacgacttcggctaccgctacgaccaccacaagctcgacaacttcaacgaaggctttgaagacaactacacacccctctacttcggcattttcagaaccgacaatgagacggaagaacagcgtcaagcccgagaagcagaagaacagcgcgtgcgacaagaagccgaacgacgccgactggaggaggagcgccaagcacaagagcgagaacggctacagcgtgagcaacaggagcacgagcgggctgcaaaggaggctgaggaccaatgacaacgcgccttggaggccgggcgacgagcacgagaactcatcgggcagcaagacgtcgatgggacggcggtttttcgcaccccacaacagaacgcggatgcagcgatcacccttctcgaaacctcctcaaggaagacgcacttaaccaagccaatcacgtcgtcaacatcttgaaccagaccaagaccatgatcgcagcttcagtcccggttaactccgcgagcgtccgcacgccgactggcaaccgagttccccctcttcgatctcaagactatcaccaaccaagcatcagcgtcgtcagcgtgggatccagtcgcaggagcagggatcacgacgagcgatccgcccactcgcctcctgaccgacgcagggagcgtcgagctgaacgaccccgctccccacatcgcaggcgtcccatcgatcttcgtgatactatcaaccagcgccgcgcgacgagaagctacgtcccccaccattcaccagatcgctacgacgacgacatggatggagttgctgccttcacaagcgacatgcgtcgagtggattggccagtcggcttcaagccgactggaatcgagaattatgacggcaccactaacccagagtcttagctcaccgtctacagcctcgcaatttgcgcagaaggaggagatagcaaagccatggcaaactatctgcccatggccctagcggattctacccgacaacgttcacgtgtcaacacttttgacaagatcatgaattcccaatgtctacatcatccaaattccaatcacacggccaaagattgctttgtctacaagcagttcgcacaataatatgccaagaacgcacgcaagacgactgacggagatcaaagcacgtcaaagaagaaggatgatgaagatgatgccccgactggttttcaagaccatcgcaaggaatttaaccacatctttggcggacccctggcttatgaatccaagcgaaagcaaaagctgaccgaacgggagatcaatgctgttcagcccgacacaccccaatatcttcagtggtcagagacagctatcaagtttgaccgctctaatcaccctgaccgagtggtccacccggggcggtaccgcctggtactagacccagtggttcgcaacgtcaagctccgacgatccctcatcaatggtggcagtgcactcaacatccttttcgccaagactctggacgacatacagattcctcgcacggaattgaagccgagtaacgcgccctttcacggagtcatccccgggctgtcttctactcgactcggccagatcactttgccggatactttcgacacttgggagaactttcgcacagagaatatttgcttcgaagttgctgatttcgagacagtgtaccatgtcatattcggacgcccggcgttagccaagttcatggttgtcccgcactacacctacatgatgatgaagatgccaggtccccgaggagtcatatccctacggagcgacatcaagcaagccgtcacttgcgacaaggaaagctgcgagatggcccagacccgcgagatcacgctcgcccgagaaaagatccgactggctgcgtccacagcaaccgaatgagaagtgcctgcaaccaagatgacaaagagcggagaaggcgacgccaagaccaagaagattcctctagatccctctgatcctacaaagactgttgtaataggcgctgagttagattgtaaataggaaagcgcgctcatcacctttcttcaaaataataacgatatctttgcgtggaaaccatctgacatgcctggtattcctaagagaggtgattgagcactctttacatgttaaggaagatgctaaacctatcaagcaacgactccaccatttcgcacaagataggaaggacgcgatcaaggaggaactgaccaagctgttagcagcaggcttcatcaaggaagtccttcatcccgactggctggccaacccagtcctggttcggaagaagacggggtaatggcgcatgtgtgttgattcaagtcttgtcccaaagatcccttcgggttacctcatatttaccaggtagttgattcaacggccggctgcgagctactcagttttttggattgctactcaggatatcatcagatccgactaaaggagtccgactgcttaaagacttcatttattacaccctttggggcctattgctacatcaccatgccttttggattaaagaatgcatgagcaacttatcaacacatgatccagagatgttttttcaactcagatcggtcgtaacgttgaagcctatgttgatgatgtagtcgtcaagaccaagtagaaggatgatttgatcacggatctagaggagacttttgcgagcatccgtgctttcaggatgaaattaaaccctgaaaagtgtatcttcggagtaccgtcagggaagtttcttggctttatggtatcccacaggggcatacaagccaacctggagaaaatcaatgctatcctcaacatgaaaccgccaagctcccagaaggacgttcaaaagttaactggttgcatggcggcgctcagccagttcgtctcacgactaggcgagcgggggatgcccttcttcaagctgctaaagaaaactgacaatttccagtggggacccgaagcacaaaaagcctttgaagacttcaagaaattcctcactactccaccggtcttagcttcgccacatccgcaagagccgctgttgttatacgtgtcggcaacttcccaggttgtgagcacggttctggttgttgagcgtgaggaggaaggccatattcaaaaagtacaacgaccgatttatttcgttagcgaagttttggccgactccaagacaagatatcctcaggttcaaaagctattatatggtgttttaattaccgtcaggaaattatctcactacttccaaggtcactcggttacggtggttacatcatttccatcagggatatacttcacaatcgcgaagaaaatgggcggatcgcaaagtgggccttagagttgatgtcttttgatctatccttcaagccacgaacttcgatcaagtcccaagctttagcagacttcatcgccgaatggaccgagtgccaagaagacatgcctgcggagaagatggagtattggactatgcataggagcgggggttgttctaatttccccgactagagagaggttgagctatgtattgtggatacatttttctacatctcgcaacgtggcggaatatgaggcgcttcttcacgggctaaggcttgcgatctccttgggaattcggcgtctgatagttcgtggagactctaagttggttgttaatcaagtcatgaaatagtggtcctgccttgatgataacatgactgcctatcggtaggaggtacgcaaattagaagataaattcgatggccttgagctaacccacgttcttcgatataataatgaggcagccgatagactggtcaattttggttcaaaacgagaagcagctcctcccgacgtgttcgttgaacatctttatgagccaactgtaccaagggaagaaataaacgaggccacggacgctcgagacgtaagcatgattgaagccaactggagagagtccttcataagatttttgaccaaacaagaactccctcaagataaagacgaagccaacaggatctccaggcgcagcagacattatgtcgtacatgagaccgagctgtacaagaaaagtccatcaggaatcttgcaacgctgtgtgtctttggaggagggaagacaattgctaaaggatatacattcaggcatctgtggcaatcacgctgccgcacgaaccatagttggcaaggcatattggcaaggttttttctggcctacagctgtatccgacgctgacaaaattgtgcaaacatgtgagggttatcaattttttgcctgacggactcatctaccggctcaagagttgcaaaccatcccgttgtcttggccgttcgcggtatgggggctcgacatggttggcctgtttaaaaaggctgtcggtggttatactcatctcttcgtagccgttgacaagttttccaagtggatcgaagccaaaccggtcatcataatcacggtagacaaggctagagatttcttcatcaacattgtgcaccgatttggggtacccaatcggatcatcactgataacggcactcaattcactagcggggtatttaaagatttttttcaggacttcggcatcaaaatttgttatgcctccgtagcgcaccccatgagcaacggacaagttgaacgtgccaatggtatagtgcttcaaggaataaaagcacaagtttttgaccgactgcatccctatgctggcaaatgggtagaacagttgccatttgtcctttggtccctgcgcaccacacctagtcgggcgatgggccagtcgccgttttttctagtctatggagcagaagtgatgttgccaagcgaggtggaatttgagtcgttgcaatttcgtaatttcagcgaggagcgctacgaagaagaccaaatagatgatcacaattggttggagaaagcccgtgaagcagccttaattcagtcggctcggtatttacaagggttgcgccattatcacaatcgcaatgttcgatcacgagctttcttagtcggcgacctggttctgaggaaaattcagactacaaggaaaggaccgttcatagtttctgaagttactcagccaggttcttaccgactcaaacgtgaagacggtactcatattgacaactcttggaatattgaacatcttcgtcgtttttatgcttaggcattattttttgtatcttcctctttgactgctaacatcaagttttttttcttgagttatcagtcgggggctattataataataatggagtgtgatttttatcaattcaatttgcttacttgatttatcattgccttgtttgattttttttgtcttagtcaatgaggactgaaagtttttaacaacttttgcgggttttaggctcaatgaggtttgacaaaaacttttaagaaatcaggagctaagtttgaaacatcaagcacagcataaattcatcagtattgtacaaattgtgcctccatcatcatcatcatcatcatcatcattgttagaatacaacatcaatcagtatcattcttttcatcatcagagttattagatccagtcggcaaaggtcgttgtcctggaatctctcaacaacatcagcagctatcttatcagcagctttttgtgcgtcattgataaggtcaagaccagcttcttcgcttgtcccgtctgcaaagccatcaatggcatcaatatcaatcttcgggtacaaggacttggtcatcgccaacgccaggcctgctcccatgtttccagcttccttgatattcttaaaatatgtatccggagcaattctcagcttgtcgaagatctcggcagcgtcaaatgaactcggaccattgttattgaagaacatggcttggacaagtgcatgctccctttgcttatttattacaattccttgtggtcgcatttcatcatcccaccacttgactaatattggtgggcaagaatcttcagccgatcgtatccggaggagctcctcttcatcaccaatcaatggcccttatatattcatgaataatggtgaagtaattgaataaaggttgtcggatcaaagcaggtttggaggacttgtttacctgtgataatttccggtcggggacgagcaggtcctttcaacctaacaggagaactagttccagggtcagcaccaatgtccatcttgggagggctgttggcatgagcttccatttctgggatatctctattatgttctgtacccgattggtttctagtcgggggctcctgatcagcactggctttagcttcagccgactggtttccagtcgggggctcattcctggtatctacattgccggttgccagttgattattacccgggcggttttcggcagttgacccagtttctactgaaggaccagtctctatgccagtcggcgtggggtcttttccagagggatctatgtcagatggttttctacaaattttagacacgttatcaactctgtttcaattgtgagtaactagtaaagcaggggaaattaccagaggacacatacctggatgacttcctgatttttggcatgggacgactggatgttttcttcttcggattggttggctttagttgttttccaatcacccctttgttgcccgtcttttccgcgtcatcaccttcatcgtcacttgaaaccagcttcctcttacgagaatctgactggttagtcgatcttgaggtgttgggttggacgtccgactgaatcttcggccctccgctggcttggccagtgtgccggtgaggtgagcggcgttgagcaattggaggatcggacttcatcaaagcgaattcctgtgcatggtcttccaagttctcagtcgactttacagacgataaaagcatgctttgagagaaactgagttgtataatacataccggtggaggagggttgaaggcactgtatggcacaactggcaataagtgtgaatagttgaccactatggcattcgagaagattttgtacatcctctcctgcataattttgaactcaagagattctgggttctctcgattggggtcatgcttgccgtcaaactcaaaggctgttctggatctttccttgattggtgccagccgggtcttgatgaagtgccgggtgatttgttccccttgcagactttgttctttcagcttaagcatgcaatccaacaagtcgagcgcttgggcggcctcttctcccatcggcagtgagttccaggtatcgcgatagactgggagaagacaggagtatccgggaagcgctggctcagggttttgcacatagaaccagttcgtgtgccaacctttgttcgaggtcttgaatggcatggagaagtatttttggctcaaggtccccctctgttgaaatccggctcccccaactacgcatggtttgcttttgtttggctggggtttgaggaagaagatgcggcagaataaagcgaaatgtggcctaatccccaaaaaagattcgcaagcatggatgaaattggcgatatggactatggaactggggtttaggtggtccaggctgattacatagaaatccaaaattcctcggaagaaacttgaggtcgaaagagaaaacccgccataaaagaaatgggagaataccaccacctcgtgtgtgtcgggggtcgggaacatttcaccgtatgttggacgccacccgatgatctcttttgccggaagaacgccgtgcgccaccatctccttcaaattctcctccgttacatcggagggcgcccactgactttcaaagctttctctcttccgccatggatgcgaactggatggtatgatttggttcggaatgtggctgggaatgaatgggagattgatgcggtggttgcgtggaagatttttgtggaattttggaggacggattggagcgaatcggtgaaccctagcttcgccggtgcggtttcgcactgtagcagggaatggggaaagtggcgatagtttcggcggggaagacgaagcgacgtttggcttttggtattattagggtatcgggagtactaatgggcctaggcccaaaacagtacttcagcccactttttttttctatcagcgtggctaagttgtgatccttagggacttaggcattttgcttcggcaatacttgctcgcaacagtgtagcccaatgctgctaaaatcctttttgacgcagttagataattatttggaattactacgatgcaaataaaaaggtgcccaatggaaaagtgttatactaatttttgctagcttttttaggcagcaaaagctgattgggttttgttgagatgactggtttttgagcagtcattctctcggcatgttatatgcttatctagattatggcgtgagtcatagcctaggctatttagactcatcaattgtcatgaaatcacatttataccacatttgatggatcctttaagagtttttacttggattcttgtcatatgtgttgatttatggacctttagagtattttttactcaggcctttttatatttccatttttggtatattaaagctaaagcagtcggctggatgttttattaaacgccgcatatgcttagctgtatgatacttttggacaatttggttgtaaaaccactcggatggatgttatttgcgccttgactatatgtttagtctttagataatcacatagtcgggggctacacctaattaggtgcatctagtcaatgcacctgattttttattttcagcccttcatagtctttgattttggtactcgggagatcaaggcagaagaagtcgaagtactcggattatcattttggattacgagacaagactatttcgtcgactataaaggtctcaggggctactgtggagattatggataccccatacctccgcggcatgtataatccgactgggtatggggtgccatgtatagatagaatatctttaaggagactcgggttaaattccaaacttgtacgtcaaggaaatacccggatcctagtcggttacgattgtatcttatctgtagctacctattccgttaaggatatgggctgtactttgtaatacggaccccttcccctatataaggaggggtccgggtgcctctaggggcacgattttttcccaaatcatacgatcaataatatactcggcggatcaatctccggacaggagtagggtattacttcttgattaagaaggcctgaacctgtataaaatttcttgtctctaaacccatccacttttccagcttgatagccacccccttttagtattgctgaaatcttgtttcgacaaggagggagctcaagagatggagaaacgcgataagaaggggagggggatttacccgctcgctaatgactagtaggaccgcatatgagaatatggttatatttttcaagtgtggttttcttgagtgaccgtattttcagaggtaggtttagactatatgaccttcttatcattactggacttttaatgggtcgtctataaatataaaactttgtacatgtaaaaagctgtggtgcggtcattgctcaaccgatcgaatttggtgcggtcattgctcaaccggtcaaaactacattagcgaaaagaggatcccaagatcccaccaggataagccatgtcatcatataaatataaataagaaccgttggatgcacgatttgaatgaagagaacagttggatcataagagagaaaaataagtaaaaaaaagtgtcagggttatggataccatatacctaatagtagttgactaaatctcggcaagacctaccacataccatgtcttaaacggaaactgacctcggatatggagggagttctggataaggaaagacaaccagagttctacatggaaacgacaaggactactcggattgtatccatattggtttccctagttctacttggacaagggaacacctatgagtataaatacaaggccccctaggaggagaggagacacagaacaatagatcaaggcggaagatcaacatacaagccaacatacgccaagacaatacgccagatatcgacttcagatattggcatggctagtcccctacggtgcctatgtctaccgtcaggagagatatagcactgtctctgatctcgccggatgtggattcgagcaagaaggctaccctattgtcgactacgagtcagtactacaaaccgccaagtcgacaacagttagataggctaccccaaatattgtactggtgtgattatgatgaataagagcagtaccagcttcggccaacaggatgtagggttattacctgacaattcaggggcccgaacctgtataaaaatcctcaacatacgccaagagaagacgccagatatcgacttcagagattggcatggctagtcacctacggtgcctatggctaccgtcaggagagatatagcattgtctctgatctcgccggatgcggattcgaggaagaaggctaccctgttgtcgactatgagtcagtactacagaccgccaagtcgacaacagttagataggctaccccaaatattgtactggtgtgattatgatgaataagagtagtaccggcttcggatgttgggttattacctgacaattcaggggcccgaacctgtataaaaatcctcatctccgtatcttttacctaagtctcgcgtacatcctagtgccaacgatcctcatattatgcaaataccggaatcgcgacatcatacgtcgacagtggcgcgccaggtagggccgtagggggatattggtgctttaggatttcgacgagatgggttcgagaagatggattcttcaacaacaaactactcaacggcttcgtatgttgggtggtatgacccgaacgaagtacgttcttcgacggatcgggatcttcgtcaagcttgccaagtcatcggcactatggattctttgacgagagatacttcaactactttggatctgggaagtctaacctagccagagtatgtgccccaacaaggtcggaaccatcatcctcaacaattcgatctctcgagatcgaccaagcctcaagatacttgttacaatctatagtcaataaaacttgttctcaggaagttcttacaaagccaatcccaacacctggtaatgaatttcggattgtccagtatgcagatgatactctactttttttgactgcttcccaaaaagagcttttctatctcaaggcaattttgaacacttttgtctcttcaactagccttaagattaactatagtaagtcatgcatgattcctctgaatgtagatttggaaaaggttgatcatctctcaaaattgtttggttgctctattggtagttaccttttacttatctgggtcttcctcttggaaccacaagaccaagagttatagattttgctcctctagttgatagagtagagagaagactctcagcaaccactgctttggtatcttatggggacagattgaccattgtgaatgcagttctttcctcccttcccacttactacatgtgctctctttcactttcaaagacagttatagaaagtattgatagagctaggagacattgcctgtggaggggatctgatattaattctagtaggaagtctttggttctccgggaaagagtttgtcagctgaaagatagaggtggtttgggtgtaatagaccttagattgcaaaataatgcccttctcttgaagaatttgcataagttctataatagatatcctgttccctgggttagtttgatttggaatacttactacactgcaaaacctcctcatgctgttactcctaaaggatctttttggtggagggatgttttgcaatttgtggatatttttagaggcatctcggcctgtactgtgcaagatggaaaatcttgtttgttttgggaagatttgtggaacaataaagtcagagccttggtttatcccagaatatattcttttgccagaaattcaaatctctcagttctgatgttctctacttctgatctacctcagctctttgccttgcaacaatcagcgcaagcttttcaggaatatttggcaatgtcagctgcagataccttggagcatcttaatgatgagagtgatcgctagacatatgtttggggcaacggtatcttttcctcacagaaaatttatgccatgaattttcctcttgtccatgtgcctgtttatattaaatggatttggaagagcagttgtactatgaaagtcaaggtgtttggttggctactctcgattgatcagttaaatacttatgacatgttagacagaaggcattgctcccctcaaaatgcttccttgctctgtgtactttgttcaaaaggatcaagggaaacaattctccacttatttttccagtgtccttttagcactcaatgttgggcgcaatttggtgtggtttggaatcttcctttaagctttggtgaaattttggtcacagccagaaattcatataactctacccattttgttgagaaggtgctttatgctgcttggaacatttggaagcagaggaatagtttaatttttgaaaacattgttccctctgttccctcttggagagttctctttaggaatgatctctcccttttagttcatagagtcaaaaattctgagagagatatattgttacagtggttaaatttgttgtaatttttttctcctttattaatataaaatcttaacggtgggggcttcccctaccgtggttctttcaaaaaaaagatacgcggcgtaccaaaagatgtcataccgtatgatgtcgaacgagtacgcaataaggtaattggtagattggttttttaaattaatctactaatttcgtagatacatccggcatgtatctacaaaggtaagcaatattttatatgcaatttatcgtacctattcagatcatacaatattgtcatatctctaatttattatgtttacctagagcatgttttttatacaatatctattgtgcaagtgcttccgatgttaggccaactacggtctaacgctgggggctcgctctgctctcttctatatgaatcatgcttgtctacggtttacataatgcctgatatttaatatgctcgttatatcctgataatactagaagatccatgcagttttttgagtacatactcgatattttctgctatatgtcttgtcttctagaaaatattttttaggaacaattgagcactcgagtaggttgtggttgagtacaccgcattatcgagaacgttctcgaaaaatgcagagttgttgcacacaacctaccaacgaagaccgacgacctatctcatagcaccaaccatggctaggctattcgagaaaaggttgttaacggataaattctcgtgaatgttgtcggcttgatcacccgacatgattgcgagtggacatccggatatgctataagttgggtatgtgagtcatgctggccacatgagatgcacatgtaacaaaccaactttagcacccctataggtgattgagaggctcctactcctagttctcaaaccagtaggacgtagcgatctctcgcgccttaactcctgatggtcgaggtacgacaacggcaatagcgtagcggccctcgcaccacgacttcagatgacttcagatggttgaggaacagctacgactggtcttcgaccggcagcgtagcggccctcgtaccatgactccaaatggtcgagagacacctactcactggttctcaaccagtcaatcgtagcgatctctcgtacatttacttctagtggtcgagttacgactactacctggtcctcgaacagcggtgtagcgattctcccactatttccactttaagtggtcgagttaaggctacacctggttctcgaccagcagtgtagcgatactcccactacctttacatctagtggtcgagttaaggctacacctggtcctcgaacagtggtgtagcaattctcccattattttcactttaagtggtcgagttacgactactacctggtcctcgaccagcggtgtagcgattctcccactatttccactttaagtggtcgagttacaactactacctggtcctcgaccagaggtgtagcgatactcccactagctttacttctcgtggtcgagttaagactactacctggtcctcgaccagaggtgtagcgatactctcactaactttacttctagtggtcgagttacgactactacccggtcctcaaccagtggtgtagcgattctcccactacttttacttcaagtggtcgagatgtggctacaactagttttcgaccagcggtgcagcaatcctcccattacctctactccaacaaagttgatatcaggtatatcaccaagtgttttacccagagatcccttaccacgatgacacctagaattgaaacctatcctcatgtccctttacgttgtcttgacaaggcctctgaggaacctaagggaacttcggctggggacgcccagagcggataaggccttgtcggatcatgtagagacaaacgaccatgtaagacctggtcatgttagaattctcgccgtgcgtattaaccaagccgtgtaatcggaaattgagctttccaacttcacggctgggggctagggtcagtgcttttttcaaccaaggcaggtcaagggtccaagagccttatcctctgagaacgattctccgacgataaggctgggggctagggagagtgtatgactcaacaaactgactgatcgaagtcggtaaaagagaagacgctcgtacacaaaacattggtctgtaaatttaattcattttcagttttccatacatattataacatgtcaccctttgagcgttcgctcgggggctatttctatctaatattcttttctgagtattgatttcaggaaaattctattcaacattgttgaagactccatgtctctatggttctacaccaagatcgactaaggcgagtacgatgaatgttgatgaggcttcgtcgcagattctatgccttctcgatcactcgagaacggttggtggatctcgacaaggaatacggaatgaagagatggtgtacccgtcgagataaaatttcttgacttcaatccaaattctcgattacagcaagacgggagacttaatcgtatgctctgtactttcttggttgacgtcggagattgactcggacaaaccctataggtgcccgcacgaggctgataagggaagtctagcgttatctctgaactcaccgagaacggtcacgtgagctcgataatagttactccaaggtctgcggttgagaatatgaatttgttcatttgtattaaagtcgggggctactgtcagggttatggataccacatacctaatagtagttgactaaatctcgacaggacccaccacataccatatcttatacggaaactgacctcggatatggagggagttccggataaggaaagacaaccaaagttctacatggaaacgacaaggactactcggattgtatccatattggtttccctagttctacttggacaaggggacacctatgggtataaatacaaggccccctaggaggagaggggacacgaaacaatagatcaagacagaagatcaacatacaagccaatatacactaagacaagacaccagatatcgacttcagagataggcatggctagtcccctacggtgcctatgactaccgtcaggagagatatagcgttgtctctgatctcgccggatgcggattcgaggaagaaggctaccctgttgtcgactacgagtcagtactacaaaccgccaagtcgacaacagttagataggctaccccaaatattgtactggtgtgattatgatgaataagagcaataccggctttggccaataggatgtagggttattacctgacaattcaggggcccgtacctgtataaaaatcctcgtctccatctcttttgcctaagtctcgcgtacatcctagtgccaacgatccccatactatacaaatactggaatcgcgacatcaaacgtcgacaaaaagcaaataatgtcataggatgttctagacccttcaaacatatcccataaaatgtgtggaaacaaagatatgcgaatgaaaaaatatcttcaaaattatccttataaaataatcatcaatgagtattcaatagtaattaactcattcaatagtaattctactgtatcaacaatagtaggtatccgtgaaaatatgaatagctacataacctaatactatcgattacttcactacagcttgaaattaaaaaaaaatgtgacatggatgacataataaattttgcaaagctgatttcaatcatatgattataagatttactattaaaaagcgtatatatacttctcaagtggtgatgacagaattgtaacgcgtaagaaatgtagctatttacattattactacaattgacacatttatttagatattgtaggagataatgatcgcggtaatatatgataaattatttgttgttacaatgatattcttaataacaaatcaagatatataaatccattactgttatagctacacttcttaaaaaaaataggttaaaacatatttattattaattgttattaacatttatatctattaacataaataatatataaatatatttaatagatggagaggtcatagttgtgtgaacacacaacttatgttgctagttcttcagccacgtgaaccggacatcacaaaaaaaaatgctgataaactactggccatgttggtttgggctgtgtttagttgttttggcaaaaaaaaaatttaacgtacacggacaatgtagactaataacaaaacaaattacagattccgcctgtaaactgcgagacgaatctaataagcctaattaatctgttattaacaaatatttactgtagcaccacattgtcaaatcatggcgtaattaggctcaaaagattcgtctcgcaatttacatgtaaactatgcaattagttttttttcatatttaatgcttcatgtatatgtccaaacatttgatgtgatggaaaagttggaagtttgaacgtaaacctccgatgatattttaaccaaacatgtttttaaaatacaatataaatctcttctattaaatgtttggtcacatgtatggaaaattaaatgtggacgaaaaaaccaattgcacggtttgcatataaattacgagacaaatcattttagcctaattacgccatgatttgataatgtgatgctacagtaaacatttgctgatgacggattaattaggcttaataaattcgtctcgcagtttagagacggaatttattgttttattattagtctatgtttaatattttaaatatgtattcatatacttaaaaaaaatttggcacacgaactaaacacagccatatcgatatggttaaagagatagggtagcaggctgccgtacgtcgccgatgattcacctagcagagccgcagtagtagagtgtacagttttgaatgcgccgcaccagccgcgctacccctcctactagtacgtacttaccgcagcaagctagtggtagacgttattctctccgttgtattttgtattttaagtgcagctatttttttcctaattttgattatctgttttatttaaatatttttttaaaaaaattaaaaacataagtcacgagtaaagtactattcatattttatcatctcataacaacaaaaaaaatactaattataaaaaaaatttcaaataagacggacgattaaagttggaacggaaagtcatagctgcacttaaaatgggacggaggaagtagtctacttggttcgatcgttgacgagagaaaaacaaagagaagaggagaatgagatgagccatgcatacggttgcgcagaataagaccaagaccgaaaaattcgttagtagtcggtttcaaccagtgaaataccaaaatatattctgtcaattcaattagtgatatcggttaaccgaattgacccatgtggcctaacctagtgggcctaataagcccactaattcggcatactaaaccttagaggcagggtagagagctgctcctccgcctccatcgttcctcggttcacaccacctccgtctccatcgcgctcacgcatccatcctctgcttgactacatccatcgcaccgcctcattagcgtgcaccacctcgcgcctccacctccaaccagcctccgccttcatctcttcagtccccaccctcacgatcgagtttcaggaataaaagagagagatagagagttcggagctcctaaacgtgcggcgctgccatcggcgacttgcactgcactgagatgaatgggatttggaacttctcgtggagtgatgaagatcgatgggatacaagtcatggcaagattaatttgcttctttttttcccctatgagtcgtgctcttttgctactagcatcgtatgatagttattcatttgagttgctttgattcatcaatgttgtatcgtcgacttatttatttttgtgattaattcttttgttgtttaaatcactgttatgggttagttcggtccttaatcgaaaccaaaacaaaataactgaagactaaagtgctcggttttgaatttttttaagatcgacaagtcttgtgattttgaagattgaattttccaaaaaaaaacagagaaaccgagctgaatttgtcggttaaatcgaatagccacccctagccgtgctgccggccgcagcacaagtgcactgaggcaaaggcgagaacacacgtgtcctgtactccagtgatccagtctagtcctagccggtcggtccaggccggtccagaccattctttgctggaatggagaccttgagattaacaaaggagttgacccttcagcccttcactctagaatagtatataactaggcaatgcttcatcaacttgtactctatttatttttaaaaaaaggaaagaaaacttgtactctattcatccaggcctttccttttctaaggaacggaagaacggagtaatgtgacattttccaagctacgaaaactatttcgtacagtttctttaaaaataatatatcaacttttaaaaacccgatttttttatttgtaataattaataactctaaaattaaataagtagtaaacatagtttcaaaattatagaaataggaaggacgctcttccgtatagcgtccagatatggacgttgttgaggactgcgtccatgtgcggacgccttggcgatagcgtccagcatagtgggctgctgcggacctaacctgggccgatcatcaaacaaccgagtcaataagcctaaaaaatacaaaagccgggtcaatagtttgatgatcaatgatccgaatgtaattattgatcggccttcatcctcgtgcaaacgcaatctggtagaagcaaattaaccgacattcgtcctcgtgacaaacgctatatggtagaagcaaattaaccattctagatacaataattttgatgatagtaatatgtgttgtgcgcttgtggtcagaacagctgcatcagtccatgagacctttataggaagaggcaaatcccacttatatataattacatcatggcagcttacatcactgcacttacatgaacatgttctactgtctgcgcttcagttttaaacactcttccctatccaaacaaagagcctaacaggaacatgcaactacatgttgagacgacaaacacttatattccgtccatgtgaagagctgaacacctccaaagccattatccttagttttgtaagccccctatggccctatagcagtagcagacacccttgctgtctttatgcaacaaagccacaacaatcacatatgctggatatctcatagaaggatcaatctgaaattcattctggaaacaggccatgcgctccatattttccttgataaattccaccaattatgtcaggatcatactacaaaaggacatgcagataggtcagcaaatgaaacaaagttacaaattaatggcaaccagtgaagatgtatcaaattatcttcggctaatcccatattgtagaaaaacaatattatcttcaggttgctagcagagaccatgcagggtatggtatcagcggaagcccggggaagactagtggaccgcggcgacggccttccaggatggaggcagacggcggctgtagcctcccaagattcacgatggacacgcctcccacatatggaggagaagggcagcggtggccgacggtgcctcctctcgctcggaggaagaatggaagaggattgcggcagatgggtaggttttgtgcatttttctttttcccatggatgaggagatgaatcatgaatgggccacgaatacgatgggctgtaacagcctggacgctgtgcaccaccacgtccctaggtggacgctatttacgagagcgtccacgcctggacactaagatggatagcgtccttcctatttttacaaatcgtgcccaagatttactagatatttaattcgtggattattaattattataaaaaaaattcagctttaaaactactttaagggcccctttaaatcgcagggttgaaaaaatggagagatagaaaaaacacaggattctgacaggaattgaagcgtaaaatagaggattacaaaacacatgaaaaacataggaatggttgtttgattgttgcgcaggaaaaacgtaggaatcagatgaaaaagatagactcagggaaaattttccaagaggttgaagcttttgctataggaatttcataggaaattttctccaaaatccatatgcaatgtgtcattctataggaatttcataggatttaaaaagcttcaatcatttaaatcaaaaggccaaataggaaaattttctatactatttgaatcctataaaattcctatataaatcctttgattcaaatgggccctaaatcttccaaggaaaccttatcttccccgaataggattctaattccttatattccgagaagataatttccatctttatttgtcatattaccttaatcaaaagaaatcttcgcgtatataatcaagtgtatttcatgaatccgtgtataggaggtatgcattatccttaacactaacacctactccctccggttccataattcttaatgttttgaacaatgacacggccttcaaaatatatctttgactttgtttttctactgtaatatattcaataaataaatgcatgtttacttttcttacagtactttaaaagataaatctatatatatatatatatatatatatatatatatatatattgttattgatgatcaaagttataaaaatttgacctctaccttttctagacttcaagaattatggaaccggagggagtacgtccctaagataacttagtcggtatatcccatcgatacagatgcggtagaatttttttattacatggatgtagacacataacaatcaaatatgctcatgaactcattcataacacaccctcaaagaggcaaagatcaacaataaatctctgacctccctgaatttctatctgtagtgcaaccatttgtgtttagtatttgtgggtatctggatttgaatcctggtaggttgaatcgtggttgttcatgcacccgcaactccactacttgtattagaaaatcatattaatttatattttaagtttgaaataattaacttaattaatcatacactaatagtttatcttgttttatgtataattttaatccctctcaaatatacggtgaaaaattggattgtggtggtgtggcaatgatgtatagcaagaagaataaataagcaatcaagtgaactagctgggtggcccgcgcaattgcgcggctagcacctaaacaaaatcatttttttattatgattttacttaaaatttattaaatagctatctcattgtcttaagagtttgaaagaccaaatcttatcatccacgtgttcctaattatatatatagttttttaaaagtcacaccagttgctacctcttatgtcatttccttttttatttgcttgctcgctctaccactatttttgttcattctccttggaacctttaagaattagatcttatagtttttagagtttattgtcacgttgggtttcgtttttataatttctagacgtcccgtcaaacgttgccattatactcctctgtatcccgtccactgtctcttctctttattgttattaagattttaaaaattaaatataattatcatttgggttcatttttactttctagaagtcccgtcactgtcagcggctttgccattgtacttctctacggctcgcccgctgcctcccttctttattgacattgagattttaaaatcgaacatgattatcattattttttttacttttgaaagttccgaacatttaaaaattgaaccttgtagtttttagagtttattgtcttgtttggtttcattttttataatttttagaagtctcgtcaaacgatgccactatactcatgtgcggcccgtccgccgcctactcttttattgtcattgtggttttaaaaatagaacataactatcgttggaattcattttttttattttctagaagtcctgtcaaaccgtcggctctgcaactgtactcctatacaccccgtctactgcttctattttttattgtcattgagattttaaaaatcgactatgattatcaatggggtttattttttttactttttagaagtcccgacaatcgccttgctcgtttgcttcacagcctgttgtcgtccctccttttaattgtcattaggattctatttggtgttttattaacattttttatatgtcgtatcaaccgccatcactctacttctttataggcatgttacttaatttatctcgtcatatgttttagatggtattttctttcaatagtctttatttttatcacaaattttagttatttataaattgtattcctaatttaaatcttatttttctttttctaatttcatattttctttttcaaatttcaattaatatcgtattgtgttcttttaatatttttattttttattttcagtttcagttgtttcaaaattgtattcctacttgaactctcttttaatttttctaattttggttattattttattttttattctgaattttaattaatctcgtattgtgttcttatatggattcttctttcaatattgcttatttttaattccgatttttagctaattttaaattgtattcttacttgaactattcttttttgttttgctatttcggattttatttttatttttattcccaattttaattaatctcgtactgggttcttatatggactcttcttttaatattccttatttcaattcagaatttcagctattttaaaattatattcctacttggactctccttttcttttctaattttggattttattttatttttatttagaattttgattgatctcgtattgggtttttatatggaaacttctatcaatattgcttatttttaattccgaatttcagctatttttagattgtatttctacttggactcttctcttcttctttttttctaatttaggattttattttatttttatttcgaattttgattaatcttgtattggattcttatatgtaaacttatttcaatatagattatttttaattccgaaatttcagctatttttagattgtatttctacttagactctcattttcttttttttctttttctctgattaatgtgggaatttttagcccccacagcgaatatggtgccttcttttcgagctaatataatagatagatacgaggggggcggtcaaatagggcggagagagaagatgggttgatgataataattgggcaactctcgtcgtcgtccggtagggagtaaattattaggggagagggagactggactgtttgcaataaagcaatgctagtagtagtagtagtatattaataccgaaaccaaaaccgcagtaggggggaggggagagagcagcttgccgtcatgccatgtgatacatgataggagtagaaggagaagaggagagagagtgtgtgtgaatcagtgaattaaggtggtataagtagcaagcgccaccggggagagttccttgcttggtttggttcctctctgcttctctctcttttcctccctccggcgaccaccagcataccataccatcgccggcttgcttgcttccttccttccttccttgggggagagagagagtgtgtgtgtgatggggacggggtggcggagggcactgtgcacgtcggtccggcgagatccggagcaacaagaggtgaagaggcgaggagaggccccaagcccccggtgtggaggaggcagcaggctgggtggcttcttctccgccatctccagcagccatagcagcagtaatccagcaacaacgacgcccaccctgcgatgccgcaccaaaccaaagccacagtccagcagcagcgaccaccagcagcagcttccgtcgtccgcgccggcgcccaagaagaggatgcctctgctgcaggctctctccgtgccatcctcgcccagatccccctccagattcgccctcctcaaggcctccatcctgcccaacaaggtaggtacctcttcttctccttctttagaaatgatgatgactcaaatgaagaataaatagctcctgcctgccttggccctgtgatcccccatgcatatcatatatattatgctcttcttcctcttctaatctggctgtagcggcggacggacggagatggagatcgaatcgatcaatcattgccaccactctctcttttgtcctaatccccttcccttccctcccctccttgagattcgattcgattcgcctcacgcaataataataataattactccctccgttttaaaatatttgacacagttgactttttagcatatatttgatcgtttgtcttattcaaaaacttttgtgaaatatgtaaaattatatgcctatataaaaatatatttaacaatgaatcaaatgatagaaaaataattgataactacttaaatttttaaacatgtgctaaaaattcaacggcaggtagtaaaatggaggtagtaactaataataacatcacaggcagaggagcagctttccttccgtcctgcaactgcaatcccccaccccgccacttcctcttttctttttgtttctttttaaatttctttcttctgggaatgggagtgacaatgcgagtgagaagcagaatggaacccatgaaattaacggtgaaggtataattgcagatataggtaggtagagatagatcgagaggatggatgatctcgaacaagatgtaaaaggatgatgatgcagggcccaaaggaagagagaaaggctgctcctctcttttggagtatgtcaaacaacaagtgaaaggctggctggggattggggaaagatggatcagattcagatcagatcgcccagctttttcttgattttgatcctccatcgattaccaatcaatcaaatgcctgccaaaaagaaagatcctccagcctttctttctttcttaattttgctccatccacagcactccactcactgtcgactctgtttatttagtttagggattagggattattactagtcttgttgtacttgttgattttgttgagagaaaagaaaagaaggaattgattgctaaagaaataaataatgttggatggatgcagagccggtgcggcgtgtgctcccacggcgtgaagaccggcgcggcggcggtgttcacggcggagtgctcccactccttccacttcccctgcatcgccgcccacgcccacgccctcgccgccgccaccgctctctcctgccccgtctgcgccgcgccatggcgccaggcccccttcatcaacaagcgcaccaccaccaccgacgaccacaagcgcaagtcctacgacgacgacgagcccctcctcgcgcccaaggccgccgccggcgccttcaaccctatccccgaggacgacgaggacgacgccaccgagttcaggggcttcttcccggcgcgccccaggagcgggctggccgtcaccctcgccccggacgccgccctcgtgtccgctgggcggaggcacggcaagtacgtggtggccgtgagggtgaaggcgcccgccctgcgctcctcgccctccacgcgcgcccccatcgacctcgtcaccgtcctcgacgtcagccagggcatgatgggcgacaagcttcacatgctcaagagaggcatgcgcctcgtcatcgcctctctcggccccgccgaccgcctcgccatcgtcgcctctccggcgccgccaagcgcctcctccc

SEQ ID NO: 22739 - DNA, 27315 bp, Oryza sativa
tcctgcagcccggacgtcgagatccccatcgggccaggggaggagccggcccggtcggcgctggtggcggaggaggacgacgaccagttctcggagcacgccttcgcgaaatgcctgggcggcctcgtcagcgtggtgatgcaggaggtgcagctggagctggcgttcccgacgggcgagatcacggcggtgtactcgtgcggccacgggcagcaggcggtggcccttgggggcggtggcggcggcgcggcggtgagtgtctccctgggcgagatgtacgcggaggaagagcgggagctgctggtggagctgcgcgcgccgctgagccagagccacccacactcgctgtccgtgcggtgcagctaccgtgagccggcgtcgcaggagacggtgcgcggcgcggagcagcagctggtggtgccggccctccacggcgggagctcgtcgcggcggctgcacgacctgttcgtggcgacacgggcggtggccgagtcgcggcggctggcggagctgaacgactacgcgacggccatccacctgctgtcgtcggcgcgggcggtggtggtgcagtcggcggagcaggggctggttggcagcctggacacggagctgagcgacatgcggtggcggcgcgggcagtcggcaggcaggcggcgtggcggcgagtcggaggagactccggtggggacgccgcgggcgcgggggggagagccgctgacgccgacgtcggcgtggcgcgcggcggagcagctggccaaggtggccatcatgcgcaagtccatgaaccgtgtcagcgatctccacggtttcgagaacgccagattctgattctcatcatctatcaatctcagctcagcttgtaatcaatgataattttcttttctttttcattttcattttcattttcttcttatgtgaaatgaatcaacaaacacaagatatgtctccacgacgaagaagaaagaagaaaggcagaattaagaagagggaggagtccctgccggagcgcggcggacgtaaattacatctactccctccattactgttttctttttctcttctctttttgtactcctattcaaaaatttgaactagtttagacagtctcatcctctctaactgtcactttgccactcattctcgcttctcgtctcccaagtatcaaatcgttcgttatctaacaacagtatcttttgcataccaactaataaattttaccaaaatatgtaaaaaaaagatcgtacatgcacttccaattacacttatgtgtaaaatattaatctaaaattcactatattttagtcgtaacaaaaaaaattaaaatccctaatagttttaagaatataaatctgttagaattttgactctttttctctatgtatagaatgaatttgaagataaaatattacacataaatgcgatactactaaaagtacttatatattttttttcttcaatttttgatgaagtttgtttgttggtgtgcatgtatgtacacatacatcggatacattcccatctaacaaacgaacttatctttcattatctatagaaaccaaaaatcaaatcttttattatctaaaacgcgaaaaccaaaccattcgttatctaaaaaccaaaaagaaaatatttctttctttatttccatttttcagttactacgtactccctccgaccgaaagttttttttacattaatatggacactaaatccaaaaagttctttaaacatatattcgcgtaaaaaagtagatttattttagtgcagatgggggtagtatttagagtttggaatggattaagatgatgcaaattgcaagatgatggcatgcatgtgaggtggttaaggttttaaatcaatcacagacaagagggacagctccttcactgcttggtgctcatcattcagtccatgatcctccgctgctgttgtgttgtaggctagtgagtgccttggtttgatggaatctttgtgcatgacatggccatgggattgggagggagaaaccaaaccagttaatctgatcctgactgacctgacctgaccatactacctgagatgaagagtgggtgattaaaacgacattggagattatgatgattcatgcatcttcttcttcttccttttcatagccaagctgattgatgcaatgttcttcttgataagggcggttttggtgtggactggactagtgctagagcttacattggagggagagaatatgggagcagtagactgattgcttccatgtccattccttcaccacaaacaaacaagcaaattaacaaacagtgtgctcatgctcatgctcatcattcttcacctcttgtttgtgttctctgtgcttagcatagcagattagcagtccagccagcagtagtgtcgatttgggcgcaacacaacaacaattccgacgctttgtttggccgcttgcgcttgcctccatcgcactctctgcaatatcaggcatgatgagctagccgctgattgctgtagaatgtgcccacatctgcagcactgttgcagggatggacggctcagctggtacgttgtctacagtgtataccgtatcctctccactgtctctgcatacacacaacgatactgctctactgtgtactactagtaactgctatctctctctttcgtctttcagcaactgtctgtattcttcttcattcatcaaaggagctgaacgtggcatatactcgtatgatatatagtacatacgtgagatcagatcttatgggaccgttttcaaaaaaaaaaaaaatcttatggggccaatgcaagcaacatgcttgctctctagctagagttcccttctctctttttttatgccttctcctcctgtttgcctgattattctgtgtgtgtgtgtgagtgtgttcgttcggcccactcaatcacttgcttacacatgatgcaatcatttagtattcatttccactagggtttatcaataaaatactaccaaaattaagctagcatttcttgcctccttcactgtttctgaaaccttctaggcttcactgttactgtcagataatagtagtatcattgatcaaacttataagtgtgtataaataaaattattgtgtataaatgtaaaagtctgcctttttctctcttgggtgcagtacataaaacatgcatgctgatatgcaatttacaagaaggtttctgtttatgttttcttgagcctcccctagctagctacttgtacaaaaggttgtaagctggtatgtcacggattccattgacgtcctccagagatagctctctctccagctgctgctttgttgcttccagcacgtcctggaatttgccattttgattaatttgatcatcagttaactaattagattttcactactccaaatccaaatctacggttagttactccctccgtttcgaaatattcgacaccgttgactttttagcacatgtttgaccgtttgtcttattgaaaaacttttgtgagatatgtaaaattatatgtctatataaaaatatatttaacaatgaatcaaatgataggaaaagaattaataattacttaaattttttgaataagacgaacggtcaaacatgtaataaaaagttaacggcgtcaaacattttgaaactgagggagtactttctaggatgaagaaaagaaggaaacgtactttgaactgcatgtaggatgctcgcattgccagccactgggcatccatcatctcgaaagctatacagtacaggacgtcaaatgcctcttcgtgttctaccattaccatgcagtgaattagtagtatttcattgtaaattatacttcagaaaggcactgcccatgcatgcatgattcatgggagaagatgacaagatactaataataagcgatcatttgctcacctgacagcactttgataaagttaatccctggcaaagacttgggccgttctgagcagagcagcaaccaaattaattagctactaaaatcaatgaagaagtaaaagggcaaacagaaaacaaaacaaaacaaaaataaagggcacatcaatcatacctcgtggcattatatacactacatgccatctgaagaaagaaaagaaaacagttgaactagctactagtcctagcaagcaattatagaagcagcccggccagcagcgacaattcagtaactgcatctctaaccagttgcactcaaggagcacatgagcaataagagcctttcttgtgtcaaagcatatataataatttttcttcctgataattgttagtagttcgttcttggagttggctcaatgattaattctggctagatgattgtgtgtacaatatttatacaggtaatgataaatcaaatagcaggggcagagagggaacacacaatgagacgtactgttgggcatctgaatcagttagcagttagccatatatatatatactatcttcttttcgaataaatttttgcataacgtttgaccattcatcttattcaaaatttagtataaatgtataaaactatatgttaagattatattttatttaatgataaaacaagctagtcacaacaaaacaaatgatattataaattttaaataagacgaatgataaaattttatataaaaagttaacggtctcatcttttttttaaaaaggggtatatagtactactcattatgcaccatctgtctgtctatatgcatatgatatggtcattatcaaaccaaaccgcaagattcctctaattgtgcagactgcatgcacaagagaataaataaacacagaagatgccttgttgatgccagtacgtaccggaccattctaatatgtgcttaattagtactactacgtagttagttgtttgacttgtacggctgggcacatgcagtgtagatgtactcttctgaccaataccgatgcagtgcaatgtacatagtcaatgatgcacaggccatgctgatcagctgagtagtgattcttacgacagattattaatttagttatcaatcagttgcacatctacagatgccatgcacatgctggccccttcttaattaattgatctcttctgatttcatgttttgtttttgtcatgctttcttttgtgtgcaaacgtaaatgcaaacacaaacacaaattatgcatgtatatatatgctgcttcaattcgatcttgtgcatgatgtttttttttggtcatagatatagatacaaatgtatatacctacctgcgttgagctccagcagctggatcaacatgtatgagacgttaacaccagcaactgcaaaggggtactcccatgtggctctcatcccttgtttcttcagaagcagcctctggtaagaagcctatcatgcatgagtgcagtaatgtctgtcaggctcagctaaattgttgttactgacagacattgaaacagcatcaacataccgtaccggatatgttgttgcaaagaagagaagattctcaagtcccacaaatccacagcccctgaagatcaagagtaccggatatgttaattacgttgtttatttctagacaaaccaattagctacagtcaccagttagtataatgtagagttagagattaaaaaatatttatgtacctgaaatcagtcgatgggtttgggccctgccatcccatgtccttccactgctctgaaattaagcttgacagctctgcatccggaaatgaagcactccacagagccctgagagcttcctacaacaaattactatctacattactggtacatttctatttaaccttgctgatatttatatatatttgctggaatttcccacctgatgatctctccgagtttgatcataaggtatatttagtctttccttcagcttttgcaaacgttgctcctgatgagtgatgagtggcattgaacaaggttaattaattagttcagacttgagatgtgagaaatgctatgtcttgatgaatgctgttataaaagaagagaccatccaaatccagtctcgcttgcaaagttggctgggcagagttatcactatttactgcatttgatggtttagttgaatactactaagaacgagccatcagaaatgcaatgtgactatttccattatcgaaaaaagaaagataacgtggcttggtgtatgctaatcctaatacaacttcacctgaacagggctcagctcaaaggtcttctcagcattgatttggcgccttctacctgagctggtgaaaaggcccccaaaccatatcctattcccaaccatagcatcaactgcaatcaggatatttgcaaaacaagagtcaagcatagagcatgtctttgaacaatatgaaattatatatgtccagacgatgacatgaaaattatcctacatataatttgagaaatcattcccaaagctagaagaaagttttgtgcaaaacaagcagagcattaagggatatacgaaaatttgtttttttagtagagtaatattgaagtagtgtaaaattctgataacctcagtggtatgcgctttcgataatgaattactgtgtttcgtaaacatgttagaatataaatttatataaaattatgagctttgaatttgaaattcaaagccatgcatgtgtttcagcacaaaaaaaaggctaggcaactgtttgtggtaatattgaatttttgtctagttttatgtgataatgttgacgccaaaacaagataatggcaaagaaaagatggaatgatgatagttgaattggatgaacgcatacaaatatacctgtaggggttggagctgaaagggatgaatgcccatcaaagaagacgaatcaaaagccgtctagcacggcaaaataagcatacatacatgcatgcctgttgttatttcgtcttgttttgacatgcatacacgtaagtaggctaactgcagcaagcaaatcaatcaataggcttatgtatgtaatatttgaatttgattgatgttcttagctagctgcaacaattaagatacatacatacatacaagagaggagatggagatggaggggggagagagagagggaccggaggagaaggaagagaggaagatagagaggatggagaattggaaacggtttccaatccaacagcctcagcctcttcaattcttcccttcttcctgcccctccccttgcctgcctgcctgcctgcttgcctctacaacaccaataacgctgtgtttcttcacaaaaacgacagctgtgtgcatgcacgctccatatatttcctctctccgatcatccctccccaccattcgtacgttttattcattcattcttcccagaccagagcggggcaattgcaaattaaggacctatctatgtatatgggtgggactcacattgggccggccttgtagcaatcattcatgcaggcccaaatcaacaaggaaaaagtacaccgaaggtccctcaacttgtcatcgagttacaaaatcgtcccccaaccgcaaaaccaaataccgaacgtctctcaactaatcataaccgggcacaatagatccttcggtggttttgacccctattttatcctacgtgacggcggagttagcgtgggacccgcatgggccccacatgtcaggctgagtcatctcttcctctcttctcttcctcggtttcttctctctctctctctgcatgtaggcggtaggccggtcggcggggcgaggcaggagaggaggagggcggcgcggcagccgcgaggtagagaagcgaggcggcggcgaagaagacgtgtaagccgcggcgacggtggtggcagagcaggacgcgatagcaacactcgacctggttttgctctcgggcctcgcgaaggcgaagaagcctcctcgaccttgacgctcgtcgttgtcacgcccagaaatttaacccaaatttccagactattttgtgtattaaatccctgtccaggaccagccagggtacacacaaaacgacaagtaatatacagttccaaacgtaaataaagcgtaacatacttacagaagaggcacttagtcctcacaaagaaagagaacgacagcagcggaaaaaggccatcctagcagtgctttagcttcactccacaggcaaaactcaactggggtctaagccttggtcttctaacttcgtcttcagctcagaagcactacacttctgaaaagagggaataatagcaaggctgagtataaccaccgtactcagcaagccacaccaatgatgcaaacgtgcaaggggaatacaaggacggcttgtggctatttgcataaaggcggttgtaaaacattttattgagcaaaaaagtaaaaatgctgagtaattaaagtaacattaaatctccactgatcaacgctacaccatgttgaacaggcccaaccaacccacctgaactacagtgcattgagtcgatttattaaggtgggactgatcacggtgaatctggtcgaccgcccataaccgcgggcacggctattcgaatagttttactctgatcagaggtgtacaactgtaaccacaagacaaagccccacaacacgtttccatgcgccgacatgccaccacgacataccggaaagaggccgtgacatgacccttcgcataaccccctctagccaagcacaccacacctcaggtttcacccccgtccccagcgggcaacgggcagtcccctctcatgcctaggtgaatccggaagcgacagaggccgtcgcagggcccgccctgctccatcacgcccacccttgcttgggagcgtcggctagagaaaagctacactacaaacccagccgttgcccacgctggcttgtgataagtacaaggaattcttccagggtttcccgcgaaccggtccttaattgtcatgggtgcgactagcaaaaccatgcacccacagctcaccattcagtcgcattttagttggataattacgaccatgaagcatggcaagatgtctcgagcacgcagcttgtcatgtcactaagaggtctaatactgcaattatcccatcaactgagctagtggtaattaagcatggctaagcatatagttctagctaggtcacataagtaacatgagctagtcgatttattacccaaggttgacaaaggacagatatcaagtaaacatggcacaagcgagcagctaggtaaacccgattcccatgtaattggcaaaacatgcatatttatttgcaaacagtaaaacatttgtaaagtaggctcaacatgctcaaggggaatgtgtgacttgccttgcttcttcactttgatcttctgaactcttttcttcgcgacagcggacttccgaaacgacggattctacacgctggcacacaaaacgaggaaaaactctaataaacaccaagcaaacagtacataaaaagtaaacaaacatgtagatcttaattttagatgaattttgcaagttgaacggcccaatttggagttcaaatgaattagttatgaattttagaaagttttgagccattaaatgaacttctataattattaatgatttattacgcaattgataattactttccaaaggaaaaggcacagccgctgacgtcatcaagtgaggccggcgccgacaggcgggccccacacgtcagcgagacaaggaggtcggtccaccgtggaccgggaccacaagggcggtccaccgccggtccacacggaccgacggcccagatcagcccgagctgatcgggcggccacgggatggcgcggctgggcacgggcacggctcaggccggcccggccgagcgacggcgcgcggcggcgcggtcaccggcggcgacaatcggcgatggcgcacgcgggcgatggcagcacatgcaaagagagcggaggcgcggcgcgacgcggcaggggagcggcggcgcacgcgggcggcggcggcgcgcacggccggcgaagaggagggggaggaatgagggcttctcacccgggtggcggccggagcggaggaaggcgacgacgacagcgatggtccggcgacgttccgcgagcgggaaacggcggccgatggtcggagggaccgagggaaggaaatggagaggttaatagagggtaggaagttgcggtgcgcgggaaacgccggacaaaatgacgacggagctcaccgggaggcacgggaagatgagtccggcgacgactggcgaacacggagggattgccgagccacggacgacggctgcggtaccggggagggcgacggcacagcacggggcggactgaagaggcggcgcggcgcgtccggaggcggaaatggcgacggtagctctggttggtagtggggagggcggctcggtggtggattggaggaacgaggaggtggccggtgctcggcttggagaggtgaagccgacagtggcggtggcgcggcttggcggtggctagcgtggcgaggagcggcggccggagttcggcggcaagcggcggagagaggttacacggtgggcaggtggttccgatggcggttgaaggaaaccgggtggaggccggcgtgcgacgcgggacggcgaagctgatggcacacgcggtgaggcgcggcgacggcggtagcagcggcggcgcgcggctggagatcgccggcgggagagggcgcggggagctcgggaatttggggaaaatgggagagggggccccggggatgctttttataggtcccggaggtggagatcgtggtcgtggcgggcggcaacggccggcggagggagctcgtgcgacgtgggcgagtggggcttgaacggcgccgatttttgggggaaaatgggggagaaagtggaggaaggggaggacgtggggtggaccacgtccacacgcgcatgggagcgtggaggcgcgcggaggaggcggcgtcgtggggtggtttcggcggccatggaggccggccgaaggttggggacggtcctgacatgtggggcctcgggtcccacatgtcggccggagagagagagggagccgagggagggtgttatgtggacttaaggagaggagagccgggctgggccggaggggaaagaaggagggagggggattgggccgagggcggcccaaaaggaaggagagggaattttatttgttttcctttttatttaattggttagatgaactttgtgacattaaaattatttattgagctccgaaaatttacgggaaatttcagagagtactttagggcacagagaatattgcaaaatatttccagccaatgatttttaagggaaaattgtaattctcctataatttcacttgattggattgatttaacttttatttaatttttagaaaatgcattattaattgatttttaatcccaaacgaaaatcggggcgttacagtcgtgaagacgacgtgcttcaggtgcgccctgttgttggatgcgtccaccggagtgatgatcgtcgtctcgatcgtgccaccgccacgtcacacgcaggagctcgccgcacggtgtgactgcgaggtactgtgtgggtttgggatcagaggagtgactgcaaggaccaaggctcagaccccagttgagttttgcttgtggagtggagctgaagtcccgctaggtatcgccttttcgctgctgtcgttctctttcggtgtgaggactaagtgcctcttctgaagtattttacgctttatttatgtttggaactgtatattacttgtcgttttgtgtaccctgactggtcttggacagggatctaatacacaaaatagtctagaaatttgaggctaaatttctgggcgtgacatcgacccacctcactgccgcgacatcaacgaccaaagtgcgggttcggctgtgggggcagcgacgagggtcaggagtggctatttgggggcgagaggtggcggggttcgggggtggcagtggtggcagttgggggcgaccgcggtggctgcgagtgccggtgcagcgcaggtggtggtggagtcgggggtggcagttgggggcagccacggtggctacgagcgccggtgcagcacaggtggtggtggggagcagcggcgcagctgccgagacaggtgcggtggaggaatgaggagaggcggcacgacagccggcagagcggtggtgggcagcaccagcatcgccgcttcaccccttctcctcttgccttcgtcatctatctcgccaattctagtctcctctctcgcatgtgcgattcaacatgttgacccaggggtagaaacgtccgagaaaaagtgtaattaaggaaaagttatttctagatgcaagaaaccaagaaaatagcattccaacgaacacccacggcttgggagcggtattcatgcgaagcccattttagtgaaggtattctaacgaaactacttttttgcgatggtagatatgcaattttctcagagagaaaattgattttatttggagctagtgctttgtgttggttaacctggcgttgccataatgatgtagtttttaacctaaaaaaatacccaacatcatacagattatcttcatgtgttccaactagctccattcttagtgtatgatgttttcacaggaacaacaggatactatacgcaacggagctacacgcttggaattggtagccaagaaatttttattccagtttggatatcgtagacataattttttttatagaatctatgtgattttgaaaatattattttagtagatcatcttattggtagaagtttggtgtttgtcccatcacgtctttttttaatttcttttatgtttacttatgagactttttggttatgtgcccatggacaaaggtcggagatgtaatccatttctattatctaataaaattaaaaaagtggttgtccaaggtttacaataaatccactctaacaaaattaaattgaaggtttaaagaatttttaatgcaattattttcttttaaaaaataatagtgcgtatcacaacaaaaggaaaaccaactattatcattggaacaaattaatttaggtttatgtcatgcccacgccatcgtgacactttactgcatgcttcatcttattcggaaaaaaagctgcatgcttgcaaacatgcatcgatctccaccaaacaccggaaaggatagtcgatcccgaccttgatatatgcaaagctgatggggaacgtacgaaagagctatagtacctagctatcttcttgcttgaaatgtcgcatcatgatgcagcagcactttggtgcaccaactcccctccttcagattcacacgcgcgtacgctagctagctcttattggaggagtttcaaatttgttggaataaatgagctggccacaatttactctcaattaatttcataggtccacaattaatactatagagattaatatcaccataaaaatttaagtggagatatatcaacttaaatagagagctatattagagagtccctgttaaccgattaaggtggtgatgggacagccacacatgcgcattgttgggccaggccagatgggccgttactacgtgaacattgatgcttattttataaaaagcatgctcatgttgctcatgtttagcatcatcactagatcaattctcattgcaaatgtcatgtttattatattctggattaaaatataccgaattatgatcatattttttttaaaaattacattaattatttcttatagagattgtttagaggaacttccatatggaatttcccagtggcatgcatggctaatatatagtgtgtatgatccaacatactactatatatagctgtaagtgacgcaataatctgatgaaatattgtaatgtattaatgatatgcatgattagtgcaaaatttgaaattgagtgatcttttgtcactaaaattagatgcacatgcaatctactccctccgttttacaatgtaagactttctagcattgctcatattcatatagatgtttgtgtacaatgctagaaagttttacattatgaaacggaggaaatataatttaacaaatgtttttccactgcatgtattatgttcacaaattagagccgtggcatatatatagttcacggtgcatgaggattacaacgtgtcacatacggctatatatacgtaataaatcaaggtagtaaggccttgtttacttcctaaaaacttttcctaaaaacattatatcgaatctttggacatatatatggagcattaaatataaataaaaagaaaaaactaattgcaaactagcatgtaaatcgcgagacgagtgttttgagtctaattagtccatgattggctaaaagtgctacagtaacccgcatgtgctaatgatggcttaattaggctcggaagattcatctcgcggtttccaggcgagttatgaaattattttttttattcgtctctgaaaaccccttccaacatttaatcaaatgctcgatgtaacatttaaaaattttcatttcaccaactaaacaagcactaacttgttaagttttcttcccaaaaagtttcttattcgcttgcatgtactcgcttggttctaaccctagaaggctggaatttgttggtgttgccttggctcgcgcaccaaacgtcgtacgtggtgtcacccacgcgtcatttttccgtgcccgcgcgcacacggaaatatcaatattttatatatatatatatatatagggggtcatcagttgaataaaaatggtgcaccatttttaagtgtatcggagttggtcaacacaaacgtagacgtagatgagcacagcaaaaatgttgaccactagtatgggtgggcgtggttagagtgaaataattttgatttgaagttgatttaatgtgaccagcagtaccaaatctcttacactataggacaaatttagaagggattaagggtctgtttggattccaccttaaaattttacatcctatcacatcgaacgtttgaacacctgcattaattattaaatataggctaaaaaataactaattgcacagattacgaccactttgcgagaagaatcttttaagccttgctccatggtttgacaatgtggtgctacagtaaatgtgctaatgacggattaattagacttaataaattcatctcacggtttactgacagatactgtaattaggttttttattagtgcctgaacaccccctacgacactctatataatacttgatgtgacacgtcaaaactttacaccctgaatctaacaccccctgaaaataagagatatatatgatgggatttgatctcgctgatctagaaggagctactactaccatcagatatattctcttccgcatggaaaaagtgctaatacatggaaacacctggcaaaatatcaagtaaagtaactgattttgtaagcaagctatcacatggaaagaaaatcagtagcataacttacgttcaatttcttgggtattaaatggaaaccaatctacacgaatatcttaacgagtttgacccgtaattttcaccaaatacccatttgagtgcagcacgaatcctaaagccagtgaacggtggatagtattggagcccggacaccatagagcatcaaatatatatatatatatatatgtgtgtgcgcgcgcgcgcgcgctaccagccgcagcagatgcactgatcaagcattaattctagcgagtcatccacgcaatcacagtgtatgtatacataaattttgataatttgattctttgcaaaaactaatttcacaaatgaatcgtggttaaaacttattttaaaaatgactcttttgttcagcgccgaacttagacacttcagcgttaaatagcacggcgctaaatgcacgttggcacgccgactcaacctcccatccgtggtggcacgacattcagtgccagttgacgtggcgctgaggtgtcatagttcagcgccatacgatttgtcgctgaaagaaagggttatttctgaaataagttttggccgcggtttatttgtaaaattagtttttgcaaagtgtcaaattgttaaagtttgtatgcacagatcaatgtgatatcattaggattgccttttcgatgtcgcaaaaaattcaaaattaatttaaatatgattaaattctatgtgttggaaatactaatatttatattattgtgatattaaactagacataaaatatggattataaaatgcaatagaggagaaaaagaaataggggctaagaaataaaggttgttgcttgagttagaacctttctagagtcccgaggaaataggggtagcccccatttaacctttagggattcttaggccctgtttgaatcttcaataaaagttggataaacttttggataaaagtgacacgcttttcaaactgctaaacggagcgtttcgtacgaaaactttccatatgaaagttgttctaaattttttaaaaatctatttttcaagtttgtaataatttcaactcaattaatcacacgttattaccacctcgttttgcgtaaaacacttaatctttatcttcaggagattcaaacaccacctaaaataggagatattgctgaagatgcttagtgaatctaaaataggagctattgctggagatgctcttactctttacttcttgagttaaaagaaatgtgttcatatcaatcaacttccaatttagtatcatctcaaaatagctacctagttgatttcttttaaaaaatacaccatctagcagtttaagaaatgtgcacgtgaaaaatgagggacatttctcccctttgccttgtctcaaacgtccacagccttatgttgtttatattttatacggaacacatatgctatattttgggacgaactacggctacctttcttttagtttcatattttcatatgggattcatctactatatgctacctccgtcttaaaatataaaatattttagagttgaatacggaaattaaaaagtaggtagaattaaatggaaaaagattgtgattagttgtgaaggaaaattagtactatgtgacaaatttgaaaggtgaaaggttgtgattggttgcgcaatgaatgtacgtagagaagttgttatagaatttagtaaaaaaaactgttattgttcttgaacgctaatatcaatattctaatttaatgctcaccctcacagtgaagatgatattgtatgaagggaactatacgtaaagaatgatgtttaatttaaaggaagcaaatagtttagatttataaatgtaaacttttaaaaagtataaaagtatacatatgtagatagatggcaattgaaaagtgacctcactataacatggtgcttcaccaactactccccatgtgtactgtctactctctcgtccaattcccgatgatatgtactagctctcagctcccggccactttcatttttttattacaaatagtatgtaccttttttgcggggacatatataattgtacttgtatagatcgatatcatttcacacaccggctaatgaatgcgaacctaacacataccaggagacggccagactagctagcaagcaagtcattaactaaattcttattgaaaaggtaaattcttatagaaaaacacttgcaaaagcctcatatatattggtgcgccaaaaaccattacacccttggtgcttacccctaaaccctaaacgtatcctctcttttgttatcatcacactggtggagaaatctttttactcctgatttataaccccctgtagtcctggttttccaactgggactacaaattcagggcagcggcagtcccggttagtttacttttttttctttcattgtttttattgctacttactacttaatccctaactgattttctcccgaatcgagtggggtgtatatccccgaatcaaaccccaaatcaaagtaatatcccaaataccataaatcaaatacatcacagattatacatctcagatccatacaataaatcacagattctaaaaaaaaagaaattatagatctcaatccatacaatgaatcacaaattcttcaacaaaaaagcacctgccgctgccatcccctccacgccgaccgccgccgcactcccatccgcctgccgctgccatcccctccacgccgaccgccgccgcgtggccctccgcaccaccgcactagccgtcgccgcggcggccgccgccgcgcggccctccgcgccgccgccagccgggctgccctcctcctgcgctcgctcagccgcgaactgtgaaggaaggaaagagataaggctgtaaactgtgaaggaaggaaagagataagttagagaggaaaattaagagagaggagtttgtgtggacgggagaagaggataagtactagggattatatagtgcgttttgatctttagtcccggttagtaacaccaaatgggattaaagtcctaactttagtcccggttaagccccggttggtattactaaacgggactaaagatcaccgggatctttagtcctggttgataaccgggactaacgatccgaactttagttccggttggagttaccaacagggactaaagattccggagggccttgacagcccctaacagcatgtgaactagtcccaggactaaagatcatatagtcccgttctgtttataaaccgggactaaaaatcatctttaatcttgatttttattacaatcaggactattgtgattttttaccgatcggacaaagatggtttctacagtagtgtccgccgatcaaagtatatatatgtaaaactctgtgatttccttccaacgaagaaaaaaaggaaaatcatttttataataaaatttctcccattagagatgaacggctacgtgtcattgcagtagagatgacaaggaaaatggtttgaaacctactccctccgttaaaaaaataccaacgagatgtgatccaatataggcagccctttatccaaattcatagtacgaggagaagattgtccttttcttttgagacgaagggagtagctaattcctgttcattattaattatatgttggaacgggaagatataatatgtaggtgcaatatattacttctggagattattaaattaggtgcaaatatgaggtccaaacgttcaacacggggtccatgtttgtttaatggaattaagtatagatgcaagtacaaccggtgaactggacacaaacttaaggctgcattcgggaggtgagttcccaaaacggagcgatccatgattaattaaatatttactattttttaaaaatagattaacatgatttttaaagcaactttcatataattttttttaaaaaagtaccgtttagcagattgaaaagcgtgtgcatggaacacgagaaagaagagttaggggaaagaaagttgggctgtatttagttcatgtgccaaattttttaaagtatacggacacacatttgaagtattaaacgtagattaataacaaaacaaattatagattccgcctgtaaactgcgagatgaatttattaagcctaattaatccgtcattagtaaatgtttactgtagcatcacattgtcaaatcatggcgtaattaggctcaaaagattcatctcgcgatttacatacaaactgtgcaattggtttttttcgttcatatttaatgctctatatgtgtccaaatatctgatgtgacggaaaaattgaatgtttgaagaaaaaattttgaaactaaacacggccttgatcaatagttttcgctcaatggtttgactggggcaggctatacattttccttcttctagaccgtccgtaaaagtggatgtgcgtgaaaatggtattttactattttttttattgtagaatttagaatctactgcgtaagatctcaatttgataattaaactatacagatagcaggcttaccagtaaaaatatcacacatagatagatatgactattttcataagcggtgctttttaagtgcatgaattgtgtaaatagtgagccctacgcacgaccgacgatgctcgaccaccgcccgaagcaaagtcaaagatatatcctctttgcatcctcttcatctccttccttcggagctctcccctctcagagtcctcgcaacaccgctgcctcctatttcccctctcaatcgcagcctccatgaaaccaagagtgtcgctgcctccatcacaatcgtacatcctatctgcgccaccctctccctcaccagtcagagctaggatgcaccaatgataggtggagtgactagcgtgacccaagatccggtgcgaggaggctgtcggcaaccacgcgagagtggtagagagggccgccgcacacctctcctcctcgagatgcgccacatatggatggcgaccagctggggagtagtgaggaggccggatcgggacagcggggtgacaacaatgactacaacgacggtggcttcactgatgaatttttgtgaatctgagttttgtggaaattattttgctggggagctagggtttgtggagaacttttttttgcaaaaatattttccaatctggtgcctttcgattttcacaggaggtctactaattgaaccgtgtatgataatcgattttcacatatataattgtgtggggctacctatgaaagtcccaaattttacagaaatttggttacagacagatgctccacctagtaatttgggccgtctgaaaaaacattcttggtaatatagtgattaattcattccaaaagacagtagcgacatctatttaaatatggagggaataattattatacttaaataaaaatagaagttgtataggtgtactattatctacgaaagctttcgctataacaaatttgaatgtgtcattttcatatgcccaaaatttaaataattattttcttaaaatataagtatttttagcttgaatgtacttgtccatatttcgaaattagaagttgttgtatattataatggtcaaaatgaattaagttaactgcacgaattctaaggtaaaacttatttgtaactagagagagcaggtaaatatgcttaaaaaatttacgtgaagataaaacacgatccatgcctcttcattagctaattcccctgtttcaaaatatagcaataatcttagaatcggacgagacattatgagtacggagatccaatggtaggttatcatcctgggacggagggaacggagggagtatatatatatgtctataatagtgcgtgcggtgaaacagatcagtaaggtaggatggcatcgttgatggaagtgcaggtgccgctgttgggaatgggcactacgatgggcgccctggctctggctctcgtcgtcgttgtggttgtgcacgttgccgtgaacgcctttgggcggcggcggcttcccccgagtccggcgagcctaccggtgatcgggcaccttcacctgctccggccgccggtgcaccgcaccttccacgagctggcggcgaggctgggccccctgatgcacgtccggctggggtcgacgcactgcgttgtggcgagctcggcggaggtggcggcggagctgatccgcagccacgaggcgaagatatcggagcggccgctgacggcggtggcccggcagttcgcgtacgagtcggcggggttcgcgttcgcgccctacagcccgcactggcgcttcatgaagcggctgtgcatgtcggagctgctgggcccgcgcacggtggagcagctgcgccccgtgcgccgagccgggctggtgtcgctgctgcgccacgtgttgtcgcagccggaggcggaggcggtggacctgacccgcgagctcatccgcatgtccaacacctccatcatccgcatggccgccagcacggtccccagcagcgtgacggaggaggcgcaggagctggtgaaggtggtggcggagctggtgggcgccttcaacgccgacgactacatcgccctgtgccgtggctgggacctgcagggcctcgggcgccgtgcggccgacgtgcacaagaggttcgacgcgctgctggaggagatgatcaggcacaaggaggaggctaggatgcggaagaagacagacacagacgtcggcagcaaggacctgcttgacatcctgctggacaaggcggaggacggcgcggcggaggtgaagctcaccagagacaacatcaaggccttcatcatcgtaagccagcacgcacttttttctttctttctttcttaattagctagtggagtggagtactaagatgatgcatggatatgatgcactcgatcgatcaggacgttgttactgccgggtccgacacttcggccgccatggtggagtggatggtggcggagctgatgaaccacccggaggccctgcgcaaggtgcgggaggagatcgaggcggtggtggggcgggacaggatcgccggcgagggggacctgccgagactgccgtatctgcaggcggcgtacaaggagacgctgcggttgaggccggcggcgccgatcgcgcacaggcagtcgacggaggagatccagatccgagggttcagggtgccggcgcagacggcggtgttcatcaacgtgtgggccatcgggcgagacccggcgtactgggaggagccgctggagttcaggccggagcggttcctcgccggcggcggcggcgagggcgtggagccgcgcgggcagcacttccagttcatgccgttcgggagcggccggcgcgggtgccccgggatggggcttgcgctgcagtcggtgccggcggtggtggcggcgctgctgcagtgcttcgattggcagtgcatggacaataagttgatagacatggaggaggcagacggcctggtttgcgctcggaagcatcgcctcctcctccacgcccacccgcgcctccaccctttcccgccgctcctctagctacccctacctacctaccactcctactcctttcctgtccctgtaacgcaccgtaatacaaccattataaattaattaccactttactatattgtaataattaatgtgtatgtattccctacctagacctattgcatgtctctcaaatcaaatattccaagcaagcttgattgtgatacagatgggacagatttcagagctactagcaaattagtatattgttgacagtcgtcacagcacgggcagattatattagtcaacgaaccacaggatacgctaccttccacagtactcctaattaaatgtaccacctatttagacatttggctcctaaattttgacaaattggctccgcatctccacaattttattggctgctaaggctgcgtacgttcaaggaacgttcatgtctagcacggtaaactgagcgacttattagcttgaaaattttaaaatagatgaatatgattttgtaaaacaacattcctataaaacattttacaaaacacaccatttagcaatccggaaaatatgtacatgaaaaataagaaaataaaggttgggaaaagaagagccaaacacaatcttagagtggatggttcgttttaacaacagagggagagattcaatgtgcacactttctatcttttttttatcttttttttagtgtgcacgttttttgaactgctttttttttaaaaaaatatttataagaaagttgcttcaaagattcatatcgattcatacttaattagtcatgcgctaatggcttacctttatatatcttgtccttctcttttacccccatctcaagtaatacaaccatacaaccttaggatgcattttgaccataccgacaaagttcctaggttgattgggtcgatgaacatgatacactatttatgtgaggtttctacaagacgaaaatgaaaatatctgataatcctggtttgagaaacgctaccatcaattctgtttttagtgactatattaacaaattgcctcaatgcatgggaaacaattctaaactctcgagggaacatttctcgttgtttgcatgtcactagcttaaatggttatgattttttttaaaaaaagtttcaacaagatagattaatatgtgatagaccactttgcaaatatgcaaaatcatatttaacttatacaagttgcaaaaaaaaacaaatttaactgtaaatatatgttaactagttatagtttaattttttctcaacttatagaagttgaatttgaacttacatgtttgtggggtgatctatcttctttattttttattttgatgacatgtaaaaaaaaaatcccctctagagtttaaaatcccatcccatcaatgtatagcatcttcaagtgtagtaggtcctactaccatcccagctcccttatcaatgtcagtttggatctcccatacatgatcccactccaccaacccctctccacccaaccaacccaagtccatgacatattgcagccacttctagtcggctacatcaccgttgtttggtgccatgtcaactcacctcaccatttgctttgctttatttttcttccttaatttgtttggagttcaattgttgtcctacaaattttagcaatatttcttttcccacttgactcctaggttatttatttgaggaaaaaaaatcaaaaatttaatgtgagcgttcatcttgcaaccgaagttattataaaccgaacattgagccccctaaacattctcgaaaggtccgagctaccccagaaaactgttgttgagtagatttgcctacacgctgcatcaagccattgacccaacggttttcctttctaacacactgacttaattatatattttgacacgctgaatgggaatggatcctgatgaaatcccatgggggcaaaaaaaatgctaatccaagtgtataatgatttggcatgactacaagacagcgtcggttgaaaatagtgtagacgctacaatctttgtttgtcaaatacaaggttgcggttctgtttttcagttattttgtttttcaagccaaagaccacggcttacagtgcggtaactgcacagtaaccacgagaaaattttgaattcaactttttaaatatgaaattcacgtggtttgtgataactaccgtacggaatgtggcctgtgggggtggccgcgggggcggacacatcctcgaactcacagatgcaaatgcaatgagagtaccatattttaggaaaccttctgcagcactacatgaattagcaaacagtgttgtgatgttcattgaccattgtgcaatcaaataaaaatttaaaataacacagcgagacagttaagtacagtcaacatacagatgcaacagtttgcttctatttggtctttatcccatcagtacctttagaaccaccatcatacgcagaaaggaagaacgaactctggttcttctgcagaaacctaccatgaattccaaattggtttagtaagcattttggctttaagtatgcctaactatcagggattgctacaatctggtaagcatgtaactaaaattatggtattgaccagaaaattgattgtgggacagattttcaagcatgtttctaaaagtcaggctaactagagagctgctagtatatacagaagaaaaataacggctggaatttcatgaagaaatgaaggtgctaaccgacttcacatatttgtgtatattgatgggaaatgaatatgttgccatagtgacgccaacaataaaatcaagaaatatttgcttacttgagaatgtccagcaatttctgctgtagtttgttgagtgcatcttcttccatgttaacagacgcaagtagctccggcaatttcactgcaaagcagcaagaagtgaaccctttcaaacattgtacttagccttccaaattattctgagtctcaacatcctaccgacagtccgacacaaaacattcatctcaaacaaaaccttgtatttcattcagctaatgggggttccaatttattcatacctgtgaacaattattacccaggctctagttcaaattataatagaatacacaagggttacaatagtcgatgttaccctcttcaactatagccctaacctaaaaatccaaccctcaactatgaaattggacattttcaagctcaactaccaaaaccagttacagctgacatggcaactatttctacattgcttgcaaataaggtgccatgttcagcaaaaagtagataatttggatgccaactctgcaaaaaccaccgtaaaaatcatattggactggtcttaaggggctcttttgattacgctgttttgtttcatagctgagaattgatttctagacaacataatagatgaggagggtaaaataaattttactcagtcataacaatgtattcaaaagtgaaactgatataattggtttcaacaagagaaggtttagaaatgcaatgaaagcttgaagaagtaaatttgcaagttacattcaggaagaaagtgaaattttgaacagacaataaaccttgttcctaattgtttccttactttactgaataatttattcattggtggatatctcatataatcgagaactgcacataccaaaaaggcgcagtagatgctcggctccatatataattgagggcgaaacatcacctttaacctcttcagtgtactgctgttgttctttcttatataaaagcattgcaggcaatgctttatcaaagtagcatcgcaatcctttcaaaatctcagcataagagtcatttatccttcagtacaaacaatacaaagttttagtgggtcttttcaagaaaaatatatattttttaaaaaaaatcttgacagacacagatgatgcaaataggttttggataagaataacataacatctaaacctttgttgcataaggacagaatttccataattatggttattaatatgaatattaaaatgattttataagttttgggtctcagacatttagatgtagtgaaatttaatcagaaagagttaaaggtcagtttatggttttgtggatatacaaagaaaaaacagcaaaccagcagtctgaccataggaaaccagaattggcaacctcaatggttctgtttgcttcatggactgctcatgcaattagacaggtaaaaacaggcaaatcagaaggttacatatgaaacctatgaaccatgaaaatcttgaaccatgcagccaatgtgcaacatgaaagatttgtccagggcatggaccaataaatgctggaactctccttgtgaaggcacacagtacaacagaaataatcccaccagtgaggccaaggcgctgaacaagaacagatgcatttcaatagctggtttgacttttggtgtatggttttcagtcatgttaagagaatagcatgcacatagtaaacatactattggattatgctgcacataataatcagtaaccaagcacacagaacacacaggatgaattacaaaccctaagctaagagtggaaattctgtggttgtgctgttgcaaaac

SEQ ID NO: 22740 - DNA, 14952 bp, Oryza sativa
aaattttgcgcaagtttttgcatattatgggtataacatgaagatatgaatcaacaatacatgtcattcccatgtccgatacatacaggatacagccatatgcagcattccagtgtatctggacatgtcattcaagtttagcatttaaaattaacaaaatgagatacagcagacccaccatctgcatcttatataaaaatccacgattagcccaatatcatattaaacccaaatccctctgtggagtatactagaaaacttgagaaaactaatgagcattctggaggaaatgcataatcagaaattcagaaaaccattttaaggtatcctagggtgaaacatattagttgaaaattgaagggaaatgcagcagatgtcacatggaacatgcaacttgggtgtgttcctcgttccggatcgaggaacgggaactatgtggaacttcatcccgaaaatggatggaacatggatggaacttcatctcgagagtggtcccagtacaaggtatgatagaataacgagtagagcagtatgatacagaaatgcagcacaatggagcaaatgatggaaaggcaatccaaaatttccaagcaaaatctataatttgattaactttcactaaatttgaactcatctggatgggacgaacgttgttgttgctccctcgctgctcgccaacgtcctgctgtgcatgtacgagcgtcagcaacatcatgcagtggagaatggacaagcattgccctcgtcacgctgtgggacgaccatggagtgatagagggatgttccaaacaacttaggaatgtgttccaactaacgttccatgttttaggaagaggtatacccctaacgttccatgtttttagaaaatggcatcccgtgttcctcgttctagttcctcaatccatcgatctgggaacttttgtgaccacggcaccaagacctgtccaaaggtgatagtccctatctttgttttacattatctttgtatatatgtgggaacctaccaaaattcatgaatattcatctgaatagccattttttttataaaattctataacacactacacaaaagtaactttgcctagtttgtcagtgagtaatcttaaactcagcgattctcatgcaccagcatcctcctgtttttttttctgtttatttgttaaaattagagtaacttccaatactttctgaaaaatacatcaattataattcaaaagcatgttagactataatatctttccacattttattttatcccttcttccaattaaaagacttgtaacttctttgcacctctgaaagtttactcgaatactcgttactcgttcctttattttccactcattctctcaatgacatgttggtccagggtccacatgtcagcaagacattaggggtaaagggatcacatggattttcaagtagcaaataaggaattgcaccaatgacactaacatttgtttaaaacatcatggtgtatgcctcgatacctacagtagaattccatatcccaacactgtttataacttgttgtgtcaaagatatgccaataaataagaatttatgtttatatagaatgcttacttgttatccttctttgttcggtgctccaagtacttctttagaatatcatcgacagtgggggatcgaggtagcttcacaagctgcagaacaaggaaattggctcaggaaagaagctggtgagaatgataaacagttaactttggcatactgataaagtgataactgaggacaaactcatcgtatttgtagttttataacaagtaccttttcctgtcaggaattagtgcaacataatgacttgaaacattcaagtctgtctagttgttagtaattcttcttgaaatagtaacctttttggggaaccttaattcttacaattttccatactacacaattcttacatgagaaatgaacatgacaacatgttggcatcagtcaatcatgttcaaaaaggtgcagaaaatccagctccacagatacacgaaatatacaaaatatacaggatatatctaggtaagtttgagtggcatatatcaaggttgtttgtctaacagtaaggtggtatatgtcaaaatttagctgcggaatgtacaatgaacaatatatccactggtcaagattgctagttttttttttctgaaggaaataaatattgctagttttcattctcttattagttcctatttgatacaaatatgcttctcttaagtacctgttgtttccatgccaattcagagacaatattcaattataattgaacaatgaggagtgtgctttggacataaataattcaaagacggctcagagaaagaattgaataccttacccagctgcgtgacaaactcccaatcatcaacaagttgtttttttagtgttgaaggaaaatgtgacatgaagagactctcagatgattttctttctttctcctggatcaaacagggcagagttgtcactatgtttacaaatatgtcacaagaaaacttgatagataaaatgttctaccatatgattgccaaatatagctgaaagcttcaaaatgtaaaatttatcagtctgcaaataggtaggtcacgaattctcttcgcacaatgtaaaacattagtttatagttccagtttaaatttaacatgtgttctaaatttatccatactacacaattcttacagttagattatttttgctggtaaccaaacatcatttagtccagaaattggattgttgtgtaaagaactaaacgaagcactgaagcaacatgatttcctattcatcattacaatttagaatgttgagaaaataaaattgtcatcatcatacaacaaaaggtccacgtcgaccatagaatgttcccattttccacatgtatgctgcaaaatgagcataattgccaaaccatgtagtactagaaaataaaaagaaaactaataaaaaagtattattagttcaaaggagcagaaatatgcataatatcagtagtttagaaacgatatctcaaaaggcaaattgcagtattataattgatagaaaatgaaattcatggaaatcaaatacttcacaataaaacatatttgaaagtgagaggcacctcagtcccaccaggctgacttttgcgtttcttccccttgactgcagttttaacatcgcagagatcaaatgtaataagtatcatacaaatcagaagaaccatgaaggcatgaaccaccagagacaatgatacaagaactttgaaaaatgtataagtgaacttaccaataatcttggtgtcctctttatcagtttttgcatctgctgaatgcaattaccataggtaagtaagatatatttaattaaaaaagtaagacattaagtggaaacccatccttaggtggaagcatgggaaaaattttggtataaccactataacagcatggtttattccattcccaatgtagcaaatagagtggtagcacccctttaaaaattcaatgtgccagaaagaaaaataaatgttgcaaataggaacttctatcttttctttccctttggtttaccattggtcatcatttcttatttctagaagtacaaataaaattacagttcaaattcaataaacagatagtttaacaattgaaaagaacatatacaatgttctaagagttttcatgctgaattggtatcaaagccatggcaattttcatgattggactgagagatagtttccaccataaaacagaaatatgatcatgaattcataaccataccaatatgaaaaagtatgaacgggaaatttcagaatgtcctatatgcgtagtaccaacacccataacagtaatctaccacgtactgtacactaactatcacaaaattactccaagattggttcacaactccaaactttggaagaaatatctcccagggtgaagtttgagcttaatccgtcaatgtaaatgatcacagcattcagttataagttataaccatcccatattcacaatctctttgccatttggcatttctactcttttaactacagattaagcatttccaagatgattgattctattagcaaaatacaaaatttataatagaaacataacactcacagctatagaacatagtaaaaacgaccatttggcaaaatagttcctagaaaggaagctcccagtggaatagtctagacatgatccaacagcacaaacattgatttaacacacagatagcttgtcacggatagaagtaaaaactatcgacccagtaaaaaagcatgcgtaatcaattccaatggaaacaatacggagaagagggaggaataagctaaccattagaaccttttggcttatgctgcgctgaccgtccagattttacacttttgtcaactgcttggctcttttcaagctcttgttgtttgcggatattttcgtcggtcaatttcagtaagcgatcatttgtgacccattcatcccagctgtactcattgaaaataaacacaataagaagactgtttacttggattaggagagcagaaagacaactaaatagcctcagtgcaatgatagaaacaagcccctcaataggattcacgctgtactcattgaaaataaacataataagaaggccatttacttggattaggagagcagaaagacaactaaatagcatcagcgcaatgatagaaacaagcccctaaacaggattcatgaaaatattaagaaaaaaaattgcaacgtaagggcaaagatgtgagactacccaaacatggtgttagacaacaatatggccctgccagaaaaataaaaagacactagaacatgcataaggtaatccatatccagctcaaggtccaaaatccaacttagacacttttaaactgtcaaaggcctcagtgaaatttttcatccggcacaagtattaaacaaatttgtgttgccatcacttcaattcacacatggaaaatggattggtcataattaaaaatatgtcaagtcatctgggctccaggcactcactcaggtcctaaatcaaagtcaacaaaacaggcataggatcacttccccaactgagacataacagatcaagttctagagatgatttcatcaacataatcattcaatcatcatatgtttcacaaacgaatctaatggtttcatttacaagtgaatctataaatagcatttgatatattggtggtcaaaactataaaagtttgattcgacggtttcaaaaacatcatatatttccattacacaacaaagagacacagatgtagcccaaagtctgttctgaattctatggctttgacatgatgctatgctgtagttctgtattaatcagattgaggccagtgcagattcatgagaagatttgcatactttcacatatctcatggtactacatgtaaaaataatgtcaattgcttgatagaataaaacatcaaatgcatcatacaggtacaggtacagatcttccttgtatggttagaaaaatattcacatcaacataaagaactggaaagcattggtaataagttatcagctataggtaagcatggaagacttatcgatcatccatggtatgcacttgcctcttactccaaccctagaaaagaaaagaggaagattaaagcaagacaaagaggggggaggaggtgccaaatatattatacaggtaacgtggatatcgtaagggaacacccaaagttaatgcatcatttttaagcacttgtcatggtgtacaatggcgacggagacttacaagataatgcacgtgataccgccactcatcctccttgttttcggacttttgaaccttgagaaatccagaagacaaaatctattggggaatgcaattaacaagcgaaagaaggctaggaaattcaagtatgggagcggagcaactatggaggccatttgcagagaagcaaaattaaatgaacgaaatccggaggggaggggaggggaggggactagaaccctaggttggattggagtggaatgggagataggggcggaccttggcctcgtagaggagggggccgtggtaggcgagcactctctcgccctccttgaaggacggcgatgtctcgtcgtgcttgtccttgccaccgccgcttctggtgttggtgttggtgttggagctcccccccatgccaaatcacccaatcttctttcttgtagccggcggcggcggacggcggacggcggacggcggtgggcaaagaggcgtgctaatggcggcgcggcggggcggagagagagactatgccggggcggttttgaacgttggaagccaagcagtaggggctctttgtggatcggaactgccgatttctgctttactaaaaagaaagtcgcaacgggaagaaaagatatttacatcgaaatatttggctatggttggatttaatctttagtaaattagtcatcattaataacactttttcaaaatttgttggaatttctagagtttaattgtcaattttgattatataaacatcattcatttcagtatttatttaaataaaaatcatcattcctctttgggccattttcagcccattcttccttagcccgcaaccgagtcggcctactttcctctcttctcctccccttcgcctcagcccgcaagcaagcgtccagcccagcaagcaaactaaagtctaatcagcctctccaagtactactctcactatcatgtgggccctaactgaaagtataacctaagcgtagtgttggacccgacagacagcacgtggcccagcaatgatacgacccgacgatggagaccagctcgatatgggatcgatgtgagcatctgagtcgtcgttcgttttgatggatggctcagctcagatcggttccaaatcaatcaaaaccacatgtgccaaaaaaaaccctgaccctatttcattttttccctccctttcctaccgtcggccgcctctccccctctgtcgctctctctccatcgcttcccctcccccaccggcagcgccgctccttctccccctctcctcccgtgtcgcaggcacggcacggcgacggtgagagtacgacgcgatgcagcaatggtgggtacggcacggagacggcgaagacgacagcgacggtcgtcccacctcctctccctcttcccgtaggcctcgacgccaagggggagggtacagcggccataggcgatgacaacagtgatgccgcttcccggctaagggctggatgcaccccgacggctcacatcggtggcttaatgctccatgaatccggtatgtgatccaaattaaaattatttgccacttatatagacagatcaccctatataaatatatgtatcggctaggttggattgaaatcaatccggaggggaggggaggggactagaaccctagttggattggagtggaatgggagataggggtggaccttggcctcgtagaggagggggccgtggtaggcgagcactctctcgccctccttgaaggacggcgatgtctcatcgtccttgtccttgccaccgccgctgctgttgttggcgttggtgttggagctccccatatgccaaatcacccaatcttctttcttgtagctggcggcagcggacagtggacggcggccggcggtgggtaaagaggcgtgctaatggcggcacggtggggcggagagggagactatgccggggcggttttgaacgttggaagtagtaggggctctttgtggatcggaactgccaatttctgctttactaaaaataagtcgcaatgggaagaaaagatatttacatcgaaatattcggatatggttggatttaatttttattaaattaattaatcatgattaataacactctttcaaaatttgttggaatttctagagtttcattgtcaattttgataatataaacatcatttcagcatttatttaaataaaaaggaataagttcactttgggtcactctatttgtcgcccagtccgattttcgacccatgaccacaaaaacgggtatgacccatcccccaacttacaaaaaccgggcaaacgtggtccctcggtggttttaaaggtggttttggctgacgtggcgcatacgtgacatgtttgactaggtctccatcccacgtgacattgacgtggcgcttacgtggcaattatacgtaacatcctcaaattttaaactaaattttgactgcatcatcctggcttttgattaaattagtgtgctttaaaaatctatttgactcttcaattggttcaagtattactttcttagagccctactaatttaccctaattattccctttattccaaaccttagtgaatttgagaaaattctctcaaatttcaaaccatagattatttccttagtttatcctaatattagtgaggatttgctatacttcaaatcctagtgaaactctttcaaattcatagattaaattcattcttttctagggaaatattcaaaaattcctgaaaacactgttcattgcactcaaggtgctcgacaaaatgcccagcccagctagagcagcccaatcaccacccaatcttgtgcaaagtctagaattgatcctaggggaccacatcccactcaaaaaaccacggtttagttggccttctcctcccccttgcgcgcgccgtcctggcgtctgactttgccgcgcgccgagccgccgcgcgtcggtctccggatcgatcgcgcgtgtccgaccgccttggcgtgccgctagccgttcgacgcccttagaccaccaccgctgcaccaatcacgacgacaacgaagacagaacgaccaccgccgcaagaaatcaccgctcgacgccgtgcgcacccgtccaaagccgccgccgagcacgatttcgcttctaccccgggtgaatcgcaccaattcttgccgcacagttggattaaagttagacggtggtttcccctctcacaattcaaaccattcacccccaagtcggctgttttcaccctcgccgccgctgcgcgtcgcgcccggattggcgctaacacatcgccagccgatttcgcacgcggtcaagccaatccttcgccggtaagtattcaaacatggcctcccgccactcaaattgatcttgcccgccctctcacagcctctgccgccctagccatatccaaagctcgagctcatccatggcgatgacggtgcccgagctcatccattcctcccagccctataaataggaccccaatcccttccttgtccatcatcgatcatcaacaaccatcaaccaccatcaccccacaaccccaaagctctgcttcactaatccatcccatcaaccaccatcacccgtcggtcgaacaccttgtacgcgatcgactccacacctctccctccatcctccgccctaaatatcccttagaacaccttatatcaactatgttctagcatagtagaccctaaccaaagtcctgcgtcaagttctacctcgtcgcgccaagccgagcaccgccgcccccacgctgctctgttcttcgccgccgcgaggtttttccggccgcaatccttcatctcgacataactcagtgagttcttccgtttcaaccatctacatactacctagattccattttagcaatccctttgcactatcatgccaccctctgagctgccgacgtgagcacggccgccgcctatggcggcgctcgtcagcaactattctccgcaccttgccaaaggtcggcaagctgccggaatccctccaaacacctcatagatgctctagaacccctcccctagccatgtctaactcatattacttcgatcaccaacacggcctaaccgtgccaccgccgccctagccgccaacccatccacatatcaaattaatccctccgccgccgctcgccgtcgccggagatccctagctccctcccctcctcggccgcaaccactttctccctctagcgccgccgtaatcccaaaccctagcgccgccggcccgatttggggaacggccgaaggtagaagaagggaagagagagagactgacaggtgggacccgcacacagtaacatttcacttttatttgattttcaaactttaaaagcccatatattttaaaatatagatccaattccagtgaaacttggaccaatattcttctaaaatcattctctatcctttgagcctctttttgctatttttgcattttattttattttctctatttttcatatttttggattttatttgaattccttttaaatttgaattttatatatgtctaaccctaggtcttgaggattcttctgactcaatagataatatcaatcaatctcaggacatcgagcaaggcaagttaccatatacctgttgatcatttaagcttatattttacaaattatttatttatagccttctattcaatactctattttatatgcacaattcaaccaacaattcaaccatagaaacccagataatttagtattgcttactttgcttacaatctggttaaaatatcttatacttagattgggacagtacgtaagatttggttgattttcgggtggctagtactgtctcgatcgatataagttttaccaggtacttatgtcgaatgaacgggtacgaccacagtttctagaatggggacagacctagttattatattaattagcaatatggcacctctgtatagtggttcttatttttaagtcctcacgtaggaggcaactatagccgcgaagggcaactttaaccattaccatgtacaggtaaatggtttgtgatactcgagtatgaactatatggtatatttctaaaccttgatcgagatgacgtgttgtcatacgatcagttccccttaaatatctcgggaacgccagaactcctcttgctgctgttaacaatacgttcagagcatatgaggatataagttcatggaacaggtgccataattgttaatgacttaatgctgggccatgactaaagcgtacatctgctgcagtagaatatctttgaaactattcgaatagccgtactcatggagttgagtaccgggactcatatgctaccctggttagaaatctaaagtttataagttttacaaattcttgctataactcttccaaattgtttattactactttttgcaaagaaccctactatatgtcaatgcataacatatttccatgataacttgctgagtattgtaaatactcacccttgctcttataaccccttcttcagatctgggtcaagaggaggacccttatgactattactacgatgactccgataacttagagaatccctaaaggttatacctcactagtcagaatgtatagaaacttccgctgtgtattaaatagttaggtgagtacctattattgtaaaacccttagtattgtaaaactttaaggtatgcaatgaagaaccagttatattgtatgtatcaatatctactgatccagggattgatacattaattctagtcggatccaagttattagttttgggactcgacaggactggtatcagagcatatgttttgactataggacaaaccctaaggattactaactaagttaagtttgaacttatttcaagcttatctttttaaggggggtagatttaatccacaagcatgcattataatgacatttgtatatttcaagacaatggcagaagagcatgagcaagaacttgtagaaactgcgattactatccatgataatgactgcactgatcaactaatcaacttgatgactaaactgaagataaatgagaagccggaattctattcacatgcctatcaacggggagaacgttgggaatattatatgaccgtgaagatcaatcctccacgaggtgaacgtgatatgtattacttccaaacacatcataggtggaataccatgcgagctgcactatatgatgtgtccagggaggcttttctacgtcttaatcatatctaccgagacaggttgcaacactctcgctattcttatcatcctatgcgagagccaggcgaagattattgtaccctccagaatgtggattatcatgaacaaccagtgaaagcaactatgtctatctggatggaagccgcggatgacatgtatgaagaagctttggaacatatggatgtacaacataaacgtttggaagaagctgaacgcagagaagctgttctcaaacacaaatatcgtatacttcatgaattatatgaggaaagagaaaaacaaaattctatcctcaatatttgtgttgtaggagcagccccacttgcgattgcggtccttgcggatcctcgactatggccaaccttggtttgagcaatccgtgcggagcgtgtacgtgtcactgcacctgcacttgtagctgccgacgagattggccttgcgctcgcgcatttgctctgggattccacgcttggtggttgaggcgcttcctcaatggcagtaagcagcgacgtgtatggcgagatggcgggtggcggcggcacagagagtggcatgtggtggcgggctggcggtagagagtgccggcctgaccgcctgagttcctggcagtggcagcttgtcacgcggtggcggcgctgatggcgatgggggttggtggcggtggcttggcgcggtggaggcgtggagctcgcacggcggcggcggcttggcgcggtgtggagagctgcgactgcgagcccatgatgcgccgccgatgcgagatgcggatgccgagagtgccgagccgccgatgcgatgcgagagtgccgagacggcggcggacagggagtcggccagtcagggactcgcttctccctagggtgaggtgaaataggatttttttgatgggtctattaggccaaatgggccatatgtatgtgtgctgttggctgtggacctgacttggcctggtaaccccttagctcgttaaggctcgcgagcagctaacgagccaaaccaagcctgtcacgagccgagcgagctaatgagccacgagattcctgtccgcccctaaatatggatacaatccgagtagtcgttatcgtttccatataaaactctacttgtccttccttacgcggaactccttctatatacgatgtatgattccgtataagacttggtatatggtgggccccggcgagcttaatcgattaatattgggtatgtggtatccataactatgacacaaacttctataaggaaatcaatctataacaatatatcaaatagagatcaattaccaggtttgacaatctagccgatactgatctagacttatatatttatacaggggagggagaaatgaagtagggttagggtttttttttggccccggtgattttgattgatttggaaccgatctgagtcgtccatcaaaacaaatggctcagatgctcacatcgatcccgcatcgagccggcctctatcgtcgggccgcatcactgctgggccgcgcacgcctgatgggccacggccgttgggtctaacacaaggttaggttagatttttggttggggcccacatgacagtgagatgagtacttggagaggctaattagactttagtttccttgcttgcgggctgaggcggaggggaggagaagagaggaaagtaggccgactcggtagcgggctaaagaagaaaattggctgaaaatgacccaaagaggaatgaggatttttatttggaataagttcactttgggtccctctatttgtcgcccagtccgattttcgtccctcgatcacaaaaccgggtatgacccgtcccccaacttacgaaaaccgggcaaacgagatcccttggtggttttgaaggcagttttgtctgacgtggcgcctacgtggcttgtttgactagttctccgtcccacgtggcgctgacgtggcgctgacatggcaatcatatctcggaaaaataattaaactaattctctctggctctccccatctctcagctccctcctctcgccgggtggcgtcaagcacagcgggcggcggtagatagcacggcggcggcgtggcgacggacagagcatggccagcggcgggcggcgcggcgacggacagcgcattgccagcggcgggtgacggcgcgcgaggcgcgtggggcagcggcggccatctctctcttgcaccgctcgcctagccgtccgccgcccttctccccgatggccgccggcgggagaagagggagcggcgcgcggcagcgttggtggcgagagaggagggagcggcgcctgtgggagaggagggagcgacgcacgcgcgcttgccggtaggccagggagctcacctagccgtcgcagcggaggagggagaagaagccgagggcggaggccgggtcgggggaggaggcgagggtgtggagcgtggtggtgagcatgaaggaattgggggcacaggggagggaggcgaggaggcagagcacggcgtcgagaggggagagcgcggcgtaggcggcttgtggaacagtggcgggaggacgacgagcgtggtgtagaggcgctcggcgatgccggtggtcggtggcgacacacggatggtggcatcgatggcgtcttccagggcgccgccgctctgctcgccttcacgcggaccggcggcgctccggtcggggggtggtgcaagagagagatggccgccgccgccgccggagctcgcctgctccgccacccacccgcgccatcctctgctggggaaggggagagaggggaaagggaagaagggagagaagggagagggaagaagagaggagtgagactgacatgtgggataggggccccaccattttaaatttatttttttttgcatgcggggcaacgctttttattatttttctgagatataatgtcgggtcccaaaaactaacaacttggatccgactggaattgatgtatcaatccctggatcagtagatattgatacattcaatatcactggttcttcattgcataggttaaggttttacaatactaagggt

SEQ ID NO: 22741 - DNA, 689 bp, Oryza sativa
ctaatattaggataaactaaggaaataatctatggtttgaaatttgagagaatttgcttaaattcactagggtttggaataaagggaataattatggtaaattagtagggctctaagaaagtaatacttgaaccaattaaagagtcaaataggtttttaaagcacactaatttaatcaaaagccagcatgatgcagtcaaattttagtttaaaatttgaggatgttacaaacctaccccccttaaagaaatctcgtcccaagatttacttaggagtcttcgaaaagatacgggaattcgaattgtaaataatcttcctgttcccaagttgcctcatcctctgtatgatgattccattgaactttaaacattcttattgccttagtacgagttgttctctgtgcttcttccaagattctaataggatattctggataagttaaatcctgattcagttcaacagtacttactgatatttcttcttctgaaatacgtagacatttctttaattgtgaaacatggaatgtaggatgtacatcagatagataatctggtaaagccaattgataggctacttctccatgtttagcaattatttgatatggtccaatataacgaggagctatttttcctttgactttaaatctttttatccctcgtaaaggtgaaacttttagataaacataatca

SEQ ID NO: 22742 - DNA, 2176 bp, Oryza sativa
catttttgtactacctggatgtaaagagtaagctgaatcatgtgcttcctttagtattaccttcctcaagtttcctgattgtggtacgacaattctatttccgtaccataatattccttccaggtcgatcttcagtaatatctgcagcctttccttgcaccttccgttccttaaaagtttgtattcagaatcttctttctgatattcttttatttgatccatcaaggtaggttttaactccaaggtgtttaattctccaaacttaataatacccagatttagtttaagcatttctgcttgcaattgttctgatactatttcttgttgtaaattgtaataagcttttcggcttaaagcatcggcaaccacgttagcctttcctggatggtatagaatttccaaattgtagtctttaattaattctaaccatctcctttgccgaagattaaggtctgtctgggtaaaatatatttcaaactcttatgatcggtatagatctttcaatgattcccaattaagtagtgtcgccaaattttcacgcatgtaagattcatgaagtaagcaggagcgttggttaatccaaatgccattactgtaaactcatataatccataccttgtcacaaaaccagtctttggtatgtcctcatgtctaattttcaactgatgatatcctgatcgaagatctattttagaaaatacacttgctccttttaattggtcaaatagatcgtcgattcttggtaaaggatacttgtttttaatagttacttcatttagagctcggtaatctacacacattcttaaacttccatctttcttctttacgaataatacaggagctccccaaggtgaagaactgggtcgaataaaacctttttcctgtagctcagctatctgtttcttcaattcttctagttcattaattggcatcctataaggtctttttgatataggtgccattccaggaagtaactctataataaattctatttctcgatctggaggtaatgaacttagttcttccggaaatacatccaaatattcttgcaccactggaacttcttcttttggtataagcatacagatgtctgtcatatgttgttccatagataaattggatttaactattatccttgtatttattcctcattcatcagtaaggataacctctcttgttgcacagttgattagtccattattcttggctaactaatccatgcccaaaataatatctatagtttgggtaggtagtaccatcaagtcaattaaaaatatttgatctcctaatttaattggtacatttctacaaatagatgatactaatacagttcctccgggtgaatgtattagcatagccttatctaaattatctttaggtaaagactgattccaactggcttttgcagataaaaaggaatgagaggcaccagaatcaaatagaacaataactggtttagagtttatggtgaacatacccatcaatatattaggatcttgttgagcttcttcttctttaatatgatgtacttgaccacgtccaagattaggtccattcttaataattggaggatttttctttataaaacccgtagcagatggtttctgataagaagtttggccacccatattttgacgattagggcaaagtcttgcgaaatgtccaattttcccacaaacataacatggagagtcttccatttttaatccaggtcttggtagtattggtggcatgcctggccttgcattgggtagagatggcttaaatggataaggcctccgaacttttagtgaacttctagttggtaattgtcattgtaaattcattcttttcttacggagtccttccaccattctacgatcattttctagcctaaccactttattgactaggctttgaaaattttcatgatcttgactaatcattggtcctcaaagttcatcacgtagaccttctataaatctttcaatcttctctttttcatcttgaatatccgaggcagcatatcgagcaagttgtgtaaatttattcaaatattcttgtactgtcataaagccttgcctcaatcttcgaaattcattctttttcatcctaatcacaactgtaggtataaaagcatctctaaaagctgtagtaaattccatccatgtaataatatgtgtaggatcttctatag

SEQ ID NO: 22743 - DNA, 18424 bp, Oryza sativa
tcaacaatcagttttggtattttaacaggaaaatggcaaattactaaaaaagacacaccgaagaaattgtactaacctgcaaacgccgcagaataggcttttgccatcgttccctctgataaaagaatgaaaaatgaatcagcaagcaaaaggaattatgtaaacacaattaaaactaaatatctaatacgctaaataaatatacactacgaaaaaaaaggctgagaccatgtgaggaaacaacaatgtgacttgttacaaaaactgaaaatgtaagcatatcgccaccacaagaaatttgttgttgcattctcattttagagaataccttgtctttccaataactatatacagcttggaaaactccataccgaacagataagtactgcaatgcctgcacagagaagcaattctaagcaaacattgagaaagaaattaacaaaattacaagtctgcagtaaccaaatagaaatagtgggaaaatggatttcttcccagaaatcttgaaaatactagatccagaatcaagtgaactacaaattcaacaccagaaaagatttccattatatttgtttccgctgaaaaatcttatctacatcattgtcttgcaatccttacaatctagtaaagttatatgatctctacactagcaaggcacactaaaccaaaaacctattttgatcaatatattaatggaataacaacttattcacatatatcagcacaagaaatgcatgaaatgtgaatcaatattagcctatataataaataatcaatagttattaactatagaagaagatatttctacaaccttagacattaatctttcatgtatcctttcctaggttgacctgactttggcatggaaataatggttacacatctaccccaacatcaccattaagatgataatgacattcataatcacaatatgttgaattagtgtgttatgttttaatttacctgtattctagaaggtaaaagtttttatgccctgtaggacttctactatcatataatacataaaccacgaacattaatttaaaacatcttgacaacattataaggaagtgcatgaagttgcaaagaatgtataatcatgcagaacaaatgacgtgagtgtggtgaatccaaatcgactttctgtggattcttcattgaccacggcattataaaagtagcaacagtctttgggtgaggcatccaaaagaaaagcacaaccacagaaagtgacactatactacaacatatcaatagaccaatatggcttcataacatagcaagtaaagaactgcataaagaagttgtgtaaccatgttagtaatatctgaaaatgcagctgtcacgtaagcatatgccaatgacatgtgacgggagttaggagaattaaaatttgaaaaccacacaatgtttactgggatgtcaagtctgaggtggaacaacatatatcacttcaagataagtgtgcaaaccatgtgctagagccagttcaagggatccctagaccataggtaacatgtcccaatacaattgacacatcatgatggttaagttattggaaagagttcatgttgtaaaatggattaaaaacaatgagtcgttatctcacagttgatcatgatgtcaatagataaggtatgattttactacattaacaaactatacatttcgcttgatgtttatacaagtatgcctgtattgcaaaatgcatgcacatagatccaaatgccaatattataatctcccttcctcttaaacatcatcctatcagtaacatgtaagattcccatttagcatgtggctttacctccattgcagcatcaagctgcaagaggactggtacaggtcctatgaaagttggtgtaatggctcctgctctttctcgagctttgtggtccaaaatttccaacttgaataggaggacttccaacctgtaatgtaggaccatttcaaactgtagcaaaaatacatgcttcacagggggaataacatagtggtgtctcaacagatttcttcatattcaagacagaaaacgttaaaagttaaaattattcccccctgttttgtattgtcagcagttatatgacgtacataaccagtaagtttagctcttgcaaccaaagtttcctcagaaatactacatgcaattctaagttcacatgttatagcctatgtcttggaaggagaaacgtttctaattaaaagtacaactagaaactcctgatgttaagttttagatttcaaatggtgcatacttcagttataatgaacatttcaactataactagtaaaccaagtcatctagatctccagaactttcttacttttcagggttaagattcttccgctcattgttgaagtcttcaagccagtcttcatcttcattgtccagatcatattcgacaaattcaccaatctcagccctggctgcggagtgtaacaaatcttagaacagaggccataaacaagatattgtaaaaacaataccagagcagtaggaaagaaacctcctcttccacgtatataacaggttggttgtgcgaaggttcgagtgtagtccctttcataggtgtccacagcatcaaactgaggcgttggtatctcttgaatgttcttcttagtgggtgttggatttccctgcaaagagaagtaagatcacccttttgaatagcatgatgccaactaaaaaaatatatggccctctgaaatagtggttgctctgtccactactctactaaaagaaacgagtacagcaacaacacaatgtgtggcataaatagtttttttcagaatcttagcagtttcaacaattttgattttcttttcaaaaagtaaggcaaaagtaaccctactgtttcatttatatagaaagataaatttaaatattgatagaatgaagtgtattgttgttgtagggttgcaagctatctgagacacaattaaagccaaacagcgcacatatctaataggatcattattgcaggttcaagaaaaggttatattggctagttgcacagttaaatgttgctagccaaatacaggtcgaagtacaaaacctaagaaatgcaaagtgagtactaatacaggaaaatgaaaagagctaatttcactgctccaaatagccgttttcttattcgtaacacatatgactgcaaacctgagattgtgaaatgaatcaaatgactattcattcatgtacataattgagctgaattcaattcaacttgctaataggatgtagaacagaacccagcaacttaagaaagctagcaaaatgcacccaggcaacatttcaaagaatcgtggcacaatccagtaatccagcactatgaatcaaattacctcgccctccgtggcagtagtagcagcagtgagctccggcgcggactgccgcagcagcacccctgcccttgcgaccgcgaccgccgcggccgtggggtcatcgtcctcgaactcccgcgccgacttgaggatggggagcttcttgtggatgtcgagcggccgcggcctaaacgagagcctactcatggccatcaccaccaccaccaccaccaccgccaccccgccgcctcatctcatctccacctcccccacctcctctccctctctctccacccccacacgcgccgaccgctaccgccccgcagggtcggggcccaaggaggggggagcgcgcgcgggcaaaccctaggtccgcgagggccccgtcaggcgggggcttgggttccggcggccgcaggagccgcgggggggcggcgtgaagggggaggagagaggaggctctccgcggcgagctagggttagggttttggaggtggggaatcgagtttctagggtttgaaaggaggttgaaagggagggaacgacggagaaaggggggttcgcgggcgacgaagggtggccaggccggcggctcgagctcgatgagtcgaggccgtacgtgtacgtatccgtatgggcgtaatggtgtccgtacgcatgcgtacctaagcaagtgtataaaggttttttttttcactagtagtatgcccgtgctaacgctacggtaatatttggtaatttatcctcaaccaaaagacgataacagtatttatgtacatagtagtattgttctctaaatcaggatttcagttgccaggaataacactaattatattctattatgattctattcttttttttttcaaatacaccattgtcgaagcatttttttcccggtacgtataagattgtgatatctctatcgactatttgcgcacataaatgtaaaacatgttctgacagtgcaaaatatggatggcaaccataatttaggtagggtgaacaaaacaccagatgtgatattctttctagcaagtaaaataataggcaatactaccatatgctatgattcatgcgttaaatttcatacaaataaaacaaacaaaacaaagagagagccgacaaaaatggttgttcttgagtagtttctgcaaataaataagcattcgctagacaaatgaagagatagagagagagcagagagactctgcgagtaggaagcaatactatgttgtagcaccagcctcttctccttttgcaagtccaccttaagatagcctcgtttaagaccgtatataataagctgcttataatttcttatagttgctgaagtcgaagaatatgtgtgctaaacaaaataaagaaagtatgtgctacctgatatcgataaatagataacctacgtgtgcatatgctaaatattccaattaagtggcatagtagctgagaaacaattaataagtaagggaaaaagtccaaataccctcctaaaatttatggaaatccgtctagcaacctgaactttaaaatcgacatccaacccgcctgaactttgccataccatccatattaccccctaaggtagtttttgatgatggttttgtatattttggaagtttaaatgaacaattttgaataactaatataacatatttgaatatgatcagttataaatcatcaatttattcttatacaatgatatcatgctattattatgttgatacttgtttttaagtgatagctaataaggagcaaaaagaaatatttaagtcaaaattttaatatatatgttcgaagtgtatgacatgtgatcaaactcatccaacttatatacaaattagataaaaactactatgcaaatcatccttggaggttatataaacggtattgtaaagtttagggggttgaatgtccggtttcaaagttcagagtgctagacggacttccatccaaaatttagggcgttatttggactttttccattaataaataaaaatgtagtacagctctaatgatattgagagaaaattcacctataggagcattcatgcatgcgccatgatcaatattacgagaaaattcacatatagttagttgcccgtgcgttgtaacggaatcattttacagtccgatattcagtttattgcaataacaaaactgacaaaagaatagtatgtctgcgaagaatagtatgttagacatgatacctggagtacttttcccaatagatatatcactgtactaacttggcaataaatgttttaaaaaatcatcacaaaagcttgcaataaaataggctactgaaatgattgttcagattagacatgtgatgttttttgacattacaattactatttcttccgacgaactaaaatatagaggtactggtcacatcctttgtcatcgttacaagctcaaagtaaccgacagtgcacaacataaggaccatgacagtaatttggttagtacaggataaaagttttcctttaaaaaaaacaatgacaagtgttcctaagaaaaatttgctgcaatgctcctccacttactttgagcttaatggtaagtgcaaaattgttacactgatatgatacatgcataggtgcaccaaatttgcataaaaatatgaaatttgccaaacaaggctataaatatgaaatatgccaaatagagactacttgagtatgttgaaacttgcaatacatgtatagatagtggttagatttgtttatatatgggtgagccaacatgatgttaataatgcagaaactcttgttgtgttcgtcttgcagtagtgtaacacaaaatataattttgttccattagtgataatgccttcaccaccataaaaatgcaaaacaaagtactcctttcggcatttcatcaaacatatgtcatgcatgaccaaaattgcaaaattgcccgtatatggtagtaatgatcttgacgttacccatcttgtacagagaagacctgcacaatcaaagtagtaaaccaggagccaaaccgccaaacccatcattaacacccaagaggtcaatatatataatcagatagatctgcctccttttgcaaagaatgattttcacccgttgttgaggaagctgacgaaggcggcgacgggaagaggcaggaaagaagtagcagctgaggcggtggtcgtcaccgaactgtctatcgagttcttagcctctcgccgttttctggtgctctgtagcactgttcggggtggacgcggcggacgtcggcagagggtgtagagtcttgactgagaggcgtggtcacggcctcacgggtggagaggatcccgacaacggcaacggggccgtggaggacgggcttgggcgccggtggagacatttccgatgaccgcacaagggcgcggagcattggaggatgatggcggcttcgggctagggctaggcggtgcggcaggaagggggcaacggtgaatcggcaacggcgctagggcgagcaggcgcggagggcagaggcggcgatgagaaggatgggatcatgggattgatgagggaggggtgccggaggagatcagcgcgatgggcggaggcacgcgagcagtgggggtggcggcgaagaaagcgggaagcggggtaggaagggggtcgcgatggagggcggcgaaagggaagggagcgcgcgtgcgaggtgtgacggagcacggagagagagaggatggatgcgcgatgtgagcgtggatggggcgtcctgtgcgttgatttggtgggaggatcctccgaaacatctcagccattaaattgttcaggactcaccgccaccactacataatttttaattagtagagattttgttcgagtataagtattacaccctccatcctaatatataaagctctgtttggttaatgggatagaaaaatgttacacacccaccaaaagacgtctctaaatcctaaccgttcattcttcctcttccatttaatcttaacccttcatttatttctcaatctcaattccacccctcatttcacattatccaaacacaccctaaaggttcctttgaattgcaggaataaaaaaaacgaagaaataggaaaatcacaagaatttgggaaggtggttaaaaacaggagggatttaccaaaacacaaaggaatgtaccggttttgattgggaccgttagaaaaaacacagggaatcggtatgtagaaagatagactcgaaggaaattttccaagaccgttgatctcttgttaagtttcctccaaaatctttatagattgttcattccatagaaatttcaaaggattggatggattcaatcctttgattcaaaggcattcataggaatttttcctataggattaaaatcctctaaaatttttatgtttttcctccaaatcaaagggaccctaagagactttgggatcgacatatccttcgattagccaagcgaatgaacacgagcgattatataggttcaagccacccggaggtgtaaaactctacacatgttttttttgctatatggatctggaaagtacaagctatgcctttttccaactaagaaacaagcatcctttttcatagcatgtctccttccttttatagcgtaaggaggggttcaccgtgttgttttctacttcccctccgtattgtctttcagctgtcttgtcaatgttggctgatgtcgagtgattgctccctcagacagcggggagtggagacccattctctagagtgaagatccgaccagggtgttagtcggcgagaggtgcagggtatctgcgttcgtgatggatttgcggggcccggccaccccgcgaggagagggagactggagtttatacagattcggggcacccggaggtgtaataccctactcctgtgttggtgttcgttgtcttccctagatcagctaagtacaaaggagacatttacaggctacaaagtgagagtactgatctaaaagaatccaacccttcatccgtatctggtccccttcctttcatactacaaggaagggctcacattattacgaatctactcttagtcttgtctcatcaaccgttttgtcgttgccaactggttccctaacgcaggtctcaacacagttggagctttatccagaaggtttcactgctttttcagattctcagaagctggctaccaaacaactacttttcataatctaaagcttccccaacaggtcctaagtttctgtaaaatcagttgttgctttatgcagcctcactaaaatattgtaaacggctttatttggagctttcccttgtttaatttaccaaatgatttctcctctatgcttttgattaacattttcttatatggggtctcatttgttaaaaatgccctgtggtgcgtcaggggcagggctggctgggcggttccaaagttagccagacaaaaatttgaatttcatagatgaaattgactaatttctagcaataaatcggcccgttttggctaagaacaaccagtttgcaaggaatccgaccacgaaaatcgatcaatttggaaggaaaaccgacggatgaaaagtaaatttttcactggtggtactaggtggacaatttgaccatgtaaaacatgttttcaaagaaattttgtgtccgaagtgttgccaatatgatcataccgtttgcaggaattttgtatttttaatatagcaacattgtacttcacgagacacattagtattaggagcatctccaagagcctctccattgcactctcaagccaaattttagccattccaaccaaaaaatatcctctaacagcctctccaactggatggtaaaccctccggctggccaaaaccctccctccactagccaaatttgaccagacaaaactcactagccaatcatgggccccacacgccgtcctcctcccatctcctctccgacttctcgcatcgagccatcgggccatgcgtgccacttcccgccgccggcgccggcgacggcgccaccagccgcttgagctacggcacgaacatgctcgacccagaggacacatgcatgaagtggctggacaccaagccgctgagcttcgtcgcctacttctccttcggcagctttgcgtccctcggcaccgcccagatggaggagctcacccgcggcctccacgctgccggcaagccgttcctgtgggtggtcagggccaccgaggaggcacagctgccccgccacctcctggatgcagcgatggcgtcgggcgacacgctcgtcgtgcggtggagcccctgcgccacgggatgcttcgtcacggggatgacggcgtttctccacggcgagatcgagcagtgcgtgcgcaccgtcatggataggaaggagtaggacgccgggagcgatgcggtcgcccccgcccacacgcgtggcgaggcgcggcggtgtcccccgcggcagctctgacgccggcgagaagtggaaggcgttggttcgggagggcagcgaggctgcagcattggagatgtgtcgacgacggcacagaggagagaggcgccggagctgtgaccgccgccgtcatctgtgccgtcgcccgcagcgacctccgcccgcgcacgccacagtgagcgacggcgtgggcggcggcgaggcgacggacaccacaccgacacgctcgggtagcaaggatgaggaggacgaaaatacaacccatgtcccattaatttataatacacggtgacatggatgaatctcagacgtctatttttttatccaacggtatttttcaggttttcagtacatatgtagtttgcactatatattttttatgtttactctttctgtttgtcattttatcctggactaaaacttagttttgctatgtctctagcttcgggtgtttgtttagtgtaaaaccattctgtaagattggtcagctcattttatttatttttaatttttgtacaaagataatccgttcttagagcatctgcagcgttgggttgaatcgacgggtttggccaaaacatcgaacctagcacactgtgagatgcggctttttgtcagagtaattcgacctccgctgaggagtcgatctagtctagctgattagaaaaaattactacctccgttttttaatagatgacaccgttgactttttctcacatgtttgaccattcgtcttatttaaaaattttatgcgaatgtatgagatataaatcacacttaaagtactatgagtgataaaacaactcatagcaaaataaattataattacataaattttttgaataagacgaatggtcaaacatatggaaaaagtcaatggtgtcatttattaaaaaatgcagggagtatttcgttttgagaaatttttagttggaagtttgaaacttgtcggttctcttttatttccctttcgctgtaagacggtcaagactctgtaagacggtcaagactctgtagcgttctcatttcattaatgaaatgggagagaacagcccattcatcctacccccttcaagccgcatcgtgtgtgagttccatccaaatcttatccaaatattgtgttgtacgtagaagtcagcggtcaccgtctttaacagagccgctccccgctgaagcctttcttgtgcgttcaccgatctctgcagaatggaccagagattgatccatgagcaaacaacataaatcagctctaaagggtcttgtgttcttttatttttgaaacatgcagtatttctgaacttccatatagtccaatcaacaactgcaattctcactaccacaaaatttttctcctttttttaagacaaaatttgctacaagacatgcaaaaaaacgcgtaattagctgaggaacatcgagaaaacgtgaaactgcccgaggacactgcaaaaattgtgtaattggccgtaggacaccgcacgcattattttattatttcccggttaaaagttgtgagtatttttttgaaatgccaagactgcccccaatggcagtatattctcttcttcttgttgttggttgctgaagcagtggcagcggagcgcgtcccgcatccgatgtccgtcccagctcgttggtcgttgtcgaatctccatggatgcatggtgtcgttgagcacattgttcgacaggtcaaatagggaaaacaggaggaggtgacgacgacgttagcggggatgacgccggcgcgtgatgtgctcctccgtgactccatcccgatgtgaaggacagagattagggacgtgcgcgttctcgcacggaggtgggccacctgctcggtgaggtcgtcaaggtggcgctgcttccacatccacgaccgccgcaccgactcccctgccgccgacaccgtgctccccccactcccacttgaagaagccatcaagaaccaaacaatcaacggggaggtggatggccacggcgtcaccaccagacgcccgccacctagccgcgcccaccgctgcttgcctcctagctacgcctgccgctgctcgccacctagctacgcccgccgctgttgctcgcgccgcagcccacctcccacccctgcacgccctgtgagagagagaggaagaggggaaggggatgcgcctagtcaccgcacgccggcgcctcccccatcgactgcccacgtcacactcctcgccccatcgcgcgttcccggcgaagtcaacaggaaggggaaagaaggaaagagaaggagaaaaccaaggagagagaaaaggggcaatccgggtatttagaaaatatctcacctcttttgacctgaaaataataaaataatgcgaccagtgtcctgcagtcaattacacaatttttgcagtgtcctcgggcagtttcatgttttctcggtgtctttcagctaattacgcgttttttgcgtgtcctatagcaaattttgccttttttaaaaaccatgaacccacctcgcaaacaagtgatgtatactatggattggtttcaaatcaaacaaacagctcactatattccaaatgagtatggcaattggtcattctagtaaaaatgtgctggtggctaaggtgatggggaagggctagggtatctaagattcaggtctgttgtggataggaaacatttggagtgggttaaactaatcaatcttgtcggtcaattgaactgactggggaggaggataaagtggtctggaaattgactaaggccttgtttagttcgcgaaaagaaaattttttggtgtcacatcggacgtttgaccggatatcggaaggggtttccggacacaaatgaaaaaactaatttcataactcgcctggaaaccgcgagacgaatttgttaagcataattaatccttcattagcacatgtggtagtagcacttatggctattcatggactaattaggctcaaaagattcgcctcgcaatgtccatgcaaactatgcaattagttttttattttatctatatttaatgctccatacttgtgtccaaagatttgacgtgacgttttgggaaaaaaaatttggtaactaaataaggcctaagaatggtatcttcactgttaaatcattttataaagtaatgatgattcaaaatactggctttcaatttaagaatatttggaaatttaaaatccctgccagagtgaaggttttcctgtggctgatgttgaaaaatagcattttaaccaaggataacttgctaaagaggggtggaaggggaaggaggctaaatgtcagttctgttttgaaaaagaaattgtggcattggagcaattagctctttttcagtggcatactcggcatactaccaaatagggtgcctaggagtgacaaaagagcaattgttcctttttactaagagaaacattatacaaattagggaattgtttagctaatggtcttcctcccagccagctatcctcccaaaacaaagttcttttgccattacccacattcttctcacataacattaagaatctctctttaactttcattaaccccctccaaaattgagaatctccaggtcttagctttttctgagataaagtcttttgacctagatacttagctaatatcaaatcttgccaaatgcctttctcattttttaggcgccaaagccatttacccaacagagcaacattcatgcatcctgaatctaggatcctaaacccccttgatccttaggagtgcaaacagtttgccaattaataactaagtgatacttcttgaccccttgatcctcttaccgtaaaaaattagatctgaaaaaatctattcttttctttactccttttggcaactcataaaagacatcatgtataacggcacactgctaagacttgcatttatcagggtcaatctcccacatcccaagagtttcccctgtcaacatcttaattttttctcaattttgttttcagtaggactccaatctacactgtgaattctcttcttatcaattggacccccaaatatttcatgggcaatataccatttttacaagttaaaatctgacaatttaccacttctttttcttgggcccctcctaaacagaacagctcacttatgttagtgaaacgccatagattagtgaaatgcaacccttcccttccgcctgtagattcgacgccccgatttaaccttccctttcgcttctgccctaaggtgtacatggcggccgcactttgtgccatggtgggcgccgaatattgtggcgtgcttggaaccccgcgcgctcgcatctcccctctattgggtcggatcttacgggccgcttcctctggaccaaacaattcagtaaggttatttcaagtcttgtcacatcggatatttggacactaatttagagtattaaatatagactaattacaaaacccattccataatcttggactaattcgcgagatgaattttttcagcctaattacgtcatgatttgataatgtgatgctatagtaaacttttgataattatggattaattaggcttaaaaacttcgtctagtggattagctctcatttatgaaattagtttttttattagtctatgtttaatactccaaattagcatctaaacatccgatgtgatagggactaaaaaatttgggacaatttcgtttttgcccacactttaatctctaatattgattttgtccctactttttagggttttcgtttttgcccccacttttttttgaacggaaagatacttttgcccctgttttggatggaggagttaatggtgttaaataggactatataccctctcccatatctattcattaattatgtttttgccctcaatccctcattagccggaacagaaagttgagatttctcatgtagacctagaaataacaagagttcaccagaaagctaaaacgtctatataatgcaacgttgtacgttaggagtaaatttgacatccacggaacaatgtaaataattggacacaattggacattgcagaaaatttgaagcccaacctcaaatgcttcaaatcgcacacagatttcatatatatggtactccacaatataatgtcagacagaaatactagtatccacaggctaggagaaacacaaaacgagaacggaattcaacaaactcctgcaaaggagaggcgagatccccgctgctaggcgtggccaccgcggccgccgccgcggcttccctagcgcggaggagcggcagcgccgagacgccgaggagcaagccccgccgcgccagcacgtacaccgccgctgccgactgggacgagccggcatcaccagacgatgatgccaagttcgatgcgacgatggccgcgcctctccgcacgcggcctcgtcggcggcagcagccaccggaggacgaccggcactggaacgcgagcggccgcggcgccggcgacggtgcgaggaggagctaccccatcccgtcccccgcgacgtgacaatccccaacccaccaaaccctagcccccgcttcctcctcccctcctcgcggtggcgctcgccttcgagctcggaagcggaagcccacagtgaaaatggctggagggaggggctgcgcctagcccgctctccgctgccgccgccggctaggttttgaccgtgtcctgtgtgcagcgagagaagtctggaagggttaactgtttcccagaggtaaaaaggtaaatcactaattcgaaaaatctttatttccttttttttctctattttttactgccataaatccggtctcactaacttccattcaaattaggggtaaacgtctctttcggttcaaaaaagtggggccaaaaatgaaaaccctaaaaagtaggggcaaaatcaatattagatatcaaagtgagggcaaaaacaaaattgtcccaaaaagttttagccccatctaaacagcccctaaatcgcagaacaaacccacttcactagattctgtttgaagtatgatagtttggccaaagggtttgagctaattgctgaatttatgataatgccttgactgtcctctatggtgcaaaagactcttccaaactccccattatttttatctagggatcatgaaacacccaacgagtaaagttgaccccaacaagtgattcatgtataagcaaagaattgtcaccttctagcatataagtaatggttcatgtaaatgctgcattccttggtgaaattgcattttgcactggcctcagatgaaaacttgcatgttcgacagcctgccacattccaacccaagattgcagaacctccagaattaccaccttgtactacagatccgggcttcagtgacgggttatctgtgacaggccaacacaactcgtcaaagatgagtcatctctgacgggccgaaaaaatatcctcttcaatatatggctactagggaggacccgtcacagatgtgaagtcatctgtgacggcttgcacttgtaacccgtcacagatcacaaccatggctcgtcacatatgacatgccatctgtgacgggtgtagtattatgaatcatcacaaaagagaccactcatctctgatgggtatttaactaacacacgtcacagataacgttatctctgacgagtggtagttatgacccgtcattgatgagtgaaaattcaaaattttaaattttgcaaaaaacctcggattgagacatgtcttatataaaagttgtagttctcgatgatatccacaactttataactaacaacatttctattagagatcatttatatccccgaacatgcattacaagtgatgagatcttacgtttaaaaacaaaattttgagttttttttcaaattacatggatggatacatgccccatatcaaagtaatagaactcaaccagatctacaacattataatcgaaaatattttcatttgacaaagtttacatgttcaaaatacaaatacatgttataaagtgagatctattttgaaaaatgaaattttgaattcttcaaacaatatcggatgaagatattttctatgtaaaagttataaaacacgatgactatttagttgataatattttcatttgaagtcatatttagggtgttaaatatatgttaaatgattcagacaagcatagacaaaataataatattgggtgagtagtcaatatgtattgagtaggtgagttggtaagggagctctctatggaggttgaggtcttgagtttgaatctcatgtttagcatgcaagttatattgcgtgaaaaattgtgaatttgtaggtagtgatgtgtaaccatgtataggatggctagtaaaattcaaaatatttttgaggtttttttgcgtttaaaattcaaaaattgtatttcttgctgtgtcatcagtgacgtgtcgtaagttacaacccgtcagagattagtcatcagtgacggtcaggtagttacgacacgtcattgatgactcatctgtgacgggtgacaggttttaacccgtcagagatgacttatataccggtcagagatgagttatctgtgatgggtgtttcactcgtcacaggtgattttgtcatcagtgaccactaatcactaaccaagaccaaacccgtcaaaggtgagggtttgggcccgtcagagatgacctggtccggcgtagtgtgggtctggaaacttgcaatagttggtatgaaaattattattttgatccttgagtaccaattgatttatgggatatttaactttggaccacttttaaaatgtgtcaattaattatttgccactcactatctatgacatgtgggttctcatgtgtctatgacatgtaggtccttgatttatagcctccacaacacaaaataagttggatgctactgatttgatcacatgatggaaccattttccaaaagactgaacagagttcttcaactgatacaatagtgcaaggttggcaccacatgagtccaggaaactgcaatctgacatttgttgttaaccaccgtcattatctcaactaaataatttgaaaaacagtccaagctgaaattcagttgcttcccttaattctgtgcactcatacaggaagctaattgatgttcagttggctttagtccgttctccttcccaatatcggtatgcatatatcatgcataattgcaattctggcctgagccatttgttcctccccgtagaacttccaatgattgtgtactaacacacccatgttaccgtagacgagcaaacattcacgtaaccacatatcaagtattggccatgacaggtcatagagaacaggcactggtggagaaaccatttttggtcggtcggccgaaatccacaataatcccggttcctctaaaaaccaagactaaagatgatttttagtcccggttggtggctacagtgggcatatttgatctttagtcccggttggtaacaccagggactaaagatgatctgtagtcccagttctaaacctgtcaggccttgtcaggccccctgggatctttactcccggttggtaacaccaaccgaaactaaagatcctaactttactcccagttggtgttatcaatcgggactaaagatcaaattcaacgcttaatatataatccttcttccctatcctctcctctacaaccacctcgcacttatcctctcagatcgatctccctctcctccctatcagatcgatctccctctcctcctccccctccgcctcctccatttgctgctcccatccc

SEQ ID NO: 22744 - DNA, 1012 bp, Oryza sativa
aggttagcactttggaagcagtaagatttttcctgtagacaatgtcgggggtgaagttaacaagagagcgaacaataggttcgaaagatccggattaactatttccaaatatttcagccgagtgcttcacgcgatagtctgtatggcatgtgatgtagttcggccaatggacccaacgttcaataccgtaactaggttggtgaaactacaccaaatgtgttggtcatttcagactggagcgaccgcgtaatttttgatgtaactggatggccggggtcagtgcacgatcaccgggtgtcctgatcgagtgctatgaggaagtatcttgatcggttccccagggtaccgccaggtatttacttatggtacatttgtttttatggtattaacataattcttagtgcacgacattaaattttttgttgtaggtaaatattttctcgtcgataaggggtatgcgaataggtaggggtttctcgcaccgtatcctgaagtgaggtactagcagccgcaatttgaacatgcggcacctccccaagatagggatgagattttcaatttctaccactcctctctgcgcaggtcggtcgaacgacttttcggacgtatcaaggtgaggtggcaaatattggacagtattccggcttacacaccacgtgcacacaacatgattattcatgctgccatggcattgaacaactttattgttgatagtaccgaaccaaactctatcagtaccaaccccctataccatactcatatccacccggtaccggatgtctctccagcacatcacacataccatgcgcgtgataccaaggctgtgatggatatggtccgtgaaaatattgctaatagcatgtattagcatttcatatttagcagtatttacttttgtaatagtatcggagtcatctgatgtaccatgtattaattgtgctaatatatatgtactgctatttattttgcaatgatgatatgctctctaatatatgtatgtactgctattgat

SEQ ID NO: 22745 - DNA, 4605 bp, Oryza sativa
agcaattttaccaagctgctgtgacaccccgcacttttaccaaggacgggccctctctacatcacatcagcacttttactaaggctgacgcccgcacttttactaaggtctagcagctttcctacagctgcggtgtagccaactggaacacaacgcacccgggaggaatttcccgatcggtcacccatcccgaaactgctccagggcaagcatgcttaacctcggagttttttcgagatcggcttccagaaaagaagttacaacttgttgattgagtattctattaatcctattaaaccttgggtcgggatgtcacattctcacccctttaagataccaacgtcctcgtcggtcaacccaggccaggaacatctcctattagcaccacgtatatacagataattttcggcgcacatacgtcatgccatacgaccacatcgtggatcatcccgtatgcaccgtatgcccgcatacatattcatatatacgtatagctgcaagggtcggctctgataccatctgtgacaccccacactttaccaaggccgggccctctctacatctagcagctttcctaagacatagactttcctcatagactaacataagtcttttctgcacactttgtcctcactcgtgcgcacccgggaattttaagcaattttaaaaattaaaaattatgtggcttatatcattaattaatcaggtaactagcaaaattgttggaaacaagaataagccactcaaaatttataacattcacatatgttgaagtaaaacaaataaataatgtccaatataccaccccaatatattaataataataacatggaaatattatacgaacaaacgccactataaacagtcagcatgtatacatacacttacactaataatgcaatacatcatatatttgaatatatggttgcacagcacatacatggtattaggttgggcttggggtgcatggtagttaatatgtcaataaatatatctgtgagaccgttatagggcgtggggtgcatagcaccattgtcctacaacatgcgatacgggtaagccgtctggcacctctcacttaagttgggttcatcatctggctaattagcactaagaagccacacatctcaaataaataattaatctcaccaaagggacctcaattcaccagcagtagtaattttccaccaaacacatagctccacataggaggcctcacacaaggccacaaaagagagtagcacggcttagcactgaagtcaagcagtcaaagtatggccatgtctatagcaattactacaagccggtgcatatgcttatgaacccaagcccatggtaggattgagcagagttggggagaagaaaggtaagtagcagggagtgaagaagaaatagctgacgcccccaattagcaaaatgcattattcattcccatttacctgtaagcaagctagctagttcttacctcttggccaaatgctcaaaccaccaccaatccaccatgccggctaggaaggggagagaagaaattgggtaggcagggaggtgatttaccaaggaggagaggccaacagatcggcgaggacgaacacgggtggatgaccgtggacgaattcgacatctagacaaaggtgaactttgcacacaagaagacttcggaaagtagagttacaacctctcgtagataaagttggatcaaggatccttggttggaaggggcgtttcttcacctctgtaggaagggaggttctggttaaaacaaccctctcatcgacacctatctaccatctcacaatcttgcataagaataagtggctatataaaaggattgatcgatttcggtgtgcttttctatggaagggggatgatccagataatgtcagttcgggtagtagtctcattaactggcagaacgtttgcaaacctaggaatttggggggcctcggtattcttaatttggaaaaattctcacgagctttaaggctgcgctggctttagtttggctggaaggaagacaatagaccttggcataacatggaagtgccttgtgatgaattggacagagtgccttttcgagctggaacagtcattaccctaggaaatggaaagaaatgctctttttggtctgataactggctttagggttgctcacctaaagatttagctccagggatcttcaacctgtccaggagaaaaggaaacaatgtgcacctcagccttcaaaacaaccactggctgccaatcctaaaccccattaccacgataagtgaaattgatgaactggtccagctgggtagccgtttgcaaaaagtcatgctccttgaaacacccccgatgacattcgttggaaatggactcccaatggagaatactcagcaaagagcgcttatgaagcacaattccaaggtatgattactagcataaacttctctcccctatggaaggcccaggcggaaccaaaacatcgtttttttggctggctcattttgcatcagagaaccctaacggcggaaaacttgctgagacgtcactggctatgtaattggatatgcagtctgtgtacaaacgctttcgaagatgcaaatcacttggccaaagaatgcagcttcacaagaaatgtgtggaatttagtatgcagctggcttggttacaatctctccccacaatcttggcaagacacacccatttcgaattggtgggattccttgatttttcttgcaaaaggagattcggcaaagaagaagattggagctctactcacaacgtggtggcaggtctggctcgagcacaatcgtcgaatcttccatcataaatagcaaagcgaatcacaagtagcttgcacgatcaaaaaaaatattgaattaattgagctttcgagacaagcctaaaggctgtctcagctgagtcgtttctcttctctctctgtaataggctttatgagtttattttcctttctggatgtcccctcttttctttgaaccttgatgtttttcgttttgtctgactctttttactccttctaatatatccggtagagctcctgccgttaatctttcaaaaaaatagacaaaggtgaacccctcatttcttaccatcatttattgagcatatagtgcagccatggcatgagcatcaattttctctgcacttgcacatcactatgagaaccaccaacaatttgtatccatcacacaaatgctagagccagagaggaaaggaaagagggagagaaagagcagccacagccgcagctgcagtagccgccgtcgccatagccatagcagcagccgtcaccgccttagctgcagtagagctgatccacacctagaagcagcagatcggtagccatggagtggatggtgagttaggggaggaacaaaagccttagcaacagcagcaagggaggagaataggaggggaataactagtgctgctgccttatctgttcgagagagaaggagagaatggaaggggattaaattgctggatgtacactactagactacacaagtcattaaattgaacctactaccggaatagtattgtgaagttcaagcttagagttagataaattagctattaaacataagaaagctggcacaataaaataaactctgcagagcacattttaattagagagcatttgcatttcttgtgctgaaattttattgaaacctcagcgtatataacaaatttcaggaaagaagctagagttggaacgtgtcaattggcagcagtatattatttcggtttcgatcacagaaaactcaggcaagtctctcatttgatcatgttgatagacataattctatttcaacgtaaaaacctatttcatacaaatatttctcctagtattgcatcaaaatatattttctagaataatgatatggacgatgatgatatgattgacaagccgatgatgatggagatcatcgggatactagtatggtgggtagggggagctcacggatgagatgattgatgatgatggcaggtcagggctctccctacatacggtgtataaatataaggactaatcaccccatcactcgtatcagagaatcgtatataccgtgtcgaccatagatccgtcttaagatgggctagtaccttatcaagtttattatactccacatgggtaaatagtagtagaatgggagatgatataaaccccatgaatgccgatgaagtgcattccaggcgcatatagtagcgcggtggtgtggagagctgataggctcaacacaaacgtggagtgtagtaacctgaagtaggagaatagttctgtgttcttagtatggtgccgcatctagcgaagtgcgacagtcaaacatgttaagagtagctatgggtacagtgatacaagcctgcacagtgctaaattaaatcatgattcacgtctgtctcctggattggaggctacggggagttgctacaaactctattcaatgttacgagtgtattttagcttttgcaaatcttcttctttttaaaaatccctttacaaaatagacttagactggtgatagtaatgtaggtgactatgttacataaattatggtatataatatagattattaacttattatgcatgcatttgtattt

SEQ ID NO: 22746 - DNA, 592 bp, Oryza sativa
gtagacgccctacaacacgggcattacaggccatccgtgtaggcggagacaccgttgggcggcaacggaggcaggccggcggtgaagtcgtacacgcccaacaacggcggcctaataggccagccgtgtaggcggagacaccagtcggcggcggtgaaggcaggccggcggtgaagtcgtagatgcacaacagcggcggcataataggccatccgtgcaggcggagacacaccagtcggcggcgacgaaggcaagccggtcggtgaagacaccggtcggcagcgatgaaggcaggccggtcggtgaagacgtggatacccaacaacggcggcgtaataggccagccgtgtagggggagacactagtcggcggcgacgaaggcaagccggtcggtgaagacttggatgcccaacaacggcggcataataggccagccgtgtaggcggagacaccggtcggcggcggcgaaggcaggccggtcggtgaagacgtggatgcccaacaacggcggcgtaataggcctgccgtgtaggcgcagacatcggtcggcggcagcgaaggcaggtcggcggtgaaatcgtagatgcccaac

SEQ ID NO: 22747 - DNA, 701 bp, Oryza sativa
ttcctgcagcccctcatttctggtcagggcttatggctgttaaggagtccttcttctcgtatggatcctttaaggttcacaatggtactcagttgaggttttgggaggattgttgggttggtgccacatcttttggtaagctatatccatcactttataatatagttaggaagaaaaatgttgttgttgctgatgtgttaaacacagagcctcttaatgtctcttttaggagggccatcgtaggggataatctagtggcttggcatgaccttgtgtcgaaagttgtgtcagttaacctttcagagcaaaatgatgtttttagatggagagctaataaaaatggaatcttcactgtaaattctatgtataatgctctcatgtattgtgatgtagttccaaggaggactttcatttggaaccttagtattcctttgaaaattaagattttcctgtggtacttatggagagggattactctaaccaaagacaatcttgcaaaaaggaagtggaagggtagcattaaatgttgcttttgtaattctaatgaaacaatacaacacctctttttttattgtcatttggtaagatctgtttggaacaccgtttttataacctttgggattcgaccacccactagtgttgctaatatgtttggtagttggttaaatggtgttcaatctagactaaagtaccaaattttt

SEQ ID NO: 22748 - DNA, 5014 bp, Oryza sativa
ggtctttgttgcttaaggaagaggatagccacaaattgaatggatattgcaagatgttagaggcaagggtcatggagttgtatgcaaaatatgggtggaaccttagaaggagattggtgtagtagtgtttctcttttctcttttaagtgttgtcactttggtactttttttatccttattgtaaagaattcgggtctaagtactcttgtatgacgttgggctgtgtacatccattgtggatgtagaggccggattttaatccattttctaaaaaaaaaaattcatgcgttttcaaattcactgtttccatgcgatttcctatcctatttctaatttttttttctgttctgcattccaaaggatccctaaagttaggaatattctcaactaggtacattaaaatctttccacccaacacatgcaaaatatgttcatacatttttctttctcatattcttccttcttaaaactattgtattgctaatttttaaaaattatgatttttaaattagtcaaatttgggatgatacaatatatttttagtgcaccatgaaaatatagaaaagttgaggaacgttctgaaatggaggaggacaacgcaagtgcaaagtcatgcatttactggtgcattagctaatacttttatgcccagtttaaaacatattatttagctgattatctacttgattgtagggatatttttttatatgaatgctttgaataagttatctatgcaatacagtagaagaacggttttttaaatactagatgacaccccgcacgttgtagcgggacttctaagtgatcaacattgatttttccagtaggattgcgtgtgtaagaataacactgatacaattatagtggatcacttccaatcaaatatggaaaatctacagaggttgtaaagcaatgtgacaaaagaaatacatttttttgaagaaagacatcatataacagtattaataaaagctatttgacagtacatgaaaaattgcaatccttgtcatgggcacatgccatcctctttttcaactcaagatgcatgctagtaactgtaaatgtcatatgaaaacactaaattcactttaggttgctcccggaatagtgtattcgatgataatcgagttaaactcttatatcaatagcaattgacatgaaaggaaaggttgactaatgaaaaatcagatgaaaggtctagccttcatagacaattgcgtgaaaaatggtgcaattggacttgtgcattggaagcaatggtggtcatgcccatggttattaagaccggaccagtgactaaaccgttagggcactcggtttactggtttattggtttaaccggtcacaccaccggttgaatatggtttaaatagatgagtgttgcaatactaaacacaacatgtggcatagcctggtggttgaaagtcttcttggaaacatggaggctgtgggttcgattcttccacgtgacgctgcagcctctgctcctccacatgagcggtcgaaccacctccggttttgtccggttcaagcggttttcgccggtccgtttgattgccgatcttttagccgccggtctgtttgattgccgatcttttagccggacaggaccggccaacgcccaggttccggttttttcgggtcggactgttggtccggtccggttctaataactatggtcgtgcctagagtgcttagtttgcttgttacccgagaaaatgcaagccgatcttttagctggacaggaccggccaacgcccaggttccggttttttctggtcggatcgttggtccggtccggttctaataactatggtcgtgcctagagtgcttagtttgtttgttacccgagaaaatgcagtggcagttatttaagaattttactatggcacaaccatgatttatctcggaacatattacactcatgcgctttcctcaaagagcgtaacaggggtgactatcgtatccttgtaacagagtgaatgcatgtagatggatttgggatgagataaatatagtaaacaacctttctcgtgaaaggatgaataacaaattgtatgcttaaagaagattaaattctatttgaaaattcagtaaaacgaagactaagcatctaattaaccatttcagtatgcctgtgaacattcctagataaaatattattcagtagttttccacacatcttctgccagaaaaaatgaagatgtcagttgaaatcgcaaaaaaaaagttccatttgtaatgtggttagaaaaacgaaccagcagatatgagagtacataatgaaattgaaaactaattaatcataccgttcaattcaagttactatgtacttaaaaaaacacaaagccaaatcaaatgatactgtaaaatgatagaagataaacagaggagttaccaagatgattggatctacccaactaaatgtgtagaaaatacatggattatacactttctacgtccatccaaacgaacccatcttctacattcttgtgttttcaaattcgctgtttccacgtgatttcctattctatttctatttctttctgtcctgcattcctaaggagtgttgaatttaggaatatttttaactaggtacattaaaatctttccacccagcacatacaaaatatgttcatacatttttctttctcatattcttccttcttaaaactattgtgtattgctaactttgaaaaatagttacatttttcaaaattttcaaatttgggatgatataatatatttatagtgcatcataaaattatagagaagtagaggaacgaggtgaaacggaggagtacaatggaagtgcaaagtcacccatatatatttaccggtgcattagctaatacttttattcccggtttaaaacaaattatttagctgattatctacttgattgtagggatatttttttatatgaatgctttgaataagtggtctatgcaatacagtagaagaacaaaaaatattttagaagatgcattttcatagacatggaacaagtaatccaccacaataatccgagatgaagtaattgtaaagtattgatctttagtactagttggtgccaccaactggtacaaaagatctcccgctctgaccactgggcctgacaagagtctgacaggccacaaccgggactgtggggtacgcagtactcgggtactcatggcaaggccttgggccatggagcattgggtggaccgagtgtcttagggctatatggtttacttgtaatttaagaaagggattgaaaataaggtgatcaatcttatcccatgtaaatagattgtaggtacacaaattataaggaataccgtaccatatccgcccggccgaccttgtaactatataaggggcaccggggcaaactctaaggggtgatcacgctctgcatatgtgcctacgagcaattccaacgctgtgctgcgcaaacctacagatccaatctacactaactagactagagtattacctcatgctgagggcctgaaccaatataaatatcagtgtccccatctctccttaatatttcgcaccctataaattatattgctgatcataagaatcgacagagactaaagatcatatggctgggtgggctaaacaaccggtagtaaaaaataatctttactaccggttcattttacagccgatttttgccgatagagcaaagattggttctcaagtactgtaggaaataaataaataataaatttaatattattatagtatttttaaaactaatcttgttatatactccctctgtttcacgatatacgaattttggtctctccatctcttgtctctctttgttagggttatagataccacatacctaatagtagttgactaaatctcggcaggacccaccacataccatgtcttatatggaaacaatcttcggatatacgatgagttccgcataaggaaggatgaatagagttctacatgaaaacgataaggactacttggattgtatccatattgatttccttaattctacttggataaggagacacctatgggtataaatacaaggccccctaggaggagaggggatacgaaacaatagatcaaggcacaagatcaacatacaagtcaacatgcgccaagacaagatgccggagatcgacttcagagataagcatggctagtcccctacggtgtctacggatactgtcaggagagacatagcgctgtctctgatctcgccgggcacagattcgaggaggaagactaccctgttgtcgactacgtgatgatacttcaggtcgccaagtcgacaacagttagataggctaccccagatattgtactggtgtgattatggtgaataagagcaacgaccagtttcggccaacaggatgtagggttattacctgacaattcaggggcccgaacctgtataaaaatcctcatctctgtctcttttacctcaatctcgcatatatcctagtaccaacgatccccatactatgcaaataccagaatcgcgacatcaaacgtcaacactcttgtctagaatcatcaacacacatataaatttggatatagatatgaagcacatacatgaatacatacataaatctatttaaaatatgaaacatcttataattaatgtgaaatagtgggagtaagttgttttactccattcaaactaactatttctgaagtttaaagcttaaccttgtatgaaatattaagaattatagaatcggaggaaatatggcttcaaggcaatatagtacataattagtgcacttaggctgtggtctggaaccttgccttctgacagggaaaataaagcaagcgaatagagcgagattaactaagtattagcctaaaaacttgaaaaataaactaatatgatttttttaaaacaacattcttatagagaaattttgtaaaaaaatacacggtttagcaatttgaaaaccgagcgcgcgaaaaagtgagaggtaagttgggaaagaagggggagcacacaaccttaaatggttctgtt

SEQ ID NO: 22749 - DNA, 705 bp, Oryza sativa
tgaaatatgaaattttaatagttgaaacatttatactatttttcatcatgattataatatatgttgttgtagagttttaattgaaagacattcaatagtgtaatggaattcaaatcagataagtagtttagagaaaaaaattgtatgtatgcatagatgaagtcggagtatagacaattgcatgggtgcccgatattttgctagcatattaagaagcaaattgcgaagctgcagaatggtttcatataaagataatagtacctccattaagccattaacttggactatagaatacactacataaatacactcaaatttgggaaattttggctcatagcaaacaaaagttgtgttagtacaactagcaaatcccaaatgcatgttgatgaaatcgttgattactataggcagcgggaccacttcctacaggaaagcaaccatggggcatcgatcatcatcctcgaagggccatgctggatgttgcctccatgtaggatgaccaactggtaggcgaatccacatcaagacatgcaagatgtaacttgttagaatttataacttaagaccaaaaaatgaatcacaacataaaaaactgccacatacctatagcaaccaaacacaacctgccaagttagcatctgcactagtccttcggcatgcatctcaattcacacaggtgcttgtacaaccatgctagggcagcag

SEQ ID NO: 22750 - DNA, 3555 bp, Oryza sativa
tcaggatgacaatttgagaagttggtacacaaccaaccaactaagaggaactccggatgccttcgtcaatctctgcccatcaggtgcctctaaaggcttgacaccaatgtactgaaccactacaccccctccaattaccggaattaatgtcactggtgattgcttggccccgtataggaagagccaagatcatggtgacctcctcgagtgtcagcgtcagctccccgctgggtaggtggaaagtgtgactctctggcctctatcggtccataagagccgtcaatgccgcggcgttgtacagaggcatgtgccattgtgccatagtgataaacgccaacaactttgcccaccgttggaacgaaatgtaccagttgctgaacgggatgtgtgctgtgtgatctctgactcgtagagtcttgaggcgctgcatccgtagacataaaaaatttgttagtgtcagtaaatccatgcaataaatagaaatgcttaaaacatacaaggaatagtgaaatggaggataacctctccacttgctatcctaggagcctggtgcctctcctcaaagtactcctctagaccgggaaacaacaccctcttacaattgaacatgaagtcatcagttaatgatacaattatgatatgcaaattgagaaaaaatgtacaacaaagcaaaaacaacctgtgtactggacccaccacctccccccgtcctacggcattttttcggtcgatccttagatttgtctcgattcggacaccgagttttcttatggcctggttgatggcatatggaacatttgtttgtgtctgtcatgtgcttgtatctttgtagcctttatccatgtcatttttaaacgtttttgtccttcgtcttcctccagtgtcgttcttcaaggacaagtcaggaacaaagaactcacgtcataactcggccactgggatggatctaagtagggctcaaacctcggggagtatgtgtgctgcacaacctcattggaagcttcgaaacatatccgtggggacacctccatgtccaaaccttggagtctctagatggttatcatgtgtgagcatggcatgtggtggagttgaggaaattggcaagtaaatgtgttatctcttgcaaccacgacatagtgacatccaccccattgcacaccggccgtcttgactctgccttgtgtcagttacagctgcactgacctctacaaccgccttacaactgtcattacaattctataaatagaggagagcttctcatttcacaacacacacctcaaggagcaattctcactattccatattgtattatctatagtttagtagaaataaaaattaggagcttcggtcttattcatcccaatccaattcatccatcgtgtgagaaaataactcctcaaatgtgggtttggcacgaaacattaattgcctaacagtcatcccctcaaattggctttcactggtactttcatctaccacatagctactaaaatggagtcgtaccaatctatccatctacatcagttgaccgataaataagagtgcatgattctaaaatagtatgccagtctaaaaatagaaaaatgacattggtaccccaaaactacctacaatatttttgtaattttaatgcctaaccaacggtcacaatgtccttaggatctatacctatcaacatcaacatgaatcaatatgaatccccaaattcatccatagcaaaagagtacaaaacttacaaagccaatatgaatcctccataccaacatcaatatacaatgtggagattatgggtaccccatacccacacggcatggttatctgactagttataggggataacttatatctatggaatatgtaacagatcatgacttgggtattacgtttccttttatattatggagcggcctacagtcctgatttgataatattgtaaaatagatttaggaaaccgatactgtattggttaaggtttctatcttgtaatcctgccccccatactatataaggtgggcaggaggccctctagggggcatgacacacaaactgatcatcagatcaatatacacccggcggattcaaatccccaaacaggagtagggtattacctctcgtcgagagggcctgaacctgtctaaatcctttgtctccgcatccatccacttttaggtctcgtgcgctacccccttttcatattgtcgaaaattcgttacgacagttggcgcgccaggtaggggttgcgtcgagttttccgtcgagaagtgcgatggaatcaacttcataagtcgccggcttcatcttcgcttcgggagttttcacttctttgccgccgacaacttctacaatctgttgctctccgactcggacccaatctagctggcatatcagtctcgacatgctcgatggattcaatttccaccgccaccaagttgattgcttgatcttcgtttactaaaagaccccaagcacgatcgtgcggcatcatcttcattagcaagcctcctcgctttgagagattaacttgctcatgcggctacgacggtgcctcaaccaacgacttcgtcaagctcttcttctagccggaagattaatctcggctcggcgagttcgatgaccaacctccaccgccgcgagttcttttttcgatcgacaagatcatctgcatgttgctatatatacatgcacactcaaaatagccacgtgagttcgtccaagtctgctcgggcccatgtctatatatgcatgcacacaggagcacaacgacaagctacagaggatacatatacagcgtggttaacaaattcttattaaatcatcaccgagacttcctggacatacacaagaaggacaggtggacctccaaattctttgattaggagactaaccaggtcgatgcatataatgctgataatatatgtccaccaagcgtctgggtcacaaaccttcactaggtttatcgttttaatttctttaaataaactagatcaatattaatttttctagtcatttaattcacagatcaccaattatttttgatctgttattttgtgtgcatggtcagtgtactccgccgctgttgctgatggtgacattatcttcaccgccggcagccgtcgtcaccgccgactggtgtctctgcctacacggctggcctattatgtcgccgttgttgggcgtctacgacttcaccgccggcctgcctccgttgccgccgactggtgtctccgcctacacggctggcctgtaatgccgctgttgttgggcgtctacgactccaccgtcggcctgccttcgccgccgccgaccagtgtctccgcctacacggctggcctattacgccgccgttgttgggcatccacgtcttcaccgaccggcttgccttcatcaccgctggatggtgtctccccctacacggctggcctattatgccgccattgttgggcatccacgtcttcaccgaccggcttaccttcgtcgccgccgactggtgtctccgtctgcacggctggcctattatgccgccgctgttgggcatctacgactccaccgccggct

SEQ ID NO: 22751 - DNA, 11225 bp, Oryza sativa
ctaccgttgttgggcgtccgtcgactggtgtcctcacctatacggttggctggtcacaccaccgtacatgggcatccatgtcttcaccgaccggcttgccttcatcaccgccgactggtgtctccgcctacacggctggcctattatgccgccgttgttgggcatgcacgtcttgaccgaccggcttgccatcgtcgccgccaactggtgtctccacctgcacggctggcctattatgccgccgctgttgaacatcaacgacttcaccgccggattggcttcgtcgccgccgactggtgtctccgcctacacggctggcctattatgccgccgttgttgggcgtctacgacttcaccgccggcctgcctccgttgccgcccaacggtgtctccgcctacacggctggcctgtaatgccgttgttgttgggcgtctacgacttcaccaccggcctgccttcgccgccgccgaccggtgtctccgcctacacggctgacctattacgccgccgttgttgggcatccacgtcttcaccgaccggcctgccttcgccgccgccgaccggtgtctccgcctacgcggctggcctattatgccgccgttgttgggcatcctcgtcttcaccgaccggctttccttcgtcgccgccgactggtgtttccgcctgcactgctggcctattatatgctgccgttgttgggcgtccgtcgactggtgtcctcacctatacggttggctggtcacaccaccgtacatgggcatccacgtcttcaccgactggcttgccttcatcaccgccgactagtgtctccgcctacacggctggcctattatgccgccgttgttgggcacgcacgtcttgaccgaccggcttgccatcgtcgccgccgactggtgtctccacctgcacggctggcctattatgccgccgctgttgaacatcaacaacttcaccgccggcttggcttcgtcgccgccgactggtgtctccgcctacacggctggcctattatgccgccgttgttgggcgtatacgacttcaccgccggcctgcctccgttgcagcccaacggtgtctctgcctacacggctggcctgtaatgccgttgttgttgggcgtctacgacttcaccaccggcctgccttcgccgccgccgaccggtgtctccgcctacacggctgacctattacgctgcctttgttgggcatccacgtcttcaccgaccggcctgccttcgccgccgccgaccggtgtctccgcctacacggctggcctattatgccgccgttgttgggcatccacgtcttcaccgaccggctttccttcgtcgccgccgactggtgtttccgcctgcactgctggcctattatatgctgccgttgttgggcgtccgtcgactggtgtcctcacctatacggttggctggtcacaccaccgtacatgggcatccacgtcttcaccgaccggcttgccttcgtcaccgccgactggtgtctccgcctacacggctggcctattacgccgccgttgttgggcaaccacgtcttcgccgaccggcctgccttcgccgccgccgaccggtgtctccgccttcacggctggcctattatgccgccgttgttgggcatccacgtcttcaccgaccggcgtgccttcgtcgccgccgactggtgtctccgcctacacggctggcctattacgacgccgttgttgggcaaccacgtcttcaccgaccggcctgccttcgccgccgccgccgaccggtgtctccggctacaaggctggcctattacgccgctgctgttgggcatctacgacttcaccgccggccttccttcgccgccgccgactggtgtctccgcttacacggctggcctattatgttgccgttgttgggcatccacatcttcaccgatcggcttgcatttgtcgccgccgactagtgtctccgtctacacggctggcctaatatgccgccgctgttcggcatctacgacttcaccgccggcctgccttcgccgccgccaactggtgtctccgcctacacggctggcctattatgccgccgttgcttggcatccacctcttcaccgaccggcttgccttcgtcgccgccgactggtgtctccgcctgcacggctggcctattacgccaccgctgttgggcatctacgacttcactgccggcctgccttcgccgccgttgactggtgtctccacttacacggctggtctattatgtcgccggtgttgggcatccacgtcttcaccgaccggcttgccttcgtcgccgccgtctggtgtctccgccagcacggctggcctattacgccgccgctgttgggcatctacgacttcaccgccggcttgccttcgccgctgtcgactggtgtctctgcctacacggctggcctattatggcgccgttgttgggcatccacgtcttcatcgaccggcttgccttcgtcgccgccgactggtgtttccgccagcacggctggcctattatatgctgccgttgttgggcctccgtcgactggtgtcctcacctatatggttggctggtcacaccaccgtacatgggcgtctacgtcttcaccgaccggctggccttcgccgccgccgactggtgtttccgcctgcacagctggcctattatgccgccgctgtttggcgtctacgacttcatcgccggcctgcctctgccgccactgactggtgtgttcgcctatacgtttggcggacttcgccgccgttaatgggcttcatcatctacaccactggctttgttccactggcgccgactggtgtttttgtcaccattgatggactgcttcgttcccacatcggctacttttgctgtcaccgagggaatacgacaaagctaagtcatcatttattttattctttatatgatatttttccttttcctttgcctcactacatcaactggttcgccgttgactagtgagtcgggggctatagatgttatatcatattttttaaacaattttcataatatttatcttgattgcttacaacatattctgagtacaaaagtgcctatcgagttatggagttccatcttcctatgctttccgtttggtttgccaatggatagttgtctttgggccgattcctagcacccgggggcttgttggatggacggaataacgcaaagtgctaagtattattcggaataaatcaaaagcatagagataagataatttattttctgctcttaataattgcaaaagtacccgagtagtaaactccgacccgtgaaactttgttccattaatgacgaactcatgtcactcatacgcatgtttgggaagtgcctaggccaactcccggtgcttgggggctatgactagtcgggcagagtttttaaacataaggagtcatctgctcggggaaatcaaaattgacaagaggagaaatacatatttataaacattttaaatacttgaatttttctcgagtattatatttacatcagatactactcatcctatatgtttgttctgtaggatccagatctagatatgcataaaagggattcatggctttaagcttatctcctacgctttagggatggatcagtcagaacatcaccaccggcttgctttcgccgccgccgactggtgtctccgcttgcacggtgtcacgaccggaaataactcaacgggcgttccttacgtgcgtgcattattccttgtcctaggaggcaaggtacaccaaaagttgatacaattcagagtttaacaagcggaagcgtaattaattaatttattacatgggcggcgaagacccaatacacaagaagacaaacgaaaaacagcggaagactagggtgtcgaccacatccgcttgacggcaggcacgagccagacaccaaagccttcatcatccaggggctcctcttctgggtttggcaaaaattgagaaagactgagtacaaccaccgtactcaacaagacacacccacaagtgcagaataaatgcaagggagtacaagggggttataatatagggggttagggtttgcagtaaacagcattaaaagacacttagttgctcaaagctattttgtaaacacgattgtagagctatacaatattattaatcaaggccgtgaacccacacgaacctgccttaacccaaggcctacgatgattcagaccgaactggcaacccgaccctgggtcccagctcgtcccaagccaacccaggccaaccattccacattttagttgttacgcaggttttaagaattaaaacactaacttgggtacattgctcggcttgcccataaccgagggcgcgactattcgaataaattatactctgatcagaggtgtacatctttacccacaagacacatcttcctcacgtgtaaccacgtgccacataccaccacggtatacggacgaaagacgtgacatagtttccaacccatcctagccataaacaagagtaccgacccaaccccacctacggccggaacccccgggacaggtaggcaggactgagcccctagcagcaggacaccggccctgtgccatgacatctcgactaccggccgcagctcgtgtagccttcatttgccctagagatgtccatcgacccccgacttcgtccatctctatccgtgtacttttgtttataaccagactgagccacaaactaagccttacccactagacatgtggaagtacggtagtgctttgcaacagaggcccgaagaccggtccttatatggccgaggtgctactatcaaaaccatgcaccccgagcccagcctaaaaccattttgagggttttgaatagagggggaggtgtgaatccaattccacaataatccaaccattccatagtgtccaggtgagaagagtattcccaaagtctagagttgtaaaaccaccgaatgttgcctaattaaccagcgaagcatctaccaaaaatcatactagtggtaccatgagtagagtgtccactagttggggttttgtttattctagggtgaacaaggaaataataacaataacaataataaggtcataacaaaggtaaataggcatggctagataaaacagtgataacgcgggaatttaaataaagcgataatgcaataatttaaatcaaaataattttataaactgggattcaatatgttcaaggatgatgtgacttgccttgctcgctttcccaaacgtcggcttcaacctccacgaagagcggatcttccgaagctgcagcgtctacacgaccaacggaaaagaaaaggcttttactctaataaactccatataacaagcaggaacaaagcacaaaaatgggtttttgacttcttaaggaaaaattaaagacttgaacggtccaattccgagttcaaatggccaagttatggccatttgaagtttatatgctctttaaatggatatttgcgaatttcttcatttaaattttaatttaaaaagggtttattgcgtcagccgaggggagggggcgcgcggaccgggtccacgggagtggggcccacgcggcagcctcatggtccacggtggaccgggcgcacccgggttcgcaccggccggcgccgtgggccccacgcgtcagccgcacccgagggcgcgggcggctgacggccgggccccacgcggcggccactcggtgcacccgaaggcggccactcggcgcggccggcgggaggcgccgcccgcgcccctattgtcgccggcgtcggccataggcacggcggagcggtggccgagagaggggaagggaagggggaaaagaggcggcggtccacggctcaccctaggtcgacggcgacgacgaaaaaggcggccggagcggaggaaggcggcggcgcggctcgggtcgacggggtcgacggcgttccggcggtcggcggactcggcgagggggtggacggggtcgacggcggtgcggcgaagccggaggaggcgacgtcggggcgggagacggtcccggcgagcggagaagcccggccggaggtcgtcggcgacggaggagagagagggcgacggcgcgagctcgattccggcggggagacggtgcggcaaggggcggaaacgggcgagggaggtgcggggagggtttaaatagggttggaagggggagagagcggccggaggggatggaaactgccagggtggatggaataaggactttcgtgagcttcctgaagtatcagctgtttaagttccttgtcgtccggaacgcatacacgatttccgttccatagggttccatgttcatcttctgtgaaaccagcggctttaccttgtttcatattcttgaggatcccatgcatatctggatcattcttctgaacctcgcggatttgatcgagcaaggtaggcttggcttccagcgtagccaagaatccatgaccaactatgcttaggttcagggcttccatctgttgatgaagttccggtggaatgccacggacgccaagagtgttgcaacggctttttcgactcagcgcgtctgcgaccacgttggccttaccagggtgatagtggattcccacatcataatccttgatgagctctaaccatcttctctgccgaagattcagatccgactgggtgaagatgtatttcaaactcttatgatcagtatatatttcatagcgattcccaatgagatagtgccgccagatctttagagcatgaaccacagcggctaactccaaatcatgggtagggtagttgccttcatgaggccgtagctggcgtgaggcataggctaccacatgaccttcctgcatgagcacgcaccccaatccttggcgcgaagcgtcacagtacaccatgaagtccttgcgagtatccggtaagattaaaactggcgaggaaaccagcttttccttgagagtttggaacgccttctcgcattgcgggctccacacaaatttttcttctttcttcaacaactgtgtcatgggtcgagcgattttggagaagttctcgatgaacctccggtagtatcctgccaaacccaaaaagctgcgaacctgagtaactgtcttgggttgcttcccatcagtgacggcggtcactgtttcggggtccatagcaactcctttagcagatatcacgtgccctaagaatttgacttcggacaaccagaactcacacttgctaagcttggcatacaattgatgttcccgcaactttcccaacaccagacggagatgctgttgatggtcttcctctgattgtgagtataccaggatgtcgtcgatgaagaccacaacaaacttatccaagtattccatgaacactttgttcattaagttcatgaagaaggcaggagcattagtcagaccgaacgacatcaccgtgaattcatacagcccatatcgcgtggtgaatgcggtcttcgggatatcttcttcacgaatacacaattggtgatatctggaacgaagatcgattttagaaaacacagtggcacctttaagctgatcgaacagatcatcgatctggggaagagggtacttgtttttgatagtaacttcattaagagctctgtagtcaacacacatcctctttgtcttgtccttcttttccacaaaaatcacgggagcaccctagggggaagtgctcggtcgtatgtaccccttttctttcaactcttccaactgtttcttgacttcggccagttcatttgctgccatacggttgggtcgcttgtacagaggagtggttcctggagcaagatctatccagaattcaatctctcgcttgggcggcataccgggtagttcttccggaaacacatctccgaactcactgacgatggggatttctgacagtcctatctgatgaagttctgaactgccgacagaggttgggggtgcaaagaaaacaaccagttgatctggccctcggtacagagtgacagtgcgtcttgcgcaatccactactccttggaattgagccaaccaattcatcccaatgatcacatccaaattcttggtgtctagaagaatcaaatccgagggaaaaggaattccctggatttctataggaatggtagggctataatactttgctgtcataacccctctaggggtggtgatgagcagagggttcctaagcctttctacccccaactgatttctccccacgaatggcacagacataaacgagtgggaagctccagagtcgaacaaaatggtagcagggatggaatgaatgaggaacgtaccaacaatgacgtctggagttgtcagcacatcctcggcagtcacgtggttcacacgatcccgaatgacatccttaccaccgttgttggggcggggaggcgcttggccttacgagcgcctcggctttgggcatttatccgcaaagtgcccgggctcgaagcagttgaagcacagacgctgctgaccttgaatgtctctgcggccttgaccaggctgcacaacgggcgcaggaggacggggcgcatgggtcccttgctgactctgctgttgctgcggctgtgggacgcgcaccacgaattgaggtcggggcgcggagcgtgggtgctgctgctgctgctgctgcgaggaggatccccctggatagggattggtgtagcggaccctttggttagcaacctgttgattgtggaaattcgccaagcgatgcttgtgcgactccagttccttgtgcttggcttccaagcagatgctcttgtccaccagatgttggaaatccggatagtccccggagtccagacgcacggacaggtcagggtccattcctgccaagaacttctcttgcttctcctcatcttcacgaacatcctctggggcgtaccgggccaggttgttaaactcatgcaaatactccatcacagagcggttgccttgcttcaactctcggaattcccttttcttaagggccatgactccggcgggcacatgggtcctccggaaagccgcggtgaagcgggcccaagtaataggctgtccttctggctgcgtagcctggaagtggtccaccctagagatgcgggccctgcagttggtgagcggcaaagatgactttctcctcatcattgcactgcacggtatccaactttttccccacggcatgcaaccaatccaacgcatcaacggggttattggaactagagaaggtaggcggacagatgcggaggaactcggcgagtttagagtgttgtgggggtggtggtggaggtggagcattatgctgtggcggattttggatgtgatggaggaaagcagccatcatgttggcctgctgggcgaggatttgggtgaggatggagttggtgtctggtggtggtggtggaggtgggggaggaggtggaggtgggctgccttggatgttggggttgctaccttcgggttggttgtcatcaccggtagcagcacttctcctggttgtcaccatctgaaatatcccatacagaaccagccaagagagagaacagactattaaagctaatcacccacgactaccaaaattattgaacttattactgatataaaatgggttcattaaggttcaagttgcttaagccaataaaataaagacaggctccgacacagttataccgcacaccggtataaccatgccccacacgactctagcagaaaaacaaacgagaagaacacacgcgcaagcctactaactgctcgtctacttctgcgacgggccagggcggaaggtgagcagtagcgcatcctccatgctgccaacgccagaggctccctcctcctgaggaaccacgggcgcgggctcggcacgaggggtctcgacaaaacaggtccatgccaaggactgacgaacaagctcaggcctggaggtactcttgcgggcggtgatcttcaggctgcggtagacgcggcggcgcttggggcgacagacctctccctgggcgatcttgagctgacacagctgcgcctccactacgtctaggtccttcttcagctgcagattctcctgacgcagctccaggatcttcatgttgttctcgaccaacccgcggcgcaccatctggtggaagtcgatacgggccgcgtcatacgtgtccaccatgcgcgccaggtgcatgatggtagcgtcatcctccgagctagcatccctgaaggtggcgtagtcgtgggctcctccgcgacgagggtggtagcggtagggcgagtgctgcaactcgtccgggtagcgctggtgaagagtgccgatggcgaggggtgcggcgttctggcaagcggcggagaaagaatctccacccgcggtgactgccaacgaggtcctctcgggtgagccagtgaggatcactacagtgacctcccaagcagcgtggggctctgcatcgtcaccctcttgctccgggagttgcttgccctggtagtccactccatgcggataccccaagacaacgcacatgccccgcagtcaggtccagaccacgacggttgatgctgccggccatctacaaacaaaaacaaaagagaaaagcaacattttaaaggttagattttgacgataaatgaagcagcaggacagagagagactagaggattttcacaaataagaaacgatttttattttgaaaatattgctaaggcttgggatctaaggctcgtcctagggtcaaggggctctgataccaacttgtcacgaccggaaataacccaacgggcgttccttacgtgcgtgcattattccttgtcctaggaggcaaggtacaccaaaagttgatacaattcagagtttaacaagtggaagcgtaattaattaatttattacataggcggcgaagacccagcacacaagaagacaaacgaaaaacagcggaagactagggcgacgaccacaggcacttgacggcaggcacgagctagacaccaaagccttcatcatctaggggcttctcttctgggtttggaaaaattgagcaagactgagtacaaccaccgtactcaacaagacacacccacaagtgcagaataaatgcaagggagtacaagggggttataatatagggggttagggtttgcagtaaacagcattaaaagacacttagttgctcaaaactattttgtaaatacgattctagagctatacaatattattaattaaggccgtgaacccacacgaacctgccttaacccaaggcctacgatgatttagaccgaactggcaacccgactctgggtcccagctca

SEQ ID NO: 22752 - DNA, 2853 bp, Oryza sativa
acggcggtgcggcgaagccggaggaggcgacgtcggggcgggagacggtcccggcgagcggagaagcccggccgaaggtcgtcggcgacggaggagagagagggcgacggcgcgagctcgattccggcgggaagacggtgcggcaaggggcggaaacgggcgagggaggcgcggggagggtttaaatagggttggaagggggagagagcggccggaggggaaggaaaccggcacgggaggtccggccgccatcaatggcgccggcgagatttgcgggggcaaatccgcccgtttgaacgcgagagagagagggaaaaatggggggaaagggagaggggatcacggggagtgattccccccactttattgcacgcgtggacggcgggaggcggcgggattcgcggcggcggcggcgctagggcgcgggggaggcggcgggagcggcggaaggaaggggatgacgggtgggccccacccgtcagcgaggttggcgggcgggcccgtccgtcagcggcgcgcgcgcggggagagaggccgaatgggccgcggggagaggagagagagagggggggaaggagagatgggccgggccagcccaagggagggaagggggacttttagggtttttctttttataaaatcattttaactttgtttatttcttaataattattatttgtgctctgaaaattccactaaaatttatttacgcattttaggcttttaggaaatttacaaaaatcctctaagccttatttggcttttaactttgcacattttaattgttggaggctttcacatggattttaattattctaggcatcatttaagggatatattttagagtcgttttgggacgtgacacacggctggcctattatgccaccgttgttaggcgtctacgtcttcaccgtcggctgccttcgccgccgccgactggtatctccgcctgcacggctggcctattatgccgccgttgttttgggcgtctacgtcttcaccgtcggctgccttcgccgccgccaactggtatctccacctgcacggctggcctattatgccgccgttgtttggcgtctacgtcttcaccgccggctcaccttggccgccgtcaactggtgtctccgcctgcacggctggtttattatgtcaccgttgtaggacgtctacatcttcatcgaccggccgcctcgtatgacgccaactggtgctatcgtcttcccggctggccacgtcaccgccaccgcaaataggcgtcatcaccatcaacgcaagctgtctacgtctgctaccgattggtttcttcacttccatggctgcatgattctgccagtgttgattggccttatcgtctttaccaccggtcatctcgtctgctgttgactagcatcctcgcctctacgtctggtttatacagctaccactactaatggacatcatcgtcttccgtcgccgacaggttatgccgccgccaactggttcttttatcttcacaactgcgcgtcttcactaccggtttgcttctgttgctgccgactcgtgttcacttcatcacggctatgcaattttgtcaccatggtggagcaacttcatttttattatcttcggcatcggcaaactctattgcctctacttcaccaaccatgacgactacaagagtttcgacaccttggcatacgtcaccaaatatgatgccgtgttattttattacaacaagtggtgttccaatcttcaatatttatcttcactcaagcaatgactactcgacaacaagaagttacagttctcaactctatgttcagttgtttcccaactaaccaaagagtcgggggctacacaaatacatggctcaaaattcgataggttttatgtcaagatgaagcaatcaacaaatcagccaatgagttctatggaacctacttcgggagtcatcagtttcatcttcgcttcagagcagacgttctacttcagcaactcttattatttcaccggcaatttttggtttctccacgccgctacaatctactccaaatttctcaattatcaagtttaagatttaatctacatgtttgggagtttagaattatcaaccaatcagctcagtttcgacgagttcgacaacaacatctacattcttacaagtggagcatctgcaacagctataacaccaagttctactaacatctttataaatcaaggagctttgcatcaatcttcgttatacacacgctaacgtcaaggaaattattcgagcttcgatatcttctcaatagtttgatggattattgtcattgacttcatcaccagcacctctacctcatcggccctgacatctctgccgttgctaatggatgattacgtcttctcctccggttgcttccgtcattgctgacttgttatttcgccctcacggttgacctactttgcaaacgctgatgagcgtcttcgtcattatcatcagttgctacactgctattgactggatcaccgacatcgtcatcttcatcaatatcctgtcaagcctcttcaacatagccctattctactgctgtttgatggctgcctcgtctgtcaccgactgattatttcgctgccatggctacacaactttatcgctgggcgccttcatcttcattgctggctgacctgactgctgccgaccggtttcttcgcctccacagttgtgcaacttcatcacttttgattggtatcactatcttcactaccatcaatatttttgccacttctggtgggcaatattatatctatattggtcatcctgtctctatgccaactacgtcagctactatcaatggaccattgtaactacgacagaaggacaagctatatgat

SEQ ID NO: 22753 - DNA, 4396 bp, Oryza sativa
agtagagcatttttttgtctaggcttgtagggtcagtatctaacaccgtgctctctcattgattattcatttggagaagggggaatccttctcattgataaatcaacctttctgtataatgtttcaacacttggtgcatttgtgttcaatcaatgtgcacgtatgtatatactgtaatccaatgacatgtgatatcagatgtgactaggttaggtagtggtagggcactaggtgcgtggaaatgggatatgtgaaacaatgttgcatgatgttttgttgaaatgttgtattagtttatgttgttgtaacctcaacagtccttttatttcttcaatgagtagaatttttttgtgaaatttggccacacttccagtggagatttcccttgcaaggtgcagatagcagtttgagtaactatttgtagctgaaataataccatcaatgattcatgtggtggaaccttgaggtcatttgagactgatatagaggctgttcagattgtagccaaaataaaccttaccaaattttggtaaattgacaatattgtcaagttggcaggattccttatgcatttactaaagtttgataaaaaaaactttatttagcaattttaccaaaaaatggtatggtttaaaatgttattaatctgaacaaccccatagtttacaattcagatgattcagttcttcaattgcagttgcttcagcgtagaaatactttaaatgtgttgctcctgtcaacaacctgagctgataatcagaatccttttattcttcactgggctatgtgtgtgacgcttcaggaaatattcctcggcatagacacagatctgataagcaaaataggttaagaggttatacatttcataaggctatgcattgcattctgttgctagtttaaaaggcaggcagtgaatacatgttcagatacatacttgaccagtagattttgtgctgataaactgtgcaactctaggccagtcctgaccaaatctgcagagccccagaaacatgattgaataaacgtttttttcaccaatactaaagtacttccatagaatgcgatgcaatctgaatatacaaatttgcagtgatctgctagtcagaaagctgaaatctggagattaataggacaatccaggtgatctacattgggtgtgtctagttcagctatctgctagtcacaaacctcaagttttctgaatattagcaaagatttgtgcgaacatttgtttttcataccttccaattgcgatcctgaaattgacacgctctctgatgctccagccttcttgaggaggccgtgcagcggcggtgtacaatggtggcatcctgcgtttttgctggctattcttcttgctccgcaatggcggtaaacggcgtttccccattgtttccctttatcctctcattcagaccaatctcgcattttgagtgcctaaaacatcaaagcaaatatataatgccttgtgctgaaaaacaagggatgtatgaggagtatcgtacaaatggtaagatgaagaagaaaaaagaagttcagtaaaagttggctgatcttttgcatgctggttatgtactaagtaaaaacacactagtgcttgtggaatatttttttccagtttaattcgtattgccttgttagtacatatgtctgataaataaggtactgttttcatcctcctagtatgtactgtcagttcagtcatgtttaggggatggtatggaaggggaaaacagtgtgataattgcaaacgcctctctcttcttcgagtctttttttttttgtcatacttggctccattctcttcttaatataatgatggatagctctccagcgtgttcggaaaaaaaaaaacaactacgaacacctcatttcaggaatttgggtccccctccctcaaataggatactatttcgcccaaaattttcaaaaaactattttaaatttggtaaaatgtttttcacgtttttaattattccggacattctaaaccacgtttaaaattttttgacagttttttttgtgatttccttaatatagaatagaaccctgctcatatagtttatgaccagtcaatttcgtgcctgttttttttttttttgttaatttcatgctaggtagcataaagactctgacatactttttttttatcaccataggtctgtattagctcatcaaatcaaaggctaatccaccccttgtcacaagaacattctgtagcaaaacaaccggagcacctagattcgttttacaagttgcagttctttaccggcatcgcttactttgttaatgtaaattaatgatctcactgttcatactattaccttattactctgattaatactcgcaataataataaaacaacactatacaaatacgaacacatctaaaaagcttttggagaaccgcacaataatcttccggctagctccacaaaatgatgggctagacaaattatatcactccctactattcgcattttcttaataaagcttcttgcgcgataagttgatggcatgaaccaccctgtgcaaagacgcaaatacccctggacctattggctacacacaccgcatccgtgtccaaatgtccatgggcataacagtcattttcccctcctcctccacgaacatcgtcttcttcccctctcgcaagctaaagctgtgccgttctcttccagaagcttccgccgccgccgccaaccgagccgctccgatcctccccccctcgactcggccgcgggcgtacgtagagggggaccgaccagatggtggcggcgtcgcgcctcctcgcgcgggcgtcgaggcaatgcgtcgccgcggtggcggcgtcggccgcgaggcggcggcggtgcccggcggcggcgctgtcgctgcccgtggtgaccgcggcgaaggcggcggctgcggagccgtggctcggggtgagaatccttctatgcttcctctcgtggtgcttgttgtgaagttttaatgtgctcttcttcgccacctctgcgcacgccgagatgtcacaagggggattgggagggttttaggatgtgccgtttcaggtggcttgcgctgtggaaaatttgtctatagatgtttttgtggagggttttagagttctattcgtattattttataatggtgatggagaaatttgaagagaatccgcccttaagtcgcaggggtggcagattattatgttcagtaaactagtaattgtcagaaattatagtttaatggagatcaagtatttgtttgtatgaatagtttgcttctgtaacatgatcgataatacatcgtaggaatgactacgccatactcaattttatttcataagtgtatctttgttgcaatgctgcaccagctctgatacaagcaggagtgggaagttggacgatacctcattttttttagtaattacgattattattcaagaagaagacttgagtgtattttatatactatgaatggttggtacaccattgtatcatagccattcagttaacatacacttccactatgcaacactgagtccactaaatattttggggattcaacctgaacttactactcatgcttgcatatatgtaaacacaaataccggcgcatctttgaggactcctcatcactaacttcagcagtcattgccatgataaaagaataaatagttagttggaagcaggtggatagccatcagcaactggatcaacttgttctggatgtatcactttcttgaatcacacctgcacctttgtatttttatgctcttgtagcaaagaattagcagagctcatgctttttatttttaaaaataaagttactttctcatcgtttattttgtgaggttccctgcccccaacccacacacaatataacttgaacggtgtcagttataactggaagacattgtcatatcctttatattcttaatttggttacgtacttttttgacaagcaggtcccatatatgttgaatcagcccttgagatactcaaccaccatttttcaacgttttggattttcatccacttccccggaactaagtgataaggaggaaaaccaacgcaaggaccaggagaattccacaaatgtgtcaaatgaaggtagttcatgttcaattgagaaaacatgacaagataggttcacagaactccatgtcccatggcataagcctataagaagtgaggttctaaatgaactgcatttcctgattcaggcactgaagacgttgatttgtcaaaggaggatctggtgcagctagttcttgagaaggatggattgttgaagtcaaaagatgaagaaatcaatgatatgaaggacaaggttttgcgaagttatgcagaaatggaaaatgtcatagctaggacaaagcgtgaatctgagaactcaaaaaagtatgctgtgca

SEQ ID NO: 22754 - DNA, 23822 bp, Oryza sativa
  unsure (1)..(23822): unsure at all n locations
tttgcaagtgatgctgcagcaaagtgtttttttttaacttgtatatgcaagtgcgtatttgtatttcgacgtcatgtcagctacagcagagcatgcttgcttaaacggaacatttattacaacctactccctccctctaataaaaaaacttcttactacgaacttatgtctatgtccagattcataatcagaagttgattttttttttatgagacggagggagtattgtgataattataagttttcacatgagattcatgttctccaaacatgctctggccaagcaaaccatctttcagaacataactagatgcacaactctattatacaaaaaaatggaaaaaatgcagctcataaaaaggaaacatggaaaagccaaatgcaatcaccaaaggcaaaccattactaatactagcaggctagcaagataacacttgtgcaaaggctgctatttgcaccaggttacaaaccctatttccaatctgacaagttcatgcattaacacttggtgtaataacatgttgctacatcatcagctcatggaagggggcatattggcataagatgctaataagactacaactggctaatgcattgttctggactacaatacacaattgctaatgcctaacacaagctaagagctaggagatagatgctaataagattacatgagtggcctcgcatgaccacgtacgttctcatcatcaaaggactgggcggttaaaaggcttttctcttcagtctgttgtctgagcgttggttacttccactgtcacgttgctcttctgcgctcagatcagcatcgctgtcgtcatctggatcttccaacccaaggttcaaattcagctcggtgctgccgctcttcttggtagaattttgtgccacgcctgaagcctgaaagaggatacataaatatatgagttgcatggcttttcagaaagaaaatttacatggaaaatttgaaaaattctttgacatagcaggggtaaactgatagtccctgaaaacaaaggaattaaaagaacatgagaaactgaatatactgttgagtgggaggggaataatgttcagaagcatatattgatttaattggtcacaacagatcctgtattagttatttcaacactaaggagaagaggcgaccactgaccacataacatatgtaagtgtaactattatatacaaatagttggatagttacagctcaggaatcaggatgggattacatgaaattgttccgcgataagaaattattaaaatttagagactattcaattatatgaacagaagagggagcacttctgttgtacggtttgctgagatggcatccagtcaggaatggtctgtggctctgtgctgcctacatggacaaatttagccacagtgattcaattataaaatcccataactaataggcccagcatgtcagcttccaacattttcctcttgctcccatttcctttcctctatcctccctttgtttctatgctttagcagaggaattggatagagtggggaataaacagacagtttttctctttgcctgaatctatattttccactcttaaaccattttcgtgggcttcaaggatgcttattttattagatctaatttggctagtttcagcttttgcttcctacagtagtaccgatgctgctcctctgtttaggcaatccgttcagctcatacatgttgccatcgaagatatgataggatgatgtaccaggaaaccaaatcttccataaaatactggtaggtccatggtcacgagctcaaggccgcagcaactcctgctgggattgcttctcactctgttcctggatgggaaggcagaggggaaaattttgacctggtaggagatctgtacgcagcaatggatgatgagattttctggagggagacgggaggaagagggagatatcctaatgataactgagggtgtgttgaggtttaggaactagactgaaacaatagctgaaggggataaatagatttatctactccttagtagcaggcactttttttccatgtacacaaatatctgatattccaaatttgagtgctctagtagctctgatctagatgtaacatgaacagaaacatcattggcaaccaactaaggaaagacaaataaaactaagccctattgaataaatgagtgctttcataattatatcatattacagatcagagtagaacgcatgaactaggcatccagccagtagccccgcgactaagataatgggatggtattcatgctaatatcagcccaatgaagcaatgattatattcagagatgtcatgaaccttttacattcctaactacatggccaagattagacccctgaggattcagaccatgaaattgcatagccaactatcactaaattaaactagcactagccccaaggaaaggaagaggaagaaacccctagaagattataagaaaagaattacaccactataaaccctagtaaaacccaagttgatgaccaaaccctagctgcctagcacattaaccaacagattttcataagaccagcttctcgaatctaattgcgcagattaagtgtaaaatgttcatccaatcacaaactggaattatccctccccaccctagtttttttttaaccaaaatcgaaatcctaagaaatggagaaaacctaaatgccaagcaaatcggacccaaacacaaacaatgcagcgagccaatctacggagccaagaagaagcctcaccggaacgaagcgccgcctggtggccgccaccgctgccgactcgtcgccgtcgccgctgccaccgccacccccggccgcgccgccgttcaccggcgcccacctgaacagcaccaccttgttccccctggagacacccatggggcccatcatcccggcgtaccccgccccgccggcggcgatggggacccaggccttgcgccacttcctgacgggcccgctgaaggaggaggcggtgttcccgacggggccgtaccgcgtcgacgagcggctcaggcgggcgcccacggtgtccatcggcctgccggacgggaagctcgccgcagcgacggcggcggcgacgtcggcgatggcggcggcgaggcgggtgaagtggaggcggcggtgcgggaaatgactcggagggaggagatgagaagaggattttttttttcgccgagagaatgacaagtggggcccacaagaacaaaaaggagagatccgcactacacgagatggaacgcgagcacaaatgaggaattataatatctttaatttaattaaataaaataaaaatgcagacaggagtataacccattgacaaatttgaattatatatcttaatttatatttattttaaaaatttcacagttttgcaccagaaaacaaaactatatacaatctctttttttcgcttaatcatgtatcatgcatacaagccgtggagcaaaacagtttaaactacaactctactttatttgaggatctagagatttaagaattgttaaattctagaagctaagaacatagatgctagaaactctcgcaaaaagatcttactagattatttcaagtaaccttaactgggtattttttttctaagaaagcacgatcatgcgaaaacctagcctgttcaaggccaacaatgatgatactttagggtgccacgacactctttggtgatgttgttgtgaaaacatttctctttgatggaatctttaggtgaaaatcacatcctggctttccaggatgagcagtggcaaagccagaatgaaaattactaagggccattatgctcatctgactcataaagcaacattctcagatgtccaatttaacttggttgggatgttccacatggtatatatactgtcacgtccggaaattcactagtaatttccaaacttatttgtgcataaaaccctcgtccaggaatcagccgaggtacacaaactgacaatttaatatacaaatctatcataataataacgttacatacttacaaaagaaaagaaaacagcagcggaattaacggtctagcgatggcttcagctccactcccacaggcagctcaactggggtataagccaaacgtcttctccttctggatcctttttcttcaactgagatttgattgattattgcaagaatgagcatatgacatactcaacaagccacacagcaaatatgcaagtgcacaagtataccaaaggatggcataatatagggttcattcgcgaaagcagcatttagcaaagagttgagaatttgtaaaatagtaaagtaattaatcatcaatattaatcaacactgaacagcacacccaggctgcataggcccaaccaaacctgaacaaccaaccccggtcatacagatcaaacctccaaaccaggaattatccattccaaaccaggagtcaaattaattatcacattattaccattaatgagtagtgtgagactaatcacgaaaaacattgttatacccgcccataaccgcgggcacggctattcgaatagttttactctggccagagatgtaccactgtacccacaagacacagcctcaacatcatgtctaccatgcgtcgcgataccggaaagtacccgaatagaggctgtgacaataccccctgcacaacacaactcaccacagtgcaccattcctggatcataatctataaatataactagaggcatagactccccaacgacccccacggacttctcgccgcttctcagtctggtgccccgtaatgaatcatgctatacaaaaggtaaagccgttgcctacgctggcttgtggttggcacagttaatgtttcacaacagtagctcgcgaaccggtccttaattgccatgagcacgaccttcaaaaccatgtgctcacaacccaccttaaacaggttttaattctcaattaattaacattacacgattaaccatcgtgagctaccattaaatataaccataattaataatgtaagatgatttatgatttatcccattaattagctaatgtttctaagcatggctaagcaattatatatatatatatatatatatcatttagctgaaccaaaccaatatataaggttctagctaatcaaattataacccatagaaaaataaagtcatcttcggccattaattaatttgggaaagtctcaaccacccgatgacattcgaaaataatgcataagttgaaataaaacattagctttaaataggttcaacatgctcaaagggttgtttgggatctgtgtgacttgccttgaacttccgcaaacacttccgaaccttcctcaacgaaaacgctctcctccggaacatcggaaaactaaagcaaatgaacaaaatcaacaaaacagttaaaaaaaaagcataaacagtacatgtggatatttttaacatgtagatattgattttagaaaaatttagcaacttgaaccactcgaatccgagttacgatgatttagttatgaatttccgaagtttaatcgattttcatctaaaaagaaaaccgagaaaaaagggaatatgacgtcatgatgacatcatcaacgtcggctcgacataggcgacgacctcgccggcgctaggagactcggccggacttttggagggcacctacgcgtagaggacgacgacgcgatctcaacgatactcaccaacgcgacgaacgacggatgacggccggcggcgagcttgtgcggcggcggcggttcggtctacggcggcgacgggtctccggcgaccagcgacagcggggagagggcggccgaggttcctcacctccgtgcgcacctaacggcggcgaggggaagcggcggcgacgacggaatcgacggcgcggcgcggctgggcgtcggccggcgacggcggcggcttgctcggcgtggcggcggcgctacggagcacgagagaactcgggagatgggacaaacgaaagagggcgactagggggtcctttttatagccttggattagagagatcggactccaaacgagaggatttgagccggaaaatccgagggttagttggagagataaactcgaaaacgaattcgattccgcgttgatttcttcgggataaagtccgattgttgggggaaaggatagaggaggataaaggaaatatttcccctcaactaattttaggaaaacacaagagaaaaggtcggatttggaggggaaaaaccgagcccactcggtctcagttcggctgctagaggtagaagatgaacagtgtcgagggaggcaaattagactttttaggttggctgagaacagaacagagcaacttgacttgggccggcttgggctgcacagcacgcgcgcgagggagagagatgttgggctgaaatcagcccaacggcttaggagaagatttaaaaaccttttccaattaaaataatcactgaaatgatctttgaattgttaaaaatacttccaatgctcaaataatttcaagaaaagtcctgaaaatacttggacactcaaagtacttaaaaaaattataatcataccatttaatgattaatttaatatgcggataattactgaaatgttctttatatgattaaaattaggaattgagctccgaaaaatccgagaaaattccagagagtataattaaccatggagaatttaataaaaattaaatccatccatgctttatatttagaaaattttattttccacatttaacttcacttgtaaattaatgaacatttaatataaattctaataataatttattaaataatttataaatcctaaaacgaaaattaggatgtgacaaatacatagcttatatctgtaaagaaattttttaccggtgtccaaggacccttgttggccttaataggtatgcccctgaggatgggtgacagcagcgttctcgacgtcttaaccttcatggaggagccgtttgaagatctgttcaattttagcctttccttaagaactttgtcctcttccggcggtgccctgatataacaagttgaccacgttgatggaccgatcagagaaaagtgattctatcttttttcttaaccgttccctctacagccaacccaaagacatccatggagttttggttttttgggggccttgttcccgtttgcttctcagcaattggttttaggcatgtgacatgactacttttttttttctgacttagtctcccaaggctattaaaaatattattcaaaaaatttgcccatagatcatcacatagcccttgtaaaaagaagaagaagagcccttattgtcacagtagatggcattttgacaatctacgattcgcaactaccattccatttgaacgctgagcttttataagtagctactctatccgtttcatatttttttataagcagcttagcttacacagataaaggaacaaacagaaacacaagaaccattctaccatcacatactggcatttcctagcaggaatggatatgcattcttcggacagtttgtacaaatgccaactacaaaacttcctgcatttgcattctgacaacaataaatactcaggcacagcatttgcatatcattctccagcacaggatttcctagggggcaaacgggctagcaacaaaattttacatcatggaccaacgcacacccatggaatcaaaggagtggcctcatctacaccactcccttcacaggggcattttctcaagctcaaatgtgagccactctcttggcttacaaatgataggactggggacataaaatcaatttatacatctcgaaagcactcctggcttaagagtcttgtaaagcatgagctcagctcatctcagaaaatgggagctcgcaagacttaatccgccggtgcttgtttgcaggatacgctgtacccactgctgaatctgcggcctcacagaaagtaatctggcgctggcctctttgcaggaacacctcttgattcctgaatgcacatatgggcaaatttagatgctaatcaataatgtgttcaagaggtaatgataaaggtcgttaacacatacatgtggggcagcttcaaatacacggaactgcttattcaaattctcatcaagctctaggattgcagcaacattgccacacctgacaatttcaaagggttaagaacactgtgaggggattaaaatacaagaatcacagatctgcaaaagcatagcccacacaaaggttatttttagcaacccaaacataataatatacaaaaagatcagaacagtagaaaccataaatagctttgttcgagatattaatagaacaatagaccatcttatgttatcgatctttttattttttcacacaatcagtatacccccatctgatcctcattgcctgcaagccaatccattcccaacccattttgggtagtactagtgatcaaaacaaacatggaccatctgatcattgtcaacagataaaatatacaggattgatcacttcaaaaataattataatgttagctgaataataaggtacctgtagcagtagttaggagcagaccatacagtgacaatcttgttattgaacatccacttaaacccttccatgactagttgatgagcacggcaaatatagtctatgttgtttgtgtggttaaaagaagaaacaacatttccaccaaataggaatcctgcacctcgtggacttaatccccaaccatctacagcatcctctggatcagaccaaagaaggtcacacatggccccatcatgaggtacttcttgcttgcgatctattactcttatctgttggagggtacatgatatgtcaataacagaaatagaatgcataaattaaaaataaaaatggagaataacttgcctgatcaagagttgtaatattaggagaaaggcctccatggacactaaatattttgttctcaatgagtgcagacaaactgaagggagaaataagctgcaatcagtttttgtatattttaaactaaagaagcaaaattcttaattcataacaaaaaaagtaagaaagttgccttaaatagtcgaatatatctgtgcaatatctccagacattcactgagccgtatttacgaagacactcatcatagaaaccatagacctgcagagaatgcataagctcaatgacaagatattttttttcataacattagtgtagtatgagcttaaaaggattccttacttgtgtaatctgtctgctctcatggtttcctcgtattaaagttatacgatctgggtatctaacctgtatgcatatttaccacagcagttaggatgggtaactaaataacatgaacttgaaacttcaaacagaacaactgtttaggatatcaattgtttatgttagtttttcatccttccagggttttctagcaaatcaggttagttctagatacattcttttttattttcttgttgatgactgaattatagtttcatttatatcacttatttttttagctttttcatgaatagaaatggctagtgggtggctgagtttgtagttaacatttaacaaccttacagttatacattcaatacataaatcaggtgcaaatgacattactaaaatattcgccccaattcaagctaggcattattgcaaataatagtcaacatatactctgcaaatctattctagcaaaagaagttatctataattagagatattataattaactcatgttattccacaatatagaggtttcatggaatcagcataaatttgtatgttacgatttcaatctggccatcagccattgttccaaaaacaggtttctacttaactaggtcatatacccagctatacatgaggagcattgtgaccattttccttaatttatctgtataaacactaaaagcatggtaattgcatgtgtactccttacaatttctttggagaatagcatcaacatatattgcaagatacaaacaagtagatacaccaaaaattcttaaaagtgtcaacagcatacctttaaggccaacagaagcaaaaatgtttcaacagaataaaatcctcgatcaacaaaatccccaaggaacaagtagtttgtctttgggcagtcacccccaactttgaatagttctttcatgtcatagaattgtccatgaatatctccacatatctgagtgcagcagaaaaatattacttagcgcaataacattttttctgaacttatggagaaataactaatgaaatatccagtagtaagatatttgctgtatcatacccccattaacactaggataatgacccaggaagaatgttccaattacatgatgcaagtatgctttgcaactaagcttggcattaactggttattttgggttattaggttgtgttcagtcaataaaattctaccatgaggttgggagactggattaccctacctatgtgggactgatatgctattgtgcaagtccaaaactcctctattttacaatataaatcatttcaggactctagctttgtttgataataaaagttgcttttacattaatttaccatccttccatccaatacatatcatttaaccgcaattcgtgcctaatcaatgctttcttgtgcgccaatacaacaaaaataagattagatcatgtttcatataatgcttttgcaaagagctagaatgatttaacttatgaaatcaagtagaaaaatggcagctgtatctaatcttcagaatattaagttaattcagtttgacactatttcaagagaaagaacgactgccaggctatggagcttgtcttttggaaaaatgatggagcccactgtagctttatcccagctttacaagaattccaagagaaatgtgtttacaagaattaatggaagctgtagctttaagttaaccaagtagaaaatggcagctgtatcaacataattttcagaataaaatacaaccagacagagaaagtcattacaaaaagacagcgtaaaaataacaacactactctagctttattctgcaagcaaatgctgctgcaaacaaaattgtagattcaagatttcaagttagtggaacaatctatctatatacttatcatctgcatataaactcacgcagctgtgcagtgtttaatggttggaatgttggataaacacatgtatgctggagtgaatagttgttgcatgtattcactgaaccaagttaccagttcctcatagaaataagtctccaattcctaaatttaactccaggaattgggtctgaagtggagttgtggagctgcccaaacccagctccacctctctagttcattttatgagagagcttcacccagctccactcccattttaggtagagctgaaactgtttggctgggctctagctccaagagaggtggagctggagctggagctgtgccaaacaggccctaaatcttccaaacaatgcagatacaatcaggtcggctgcaattctaaaagaagttgatttcaaggatttaatcgagtagaagttacagcctttcatgttccaataattgctgtcagatcaaacaattaggtaaacaaataaatacaacaaactaagttactaaaacatgcaagaatccaaatcgcaaaatgtggaaaaatcctcagcacttgagatctctagggtacttacacacttccatgaaccatttcaaatcatggaaagtgtgaccaattcaactagtacaccagcaatcaagcacaaaaatgcactaaatacccaaaccaccacattgctgcacacacaataccagcaattttcaccaaagccctggaactgaacaggaaaaaagaatatagatatgcctcccaataaatcgggacattacataagcataaccatcgagctaagcatacacattacagcagcattctccccaacgacgcagcaagaaagtctaacattttcctcgcaaaaccacaatcctaaggacgatgatacaagcatatccagtggatacaggcaaaccctagaaccgtaatccaagcacgagctcatcacaatcacaggggagttacgcccacaaatccagctaccgaaaccagtagaatcgaattcttcttactcctcatcagcaaagctcatcgtaatcgcccaaaaatcgtcagaagcgaatcgaacgaaactgagatggaaggggaagggtgggggaaggggggcggtcaccgtgacgggggcgtcgacgcgctggacgttgctctcctcgacgaggatctccatggccttgaggcagagcgccttgacctccgcctccgtcagcggctcgcaccgcttcagctgctcgatctgccggtccagatccgacgtccccatcctcccacccacccacctcttcccccctccccgagagcttccagaaggttccggagggcggggtggcgcgcacctggagcttccacgccgccttggccgccgcttctggaaggttctagggcgcggaggcggaggaagggaggaggcgggaggtgcgcgcgtgcggggaggggcgggtcgggtgggggacaagggtttcgggcgcggtaaggttaccaccattctgcccctttttttcttttttggggttagctttttttttttctggcccaagctagaggcggtgagcttaccagaatgctgctggttgcttactaatagtatgggagtttcacttaaaatggaagcggagctgggtgaagctctcttgcaaaatgaactagagaggtagagctaggtttagacagcttcacaacttcactctagactcaacccttataagtaagagtctatttggttctctatcctaccaattcaattgtagtgccaaaatataggcaaattttagtactaccaattttttgatagggtagagttcatataatatgtgtttggtttgctaccatttgctaccaatatgctttttatagtgaagaaaattctagagtgctaccaaatcaagtatgggcattgccaatgctttggctctaatccaaaccaatcaaactactatttgaattgccaaacaattggtatcaaaaatggccctaaatttaggagttggaggtctactaaacaaggcctatatagttgtattttcttgtgttgggagcaacttattagcacatgattaattaagtatcagtttattttttttaaaaaagattaatatgatttttaaagcaactttcttatagaattttttttgcaaataacgcaccgtttaaccgtttataaaacatgtctgtggaaaacaaggaaagttagttgggaaaggaagggaagaacacagccatacctcaaagttctcaaactcatctctctcgttttccacgcgcacgtttcacaaactattaaacgatacgtgttttttttggcaaaacatttctatacaaaaattgctattaaaaaatcatattaacatatttttaattattttagctaatatttaattaattatgcgttaattcgttaattcgtcgttcagttttgcatgtgaagggacccctccaaattaacacaaccataggatagatggagtcgtcgcagcattattcttttcttctcatatgaaagttgaaatatagcaggagaaaaggagatgtaggaatagcatatgagggctagtttgtttttttttttacctagcattctctccttgtgttttgtgaaccatatataatatcctaaatcaaacattttaatctgttcaccatttttcatcaccacctaccatattgctgtatatattgttaaaaaaaatctgaataatttctaaaaaataatgtcgactctgacaaaaacagttgtgccgaagagtaaaaacagatgctctcaaagagtataacatgtaggattattttcgtccgtttcaaattagtcacctttgtaggtttgtcataactcgaacttgttaaattatatgagtttataaaattgatggtaacagattaaaatgtttgatttaggatattatagatcgagtgaaaccaggggagcagcataagtcctacgaactgttctatagactttaaattatatagagcttatgcattttctttattttgattatcatgtttcaccttgatttgagatattttagaattaggtaagtggttttgaaatgcatgcgctgcttttttaataaaaaatggatgaaatagattgaggcctcctttggattgcagaattttcgtaggatttttgggaatactgttcaaaagatgttctttaccaaattttaccacaggacacaatatggtccttgctgaaggacatcataagaatatgaattttctcagggacactcaaaaaaagtgataatttactataggacaccatgagcattaaaatataatatttactcatttgaggagagagaaaccacgtaaattgtctattttaccctctattccttcttcccaacctctacactcttcttcatcgccatacaccgcccgcgcacggggagggcatccctaccgtcgctaccattccgtcccggatggcagcgaccccgccgtcgcatgaccgcagtgctagagctccaacgcggccgtggcgccgagagagagtgcgtggcaggacgccgtcgatgcgtgtccgaggacgtggccgccgctcccctcgccctctatcttcccaacatcgtcatctcttgtcactctccaccccactgccaaggaactgaagctgagagctacatatcatcctcctcgccatcctcctcatcgtcggccgccaagaaggaggagttgccataagtcgtcaagcagagctcgccatcatctcgatcttccctgttccttattcatatcatcatgccgaaggttttaccttatgacctcaccctctctcgtgcagtagatcgatgggaacaccgtcatgccgacgtgaccccggagcgtgctctctgcgctactgtcaagaccatctctgcgttccggccgccacggtgcatggccgggccatccaccgcgccatcgtcatcactgagaccctaggagcccttcgacccaagcaatcgagacgagataccgtgaatcatgagatcgccatcgttttccaaactctggccaacctccggcatcttcgattccgtcgtccttggtgagttagaagccgattcctcgtgaatgtagcgtctctaggtctctattaacatcttggtagcatcgaactatcagctccttggctcggccggactggaaccgtcgcccatgggcttttcgccgccaccgagctgctctacacgaacctgccgctgttcaagcatcaccagggcttgtgcacagcttggtgagtacactagagcctgaagaaaacacatgcatgcatcatctaggccggactgagcccgtaacttgttttgcaccgcagccttgaagccgctgccgccaccgctcgcgttgccgctggcgtcaattatggccacctccggctacaagacgaccatcgtcgggttcgcaagaagcctgcgcatctttctctttttggccgcatcatctgaggagtcgccgttcgccgtcggcatcgccgtgaaggagtttcagccggcaaggccatgcctcagctgctgctcgcaccagggacttgatttataaggaaaacaaaactctatgtactaattggtcccaggggcaaatatgtcattttgtgaaaattctctctccaagatagcataaaatcataaaataatgtgtattttgtctatcagcaaattaccacgttttttagtgtctctgagcaaattcacgttcttccgatgtccctcggtaaagaccacattttttgagtattctgtagcaaattttgccatgctctttgctctgcccatctttggatggttccaatcctcttatgtagcactcgctgcactcgctacgtcatagggatgtccggcgcagctgtggcattcattctgcatcggatggacacactagtgaggcgtccaaacaggctcgcgctcggcccagtcaccgaaataggacggcccgtttgaagaaagagctcgtttcctttgccaggaaaatcgggatcgctcccaattcctcgtggccatcagccgacagccggcggccgctcgtcatcccgtccggcagtctggctcaggtgcgaccagagaataaactccgtagtactccggcagtctggctcaggtccggcagtccgacagtctggctcagctatctttcgccattgcccattttgcaagcaagaaagtactccatagcatacaagtccctatgcatatatgccatgtatgtatgttcaatactgatctcaaattgcagaatcgaacattctcaaattgacaaattaatcagtctcgaaccaacgaaaacatccattcatcgcattcacatcaatttacaatctcaattgggcttctcaagcagctgtcgcctccctccagaaacccgtggtggtggtggtcgtcgtcgtggctgcggtgctgtgggcatatggcaacaaaggctgcccttcgtctcgtggcggcgcgacccctgtcactaccgccgtggaacccgtcgttgtcgaggcagatctccaggaatgaaacagggctctcgcgtgtcacgcccagaaattcacgaaccagaatttctaaactgaatgtatattaaaacccctgtccaggaccagccagagtacacaaatgacaattgctgaaatgcagatccacgtcttacgaaaatataaaagattacaaatgcacgaaaaagataaaaacgagctaagcttgaagatttgactcctgtagcgaggcgactccattccaaaggcatccttgatggcagcgacgaaacaacttccttgagacagctccactgggaagaacttcagctctggtgtggggaagagagatcaaaactgagtactaaacactgtactcagcaagtcatatcagaagggaagatatgatgtaagatatatccaaaggaggctaggggttatttgcataaagctagcatttaaaagaagtagttgaaagcagtaaaaccgttgtagtaattaatcatcactgttcaacgctataccacgttaaaacaggcccaacccaccacctgaactaactagttccattgagccatactattggtgagactaatcacggtgaatctggtcgaccgcccataaccgcggacacggctattcgaatagttttactctgatcaaagatgtacaactatacccacaagacacagccctacgacacgtttccgtgtgccgacatgccaccacggcataccggaaagaggccgtgataggacccttcgcataaccccctttaaccaatctcaccacacctcaggttttgcccccgtccccagcaggcaacgggcagccacccctcgtgccacgatgaatccgaaagccaatccaccgaacaccccagccgacccaactccatcacgctcaccctagcctgggtacgtcagctagaggaaagctacactacaagcccagccgttgtccacgctggcttgtggtaagtacgataagtttttctagggcatcccgcgaaccggtccttaatcgccatgggtgcaaccagcaaaaccatgcacccatagcccaccatttagtgtgttttaaaaatctaatactgtcatggtggcacatgtccaaagctatgctagtaaccaatgtctaagcattaatgtgattcccctttgtgtactagttgaactaagcagggctaagcaattacgaaaacaacatctaagcatattaaatcccaggttagcaaaggaatatgacatacaatttataaggcgagaacagtaggtaaatagcccatcccatgacattataaaacaatgcagtatttagagaaaagtagagtatttgcaatatgggagcaatatggtcaattaacaagcatgacttgccttgctcttgcactgatgagacctctgcaacatcttcaacgcaccacgaagcgacgaaacggccgaaaactacgtgacaaacaaagcacacaagcaaaacaggccataagtttactaaaacaggaaacaaaaccatttttaatggattatagggatttttatgaatttactaagacttgaatagacttaaacagagctcggatgaatttctatgaattttagaagattcactgtgtttttactataaaaataaaagccttaatggatttatcgcgcaatatatcccaggcgatgatgtcatagggggggcagtggcggcaagcgggccccgcttgtcaatgacacaaaggagcgagggggcgccagctggcgggccccaccaagcagccgcccaaagggcgccgatccaccgtggaccgagaccacgcgggtggtccaccgccggtccacgggaccaatggcccggattggccgagggctgatcggacggcgctagggagcggctgctaggctcagcacgaccggccatagcgatgcggcgacgaggggcgcggaaggtggcggcgcacggcgcgaagggcagcagcgcggctcggtgctaggagggagagaaaggggaaatgctcctcaccgtgggattcggccggcgtgcgggaagacgacagcgaatgacggcggcaagcggtggatggcggggtgcgcgggatggacaaggcggcccttgacctcccgaggccgacggcggcgacggagcggcgcggcgcggcagtggaactagcggtggctagcggcggatggaggcggcaataggtggcggtgcgtggggagagcggtacggcgacggcgcgcggcaagtgagcagcggccgagattgctattgcggcggcgaagctagcggctgggattgcgtggtgtggcagcggctgtagaagtggcggtgtggcagcggctgtagaagtggcggcgcgtggttgatgagtggcggcggcggctgagcttgggtgtgacggcgccggtgcgatagaggtcacgggagagggaggtggaaaggggaaaaatggagaggaggacgcagggaagctatataggggtttgggagaggcggacacggccgggaaagggcccgatttggctggcgacgtggggaggtgggggagagagagagggggggattcaaattgaatcctgcccctcacgggcgcacgcacgagcgggagaagcgggttagtgggcgggcgacgtgggcgtggggcactggtgtggagtggtggcgtggaggagagcgggaacggtggtggcgtgggcggtttcagcggcggttgctgcccggctagaggtaggggacgacttgacaggtgggccccacctatcggcgtcccagagaggagggatggggcgtgggccggcccagccgagcgggcagcgtaggagccaagtgggccgatggcccaagaagaggaaaaaggaggaaaagaaaaaagaggaaaaagaaaaggattttcctgggattagaatattgcggataattgatttttattggttaaaactatttatagggctatgaaaattctactaaaaatcccgttaatgaaatgtgacaagtggaacccaagaaaaatcccacaatgccatttccaattattgattgcatttattaattaaggaattagctctaggttaatcaaattatttcttgaggcaatttattaaacaaatttttaaagcaagaaaaagggggaaaacttcagggcgtgacatcgcgccacgtgaggagtcgagggatggtgaggagggcggcgacgaggggaggggctttgtccgagatcggctccaatagcgcctgagccggaggagacgatgagcggccgccggctgatgtcctggagaacttgggagcgacaccgatttttctggctaaggaaacgagccttctgttcaaatgagccgtcctatttcagtgacttggaccgagtttgagcccgtttggccgcctcactgcgtgcgttcatccgatgcggtatgaacgacgcagctgcgccggatgtccctctgacgtagcgagtgctacgtccgaggatctggaggagatggaacacaccagccgtacgaaaaatagaaggaaagattccttcgctactgatttcatgggaaggcatgggaaaaattttatccacttcaagctcttttttattttgcttcacaaaagaccaaagcaatcaaacaataagtaggtgtttttgaagaacacaatcggagacatcgagcaagagctttggataaggatgataaggaagatagaaaatacagggatcattgtaaacttcatacggccatacaaatgaacccatcatctatattcatgcgttttgaggtggaattggtgtgtgtgagagagagagagagagagaggaggaggaggaagagggatcacgaaagagaagagagggggaggtgaggaagagaatgggatgagccgatgaggtggaggctcttgataagggggtagctagcccgatgaaagctaaggtggtcggaggcaagggtgctgatggtggtcgacggttaactttagctctaggagctagtgcaaatctgtggtcacagccggctgttccaaaggaaacctggggagttgcgcagggagaggaagaggatgaaaggaactggtggtcggaggtgttggcagcaacgccatgccgcacttcgccggaagtttcgacttgggataagaaggggtgttctagaggcgggttttctgctccgacaaaatgctatgctgtcgaaccgttgtgtgtgcccaagccacttgcgctggggtcacgcttctgggctctgggtgatgagagctcggaggatgaagttgaccgtgaggagcatcgatcagaggaggaggtgcaaggtggttcggtgctgccggaagagagcttcgtcaagaaggccatcgatcaaggcttcaccgtggatgaaatactcaaggcgggtgaacatttactttgtatgagttcgccgccaaaggtaagttcgtgctccatgaattctgatttcgtcggcaacagaaaactggcaaagaaaatggttgaaaaggtggtgaatcaaaaaacaactacctgtaaaccttggaaagggccgttaccaaaggctagggtttcacagcctttaacctttggggacgtcataggagttgctttgaaaaaaaagaaacgagcgtctgtggcttcgccggcgaggttcacgacagtaaacggtgttaattcgccagttgctgaggagaaccttgatagggccaacaaatctctttcctctatgaggcttcctgttgcgcatacatgcagcataatggagaaggctgcggcggcgccgccggcggcggcggtgaggtctagtttggacgacaatgctaagacattgaagtttctgatgaacctcgacaaaagagaaaaagaaggaaggatagttttgatgagtccagggggacagtgcacgtcggatatcgaggcgtcaaagcggtcggtcgagttgttgtcgaagggcggcagtgaacataaatttgtttcgtttggagtaaggtcgaatttggtccaattcaaatgttgccaaggactgggccgactactctcgcgtgcgggccaacatatgtgggctacagagggagcaactaggcaaaaacgaagcgacgtgactgtagggcttcgcaccacacagttagtgcagacctctcaaactcgcgagcgcaagcaatcggtaggcgaacagagtggcggcgcccagggagagcgaagcaggcgagaagtcaccatggcatggagaggtgaaggcagcggtcgctcggatggccatggtagggagaggggagatggcttctgggaggaggaagaagagttttttggtgcaaggtttgatgctggccggctaggttttgagccgggatatggttttgggcagcagggaaatcatggttgggggcagcaaaggagtggtttcaggccaaggggatcacgtagctttggtccacgccaaggaggttttgccggccgacccggaaggggaggctgggaaaacaatcgcttctcgatgaagcgctttggcgagaggccattgttgaagaatgagggcaggccaggaggaggaattaacaaggcaggaggtggttctaaatttgcagctaagggggaggttggtggaggagtttcagggggaggcggtggtgcaagtgctgggaaagggaaggtgaaggtgggtgatatggaggtagtggtgaaccagatggatggggctgcggtggtgacggacgatccggagacaaattcagaattggctatcttggattgtgatccatctttgtttgttgatcaacatgttcgtgaggacattagcaaaactcaagcaaagttgaaggtgtgttctaggtgtacttagaaggggcacgtggctgcagattgttcgtcggagttgtattgtgatatttgtgatagtgttgagcatgtcaatcatcgttgcctagtattgaagcaatcaagacctgctgcacatgctgtgggttattcagttgatgggttaggattttatcacattcctcacccacctctacaaaaaagtaagaaagggtccaagacagctttggtcagaattgaggggggctgcctaattaaagagaaggcagtatcacaacttcagagaattatttcgacgaaatggaaatgggagccagttgaacacgaagagaattcttttgttgttcctttcccatcaaagatagagttacaacgagctattgcgtatggcggggcaaatgtgaaagaaaatggagttcttacaggggctcgtctgaagttcgaggagtggaatgagaaggaggaggggtttctgctgccacaaggtgtgggtacgggtttttggactgagaaagaaactaaggaagtaccttaatatttgggcggttggttctcttttaggcgccactcaaactatggacatgaaaatgacgagaaagaatgattttggaaggatctttgtggatgttttaaacccgaggattatcccaaaaaatttggatgtagtgattggcgatcatttttttgagctggaaatcgaggttgaaaagatgggttttgatgagaatgggaaggaggtagaaatagaacaacatgatagagatggtgatggtttggaggaaaataaggaagataagcatgatggtgatgggagggatggaagagtaactaaaagagcaaanaatgatgacatgttagtagatggaaaggagaatggtacaacagaaggaaagtatgatgcagccttgaatgggaaccaatgtcagcacaagatgaaagaaagtgagatctctgctatagctttaggaattttggatgttgcagttggcaaagtgatgaatgaggtttgtgatatggtgatggaggagacagagcagccaatagaggaggaggagttgcctcttgattcaaatctgggagatgaggagaaaggagagcaagagcaagagcaggagcaagaggagttaacattagtagagaataatatagaagaggctttcaaggagagggtggttcgagcagcaaacgttaaggagacagttatgacaccgaaacgttctagtgcaaggctgggttgcaacagtggagtgcactctgtggaaaaggcatggaagaatttagagctgcaacaaggtaacgaagttaattcgtttttgtctttttctaattcctccataacttctagtttacaaaatttaggagttcttctaggtgcctctagtgatgaaattacagattcagtttgtagccttaaaaagacagaggttgaaaggattaatagtagtttaagtctagtaagggataatttagaaaagttggatgatggggacagttcagaggaggaagatgatttgaattatcttgtccttggtcacttatgtggtgatctgatggatgaggttatggatgaggaaactagtcacct

SEQ ID NO: 22755 - DNA, 4185 bp, Oryza sativa
  unsure (1)..(4185): unsure at all n locations
gcccaaagaaaaacaaaattaaaagcactggcacgatatatgcaaaagaaggggccatagaaataaaactaacctaaaatgtcagtataactaaacatagattcagagcacatgcaaagcgaataaaaaatgggaataaaaataattagagcataacaagcaacatgaatacaataaaaaaatcatatatttagtatgaactgtatgaaccaaaaatcacattctaatttcaaagaaatcatttgcagcactgtgggtgtgtgtgggaagcggagtactagtagaatgaatcacacagcaatgttacatacagtacactagttatctgcctataatcaatttgcagagtctgcataatacatagttattctcaaaaataacaacaatgcatagttagtttttcatactacacatgtcaaatgtgaataaactacatacaaactgcagatcagcatcaaaactacatccaaaaaatggaaaataacacacatcagaaaaaaagcatttgatccaaaagcacttgatccaaaagcatatagtactctgcatcatatgtaaacttagttctctagcatcatattataaaacgtataaaggacctgtgaatctagcatacacaatatgctctaatttgcatcgggttgctactgcataaatcaaccacgctggttgcatctccaaaaaagcaaatagtcacatacaaagggtacaaaaaatgccacaaaatattaatcctgatgctactccctatattaaacacgggaagttgcaacatcccagcgacgctagccaagcacatatccgtagatgcaaaaaacatcagatccgttatagttaatactagatcgatagttaatccataggtccaacagactagatccaagcttccagcaacgctagcacataggattcaaaaacatgaacagaaaaaatcaaaaataaaaaagcacacacatatgaaccctaaaatacaaataaatcgttgctaaccacgtcagatctgtgatagttggaacaaaataaacaagttctgcactgcaaaccaaaaaggattcaaaatccccaaaaaaaactgagaaaaaatgcaacaaaaatacctagccatgaacgagatggatcaatctccagctgacagcgagagaaattcggtggagagcgctcacgaacaaatccggcgccgaagaagggaagcacgagagaaatcgcctcggcgaggtcgctggctacgcgtcgctcgaacgagagagagagaaaaggaaaaagtaaaacggaacaacccagcggcgcggaaaccgatatcaaatattgttcaaaattggacaacctaaacgggtaagagagaaattacgggatccgataccacaattattgggtcaaagcgggtccgcagacaaaaaaaactacacgaatcacggcgtctatccgacagtcagaacaggcgactgcaatcaaccacaatttatggcgccacaaatctagcaatttcgttttttttttctgcctcgattcgctattttcttaccgttgccgcgtttttttttcatgatcgcacgatgacgcggcattgcaggcatgatgacgcgagcgacgattttatgtgacgtgagcaacggagaaacagacaaaaaaaaaattaaggcttgtatttgatacgtactcaaggccatgaatcaatcggaaatttttttttgaatgaatcggcgaactgccaatttcattgaatagagaaggagtaaactttacaagtaagaaaaccaggcctaggaccttcggtcctactgagctaaaaataaaaagcaagccagctaccaagatgcctcacccccgcccgagaccatgttttggcctccnnntaattttggccaacagacttccggtagataactctttgtgctgaaaaattctacgatttctctcgtcccagatttcccagttgaccagaagtgttaacgtgcgaagtgctttcttcggggcttccttcaagttggcggtggcctcccaccactctgacaccgattgagctggttgccattgaccgggatttagttgaccacacctagtccaatcagataacgccgcctagattttcctagtgtatctgcattctgcgagaaggtggagagcagtttcttgggtgtgtctgcataaggggcagaaagaactgttctgccaacctctggttaccagtctgtcggaggtccaaactctattttggatgatcaaccaggcaaaggtcttgcacttgcgtggtgcccacggcttccatattaggatgttgaagttggtggctgtagtacctaggagctgcgctttgtaggccgacgtcatcgtatattcaccgtggctagtgagcttccacactatcttatcctcctcattttctgtgaaatgtacgttgtgtaccgcactcagacattgattagctggctgaccagctctgttgtccaacctgaggttggaggaaggtctagattgagcagccactggtctgtagttgaggcctgttgtagcgtggtgttctttttcttggaggccgcgttgatcaggggagttacatcctttagtcttctcccttccagccaagctgagtcccaaaagcttgctttcgctccatcccctattgttatggttgttgctgctgcaaaaagtaacctatccgtgtcatcacagggtgttcccgaccccacccatgctttttccggtgatctccactcgttccaaagccaccacagtcataaagctcttgcaaattcctccaagttcagaatgcctagtcctcctgaggctgtagggaggcaggtccgtgtccaatttattttgcacttgccccctgtcagagcttcaccgcttgtccataggaactttcttctctgcttgtcgatgacctctagggactcttttgaagctttcaggcccatcagaagaaaaaaaggttgtgaagtgagcaccgatttaaccagcgttgatcgccctgccaggccaatatgtcttcctcgccagctagctactctactcatcgatttgtcgtagagaggtagaaggtctactttgcgtagacagccagtggacagaggcaaccccagatacttcatcgggaagcttgccctagttgcaggcgtgccatgcaggatgtcgtcgaggtccagattattgcatctgatcggcgccacttgcgatttttgcaggttcgtgcatgatcctgataccttcccaaaacgatttagcagagcggcgaaggcactcacgtcctctttggtcggattaatgaagacggccgcatcatccgcgtacatagatgtgtggaagcgcacagctctgcctcacagcttacttagaactcctatgtcggtagccttgtctaataggcgctagagggggtctatagccaagatgaagaggaggggggatagggggccaccctgccgcaaacccttcctgtgtctgattgtttcgcccgggattccattcagggtgatctttgaggtggaagtggacagcagcccgaatatccagtcgcgccatttttacgggaaacccctattttggaggagcgcaagtaggtagtctcatctgatcgagtcaaaagccttggagatgtccaacttgaaaaggaggatcgggcgccgagtcctgtgatatcttctcaccatattcctcacatacatgattctaatgcgatgattggaatattagtaatctgttaattagttaagatatatatatatatatatatatatatatatatatatatatatatatatatatatatattataaagccatacgacaagcacataaaacgtacaaaattctaatgcgacgattggaaaattagtaatctgttaattggtttatatatatatatatatatatatatattatataaagccatacgacaagcacacaatgcaaggcccgcttttcccgtgaccacttatcacactgatcttgactagcctctatccattttctcccctttttgactcaaccatattgtgatttcttagcaagcaaagaaacagaagatatggcggcgagacaaggcatcccaagtgaccatttgtcgtatctgcaggttaattaggataaacatagttgggatacaagcagtaaaaattcatgaacagtgctaatatatacttcttccatttcacaatgtaagtcattttaacttttctcatgttca

SEQ ID NO: 22756 - DNA, 4659 bp, Oryza sativa
  unsure (1)..(4659): unsure at all n locations
ttcaaactgcatggataccaatcccatgttgacacaaaccagtacgccgccgacagccaccgcgagatttaatgcttaactgttgcctagaaatcaattagattttcatcaccttctgccctctcctcctcttctcaccttccaaccgatccaaaacccaggcagctcctctacctggcgaaggcagcaaccgtggcgcctagctcccccccccctccgtcacgtccacatgagtctctttgaggaaattcataatatgttttatatatgctacatactgccagtatattaatcataaagtcctctcaactattgtaggacaggggagtacaatgctagtcattatgtggtggctgcagatatgattaacaaaaaaaaaattatctacccaatcgagggaaggagacgttgaaacggtttataaaactgaaggaaaccggttgattttcccaaaagttactttcggatcgtctcgataacataaactacttggttttcaagtaaagttttaaaaaataaaactgaattttaattattttcaacaaaatttgatcagattttgttgggagtcagcggttacgttttttatataaaaaggagtaaatatcatagaaccctacctattatgattaaagttacacaaacacatgaattttggcacatgacacatactcaggtatttatggttatatataaagtttcacataacccgttaaccaaactaacatattcctatttcaaaattttaaaatgttttagttatgtcatgtaatattttcatgacgataaataacttataaatttgaagtgattataagactaaaaagtgcggtggatcacagttaaaatgattaatattttgtttgtccgaaactttgtaaacatggtaccggggggtaatgtatacaatttactttaagaaaagacaatgaccctagggttttggcttaccaacgattttatgaattaatttagatcgaatccaggggcggatccaacgtgggtgcgcggggggggggggggtggcgggggactcaagttaagtccccctacacccaccggaccatggataccccctgagtccccccttcaaatttttcgtcatagttgataagataggaggtgctaaaggtctcctaatagtattttagtatagtttaatactccctccatcctaaaatataaggtataacactcaaaacacaaagaccaagaaaatattttatcatcttcatggttggatcacttggatgcatgcaagcaatgtgattgggaggtttaatggtataagatttaaaacaaatcaattttatagggtcaagagatgctagttaatatatacatgcatacacgccttatattatgtgacatgagagaaaaaggttgtgccttatattttgggatggagggagtattgagattatgtttttatgtcgatgtactcggtatgttgagtcccccaactttctgtttctagatccgcctctgatcgaatctatgatgagtgtgggtaattaattaattacacagatgagtgagatgacgaggagctagatagctgaccttatacgtgtggggggaggggggggggggcttcgtcccttggacgtcggagctgtagagacgccgtggtggggtctccatgaggcagcggggagagaagctgagctcctcgagagcgcgcggaataatcggccgctgcagcagcgagcggccggtggatcggaggagcactagcgatgccgtcgccatccttttgcaaaaccctagctagcgagtagcgagcaatcgatggatcgcggtggacatctgtcggctctgtctgcagctattagcgtcgggaggacggccgctgggcactgactcgagtcggtacgtacgtaactccgtatctgtatccgtatcgagctgagatcgctagctattcgatttccctacctgcctttccgcggagatccaacgttttgtaagtcaggagtaaaaatatttgtgcgttacacaggtgagataattcactactaaaaatcgattnttacatgccgacaggtagcctgcaaacgcccaaaagtatgcaaaaatcagattttcgcacttaggcacttaagctgacctcatgcgaaaagaaaaatcaagaaaaaaaaaatccaaatcctctcatcatcgccactgctatcctcctcatcctcccatcactgccgccaccatcgttggcgtcgtcctcctgtcgctgctgccgccagatccaggcacggaagagccaccgccaccggatccacacgggggatggcttgccaccccgccacccgccgcagccgctcctcgcctccaccaccgggcgggggagggccgtcccctgcgcgttgacggctgggggaaggggcgcccgttgctgccgctcctctcctctgccaactgcccgttgctaccacccaccgtgcgcggccctcgccggctgccattcactcaggaggaaaaagagatcggagagaagtgaaataagacaggagtttgagagagagagagaggagtaatatgaggagaaggttgactcgaaaatttttttaaccgctgacagggaaagaggggcaagttagacttataggcggacttttagggggcccacatgcatgtgaaaatagactcattcttttgcatgcggcaacttatgagaaaaataattgtgagataaatttggaagagaagaaaaggataaaaatagagaaattagaagaaaagagaggatcaggatgataaaaaaggagaaaaaacgaaaaaaatgggagagagaaggtggctgattgggaaggggcgtgtgtggcaccgagtggagacacgtgggactggacaacggtatggtgtgggcctgttgggttgggttgggaggtggtgtataatagttactgtagtctcatgttgaattagatacaagcgacatacaaccaactcaaacattaatgacataccagaattttgacagaaacatcttcaatatttataatatagtagagattaggatcctaacgcctagtagataaaaataaagcagatactaatggataatgccagatacaggtacgaatagctcggataaaaaataaatataaattatctcgaatacagataaggaccgaatttgatcggacgcaaatactagaacaaatatttctctcaacatgaaaaccgcctaaacttctaatagaaacaaatatcgtcacacacataattagcttattttattaaaaagtttgatcataaactaaacaatactaattaaattcaacatgtatagcaatgttggtataaatacatgtcttactgatattatcatatataaaaatatattaataatttataaaaatatttatagtctacgtaacattaatagaagaaccatactgtttcacattctgaaacagctccacagcctcatgagtgctagcagctgaaaatctggtgcatacgatggctgccaagtaatcacctgccatggtatcccaattcccctataacattttgctactctcccctgcaggtgggctaaagccaagtttatccactgatcaacaggtgtaccagtaatttcataaaacttttcacactgcttcaatcagtcaacaagatcttcaccagcaaacaaaggaatttgcatgacacctccccaggccatttcattgcttttaattgtttggttgcctgtattctcccttttaccattctgatttatatggcactgggatagtcaaaatttcctgcattctagtatctcttacacacccagagattatttccctgtataaagactttgtggtgaaattccctgatttagtcaagctccaactcattacatccctttcttctgtaagtgtaacatcccttaagatctccaacaaaccattacattcatcaaggtcctcttctccatgagttccttgcagttctatattccactccccatttgtacaaatttgcttgaccgctgcccttggctccctacatatactatatatatatatatatatatatatatatatatatatatatgggaattgaatcttcaatggagtttctccaatccacacatcatcccagaaaaatacggatctcccactctcacttttgtatttactccctgctctcatccaatgtttgaactcatgcagcccccttccaaaattgtgaaacccctatgtcagtagattggaagaaacctcccttcgcacagtatttggttctgagaagtctacagcatgggtcatttcccctctgactcaatcttgaaaatccacttgcacaataaggcttcattcattaccttggtgtttatgaaatccaaaccccctaggtccttgggcctacataattctttccacctaatcatatgatattttattttgttttccaatcattccaaaaaaaatctagttctcaaattatccatcttatgatgtgttgtctttggaaggattgctcttcccccatacgacaaatggccacttttccatgttgctagccttttctcaatcttgtttgctgggatacttaaatcaaccgcaatcagcttcccccatacaacaaatggccacttttccatgttgtagcctttttctcaatcttgtttgctgggaacttaaatcaaccgcaatcagcttccttcactta

SEQ ID NO: 22757 - DNA, 1855 bp, Oryza sativa
  unsure (1)..(1855): unsure at all n locations
gtttgatgtagaatctgacacttgatgtaaataaagacaaacgactaataattgtaaataacaatataatccagaagaaaccaattggctaacaatgatatgatagaataagcactgatccgaaggttaaagaatatatcagctggaggtccgatgtcataaactccacaagattagataaatcaatgaaacctttgttatcatcggctaactccaacttatatatgcaatccttataagccgatgcaatgtccagataactcatcgcctgaaaccccgatgacacccttattggtagtcaacaagtagactagggattatggttctaagcatgacttagtagatcaaacttaactaatgtagcactaagtatgaaaagaaacataatatgtagacaatcaagcccttgactgatttttagagtggtagataccttagctaatctaatatagtaaaacaatttagccgataccgacagaaaccctaaagcgagagacaaccgatagacctaaattgagatactaaaactagattaactaagacatatgataaataggcaggcaaatatatcatccaaatcagagcaatccaagaggtcgaatgtactgatgcagccttgaacgacgccgacgtagacgatacaattgcctaggctggtggaacattggactttccctctcgccggagatcgaaaacagatgcagccccgcgtcaggttccatgttccgccggataataaaaagtagaaaacataaaaaggtggcgatgcgccaaattgtattgattgtggagagatctataacaatgaccccaggtgtacatatttatacccatggggagatactagtccttgtaggacaagaaagaaactttcctaaagataaaaggaaaacataaagtccttattggacactaacacactttcctaaagataaaaggaaactaacaaactcttcctaattaatagataaactgacatgacacatcctccttgaactctgtcactttgagataagcttcctttaacagattaatttccttaaccgaatatagcaggaatccgacnattggtgacgtgataattcacagcggccgatcccaggactcagaagccaatattgactccaggccgatgatgtcttcggggctcaccaaatttcaaaggggacgctactgtcctctccttttttagacgggcatttatctagccctctccaatcaatggcacatggaaattaggtgtttatacttgcagagaagaaaaccgcccgtcaaaaatctttacacatgtgcaaacagacattgttcactttaagatagtcgcctgcgaaatctcttttagcgggtagtttttatcagtatcttgaatatgagataccttatatttgtgtactatgcttggtgcgcccaccatataccaaattctctatggaatcaagcctcatacaaaaagtgttctagattaaaaaaaaacagccttttttttgacaaattgatctttttcaaaaagttatttcaaaactagaccgtgcaaaaaaaaacttcaaccaaaaataggccattagctcagtgccaaccgccttggcgctaaggttagccttcttagcgccagtcgcattggcactgaccccgctaaccttagcaccagccgcgttggcattaaggtagggtccttagtgcgccggcccggcattcctctcttctttccccacccaacgcggctaggattcctcctcctcacagcgccctctctcctcctcccccaaaatctcctcaaatctcccttgaatcaaaggttattttgtgggcattgctttgtagattgatttgtaaggtaaatcccctccaaaatccc

SEQ ID NO: 22758 - DNA, 27507 bp, Oryza sativa
ttcttgacagaaatatatacttttttgtttttcttttatgtatatataaaataaaatgactttctgtcattaaaactaaaatgcagttggccaagtacaaataaaatgtcaataacaataacatgctgagaaattcctgacctacaattttgtctgttgaatgtgttgttcttgaacccaccagtgtttggccaatgatgcatctatgcctctatctgagttccttatttggttgagactttttctgaaaggaaactaactatagctgaggccttatatctttgatcttttaacttcgtcaccacttttctttcttgaaaattacttagttggatgatgttgacaaatcatccctgtgtattcttgtgtatgcctgtgaaagtatttatcctcactctgatattgtgtcttcttggttgtaggcgaatttaatacttttagctgtagaaattaggaaaaaatatatcttagttactagtttactcaaaactcattttactcaattaatgtatgtaattttatttttgagcataatacaaaggtatcgaaagggacaagctgtttacatagagagccaaagagagttctctacaccatctagcgaatacaggtaccttacagcttgtctttctcatgtcttgatccttctatgcattttcgttactggtttgctcacaaccatcctaaaatgacatcttagttattactggagatatgacatgaaaattttaactctctgataaggtgcctctatggccctggagcaccaaacatatttatttgatcagtatgcaaattgtctgcattggaattaaaatgaaagaaaataaaaggacaatattaagatctatctagtaatagttctggtcaatgatatgatatttaagttgccactatgggtagttacttatttcaattgctagaggcgttttgggttcaatttcccatcaatttgtacatgtccactttgtttgaatactcatttttgtatctttctgaatagaattgaataacccttgaaatgtcattctttggttgatgctgcatttgaaaaatacatttgcactcatcacttgttctgtgccacatttgaaaaatacatcttgatgtccttttgcatgatttttagattttgtcttctacttttctgctaaacatagaaatttgcactcatcacttgttctgtgccataaccattctatgatgaattgtccttagcggattccgatgaacctgatgttaatttggttctctgagaacatgctatgacatgtctgaaataataaaatttctgagtcatgatcacttatatctgactatgtaaaatggttttgagccgatgggttcacaagtccatttgttctgcattagttgtcagcagtgcatttagctttgcaacgtaaaattcttgatgctatttaaggcagggatttacctcttttttttttgctagtttgcattttatggatcacttgtgctttctacaatctgattccagtgttttgtattacatcttgtttccgctcatggtctgatcagtgcagttattatgttatcaacttctgtttggcacatgcacttcctctgcttcttctctcttttgggatgttgtgaatcagaggttttccaatgtgttgctttcatcgaagatctgtggttttcacttctcttagtggtaacctcagcgtgagcttgagttgccatcatcaagtcatttcattctttagaatatgaagattttttgtttgcgttttttgttctcaacatggtttttttttttggcatgtcctatatgagtttggtgtcccaatggttatgacaaaatgctaatgaaccaaggctgcaatgacggttcaaaggatgaacttatttaacaagagaatattgaaatcaaaactgttgtttcatgtagaatgttttatgtgcagaaatgccttattgtatcacttatctgatcatgtttgttatttaaaaactaagacataacactggattggtgtactaagacatggagcctctaattatgatatagctgatccatttctaaaacttcttgttaagaaaacttatttcctaaatgcaaagttacattgattcctgagtatgtgctttctcagaagaaataaacaggtgccaatgcaaccatttagcacagcagaattcctgtgcaaacgtagtcttatatgactcaaaaactgagtaaacatggacacttggttgcagagcattatctgtaactgcatttgttcctagatacaaaggatttacctgtcttttctttctgaaggactgaacaacaaccaccgcaacggtgcatcacgcgcggcggaattactccgtgatacacagctcctactcccacgaacacacagagttacagaactgagcataccagtggtgataaatccaactgggcagtgttctcctgtatcgcaaccatcaaccgagaacaaagaagctaaattattcctatctataaataactggccatgactgacatctatttcttgtaattaagaaaacttgtactcctatttttttcaaaactctgaaagcttctatttcttcctgattaatgcgcatgtgctttctagtttctactaagaatcgaagtacaaatgcaactgtgcagcaaaaaccagaatgtcgctgaaactgtaagcaacatggacattgagtagcagaggcggtggccggagttgagggcgaagaggcagcgtcggcggtggtgactacgatccaaggggggattggccggcgagacttgatggggatggctccgccgttggggaggagcctcaccgtcaccgggagcggcatgtgaggtcggagacggcggcgcgcgataggactcggcgcgtccgacagaccgaccggcggcgactcgctagagaacaaggcggacagaatgtacgagcccagattttttgttacggcccatggacagaaatttttgtcagttttggtttatttcttaatttcctaaaagggtaaattgtaaagtgatttcgctaagtccacgaacttgtaaaacgtgtatagagattcttaaattttatttatagtactcactctatccgaaagtttaagaactctttcatttttttggtttttccaaagagataagcccattttacaacctccaagcttcgtctaaaatacaccctcgtccattttacgggaaaaaagagagaaaggagggagaaagagaaaggagggagaaagagagatgagagctgacatgtgggtccaagggcatttttgacatttcacgtgatttctctctcctcacccggaaatcattattctaatcggcgcggtgtccattggcaaattaccacgtttatggagtgtttttccccaaaagtgactttgggcagtatcccacggctaaaactacgaactcgtagtgtcctgtagcaaaatttgccaaaataaaaataaggagagtcaccacttcttcctccatctcttatcccctttctctccttcctctttctctctctctatccttattcctcccaggtcaggtcatccccgagctaacatccccgaactaaaaaaaaaaacctgaattaccccctttgtggctaacggggccattgctggcatctgattggaatcacaactagcggaagtaagtcacggaaggtcggagatgcactatctcaggagcaggaggcagccgacggcgaggtagcagaggcggtggccggagttgagggcgacgaggctgcgccggtggtggtgactacgatcgaagggggggattggccggcgagacttgatggggatggctccgccgttggggaggagcctcaccgtcgctgggagcggcgtgtgaggtcagagacggcggcgcgcgataggactcggcgcctccgatagaccgaccagcggcgactcgccggagatcaaggcggacagaatgtacgagcccagatattttgttacggcccatggatagaaaaattttatcagttttggtttatttcttaatttcctaaaagggtaaattgtaaagtgatttcgctaagtccacgaacttgtaaaacgtgtatagagattcttaaattttatttatagtactccctctatctgaaagtctaagaactcttttattttttggttttttcaaagggataagttcattttacatcctccaactctttgcttcgtctaaaatacaccctcgaacttcaaaaccgggtatttgacaccccctgaactttcaataccattcattttatcccctctagtggttttcagcctgattttcacctatctagcgctgatgtgacggtccagtcagcaaatataaataaaaggcaaattttactagaagacactacgagttcgtggttttagccttgggaccactgcccaaagttatttttgggggaaaacactctataaatatggtaatttgccaatagacaccgtgccgattaaaataataatttccggttaaagagagagaaattacgtgaaatgtcgaaaatgcccttgggtccacatatcagctctcatctctcttcctctctttctccctcctctcttctcccagtcacggtgaggtcgagcacgtcatcttcgtggtttccctggactagccggcgcgcctccacatcgccgccaaggtcgccgacggcatggcgttcatgcacaacaccctgtgcggcggcggcggcggcgacgccgacgacgtgaacgaaaacttgtcgttctcatcctcctacgaggaggacgaggcctcctcgttctgcggcggcgccatcgtccacggcaatctcaaggcctccaacatcctcttcacgggcaccatggagccctgcatcagcgagtacggcatcactacgccgccgtcggtggcggctccatcctctggcgccgctgtcctccgcaccgacgtgcgcgtgtacgacgtgctactgctggagctgctcacggggaaggccacggcggcggacggcgccgagctggcgcggtgggtgacggccgtcatccgggaggagtggacggtctaggtgttcgaccgcgcgatgctctcctccgtcggcgccggcgacgccgtcaccagcgagcagcggatggtgcatcttcagcatgtcaccatgagatgcatcgacgcctcctcgccaccgcccaccacgagagaggtcgctgcaatggtgaacaccgtccgcgaggaagacgacgggtcgctctcctcgaaggcatgagtgacactgacgcggacggacaccaagcacttgagcggtgtgtgcagcaatacaaaattccacacaaaattcccggtaacggtgaggtcgagcacgtcgtcctggtggctctcaaggacgcatgctggctggtcggtgactgcgaacgccctgtcggggacgacgaggtgctccgggagcatgtcctgccgctcttccccttcaccaacttcttggacagctgggacagcgccagcgtcgtcgtcatcgacgatgacgtcccgtccgccggtgtggcgctggggggatgtggccgctgagcaggccgcgtgcactcagggcgttgccgccaccgcctcggcgagcaaaccgtgaccgggagaagagagaaaggagggagaaagagagaagagagatggagagctgacatgtgtgtccaagggcatttttgatatttcacgcaatttctctctcctcctcaaccggaaatcattattctaattagcgtggtgtctattagcaaattaccatgtttatggagtgttttcccctaaaaatgactttaggcagtgtcccacggctaaaaccatgaactcgtagtatcctgtagtaaaaatttgccaaaataaaaatcaaggggagtcacctcttcttcctccatctctcatccccttctctccttcctctttctctctctatccttattcctcctaggtcatccccgagctaacatccccaaactcgacgaggagagcggtggcggaggagctcgagcagggcagtcgggcgacggcaaagctcgcggacagcaaccacattccagatctggcggtggaagtggtgcgcccatgcgggcgacgacgagctcgcggacgccaatgccatagttgtcggcgagctcatttgtggagccacccccacccccccaacgcccagagctccacgcccttccgtcgccgagcctgccacaggcggctgcgagcccgaatacggcgcaggcggctccaagcgccgccgccctcgcagctccacaccacagccgcagccaccgcactcgcagctctatgccgacgccgcagtcgccgccctcatagctccatgccgccgtcgccaccgccgccctcgcatctccacgccgctgccgccgccctcgtagctctatgccgacgctgcagccgccgcccttgtagctccacgccgccaccgcagccgccgccctcgcagctgcacaccgccgtcgctgccctcgcatctccacgctgctaccgtctccctcacagctccacaccgccgccgccgccgccaatggtcacgagggagagaagaacgaatagggcagggtgaaggagagagagagaggggcatccaacgtggcaaaaaccacagtaaaaacaacccagggggggggttaagtgtccggtattgatagttcgagggtgtattatatccggtttttgtagttcgggggtgtattttcgacaagcataagagtttgagggtgtaaactagacttttccctttttccaaaagtctaaatcctatttgtagtcactatgtgctaaattaatttttttagtggagcccaataagttattgtactatttattggttgcatattcattggttttgtcatatgatgaatgaatgaattaatcattggtatagatagccatatggtccgaggcctgatggcctgacccatggcacggccatttggcccggctcaagcacggcatggcacgactggtgtcgggcctgtgctggcccggcccgatagttgggtcatgcctgggccgatgccttggcacggtggactggcctggcactacacaatcgaataaaaatagttgagggaccaaaaaaaagacttaaattaaccatataagacacggtccaaagagtatagggatacataatatacttattccagccatataaggcacagtccaaacagttgagtgaggaaaataaacttattctatagagaagcacgatgggctatcgtgccttcaggccggcctggcacgacccgagacttattgggccgtgcttgggccgtgcgtgcagcccgtgggcagacacggcacgggccggcgtgttggtcgggccgtgccggttcaactaacctcggcccaggcctggtcgtgcctgtgtcattccagcccgggcggcccatttggccatctatactcattggtcttgaggaaaaaaaaatgtcttagacttttggatagagcgtgtatcattctggtccaaaatccagccaattcgagaatggcacgtgtcccgatgtcccccggtgtcacaggtacaaaaacagaggcgaacgatctggtccgtccgtggggcgcagctgctacgcagaacgaatcaccgccgtcagatgaatgaacaagtaagtgcatagttctagcattgtgcgtttctttgttcgagattggttcttgtttcgttcgaatcttcttcttcctcaaacagattcatggttgctctctgctgctgcagtgctgcacgctctgtgttcttgatcttgtgctctctgctcaaacagattcatggccgatgatgatgtatacgaacaagagattttacctgctctgcgaccaccatccatgatgatgatggtcacgcttggcagaaaatcgccctccatatgaggctctccacatttgattttctttctttgctgattcttccattttccctccatatgagcctcgtttctatatgatcttgcctacatggcaggccacatttctattttttttgttagttatttttttctaccttctccctccctttttttccttcttcctctattcggcaagaggcagcattggcaacaacagttgactctctctctctgccgaccagttggcacagttgtcgtcgctatggatttctcacagcgttgcctaacggatcgcactcgtacaggcctccgttagcacccatgttctccaaacttgaactcctccactaactcagccccctcctccgctccacaggcccctctgcctttggtggtcggcgccatcactctcgctgcctccttctctctgcattgcttgtttcattaaggattcctccggcctgccaccgatgctaccgttacctgcggccgcagtcggcacatctagcggtggaggaagaagaaaaaagaaggcgagaaaaaatgggacaaaagggaattttgccatgttatcatccacgtggcataacacataggtaaaaccatattcatatgagactttgggctaggacgatacaataaacgatgtttaggggcctcgttgcacgctttgcaagttcgtggatctaggtgaaatctctttacaagttgaaggactgctagtaccatttacatgtcataaatagtctttattgacctagctcaaatatggcggagtctaattttctccctctagcgcaaaatcactctcctcaactattagaaaaggtttatttttgcctccccgaatgattttggcaatggtttttgttcgctgcggcaacttgtgtcaccacctatgttcgttgtagagaagcgccatgctcacctttaaatagtccgagtaacccttgttggtcgtgctcgtagcaaacctagccgctaccatataacttgctctctgcctcacgttgccaagccaccattgtctcctattctacgccttgatgccgccattaagtttctatgtgccttgtgaccccaatttcacccttgccggagctcgattcaagcccgggcaaaaatcaagaatttggccttcgtgaagtaagataccgggttggtgacttagtataggagcagcaattctgtaataacgagctaagaaagaatgagaaaatagtcaagctaacaaaccctaaacctactctaagttgtcaagaaatagcacaattccagctcaacgacatctcaagatgttttagtcgattgtgtacgcactaatcctactaaaccgaccttatgatggcattgacccataattacgtgataatttgacaacatattccctccattccccaattgatcatcatataatttttttaggttattcccaaatgatcatcatgttagtatccactccctaaatctaatcattattagtgtattagagtaaatggacattggtgcatgcatccatacacataactctttacaaccaacatataatgtcttgatttgttattggctaggaactaggagggatggtgcatgcatcaattttgttactagagtatattttatatgagagagttattggctttccttgattttggtacatgatcaattcggaacggagggagtaatcaactacttgcatacatctataataaaaaccatatctctcatgcaattagcttgaaccccaaaccctaaattagtagatatgtatgcgcaatcagcttggaccctaaacaggtagatctatacgtatgcagccagcttgaaccctaagccatagccagcaagcaaatgagcaagacaacaaacaactttcatcacccaagcaagcaaccgagccagtgtaaattaactttgaactctgaaccctgaaccctaaacttgtagatatgtatgcgcagttagcttggaccctaaagaagtagatccatatgcatgcagccagcttgaaccctaaaccctaggcaacaagcaaatgggcaagacaacaaacaacttccatcacccaagcaagcaatcgagtctgcatctcgaactagcaatacattcaatatccatggttgggcgtctcacttggatggaaggcatgtaggtgggagatcagacgagtcaagagctcacctggatggatacgaccccttgttgcagcacatatgtatgagatggaggagaagacgtcggcaacagcgatggcgttggcaattttggactgtgtactccactactcttgtacttagaacttacaactatgggtccatttaatatgtctacacgatctacatgggcaaatgtcttaagacacctcccgcaaaaagtgtttgcactggtagacaacttaacaagttgactgtgtaaattattttcatgggtgcctcaaaagacaccacctatgtttgaaatatttaaaagtttgaaaattcatatgaacttcaattgaggtagacaacctatcaccgtgctcgtgctaaacaaatcaagctaatgataaaccacttggcccacttgtcatactctaggcttgtgctaaaaaataatagttgtggtgggccctcttcatcaccgccgagaaggaagcactaatggctaaccctatcatggagcacatgtggggcctcccgcaatgctttatccgccaactccacttccgctgacacctcctctttgtcttccgatgcttggcctagcttcagcctcctatgcctcgaccatcctagcatctctcgtgtttcctccttgatggcatctctcgcgttggctactgccaacaccgttgtggccacgcctgctgggcccgtctcctcggccttggcctctgtctctgtgccctcctctcttgcctatgaatccatgccctcggcctcatcgtcgttgtcctttggtggggacctgttatagcatttttcctagcggagcacccgcagcgcttgatggtggtaggagcggcagcggcaacatactctctctctctctctctctctcacgcgcatgcgctcgattgccgaggaggaggcacatgcgctcgacggctggcggcagagacggagcatgaccgtgcggccggtgttggaggcgggctcgccaccatcgccgcctgccatgccacgccgccgcgccatcgccccacgcggatgccgcaactctgcacggctgcgcccaggagcacagcagccacgtcctcctgggctccgcgcctctgcctgtcctcttgccaactccggcgaggcgggccactcgccgccaaccaaagcttcgtccccgccgctcctatcgccccctacagcacactcccagccacgccccctccccgccgctctcaatgccgaccggttccccctcccatccaccaccttgctgctgagcacccgcagccgccggcgggcacctccacagtctcaatctcctcctgcccggtaaggaacaacaggatgtcgccgctgccaagcgggctctgccaccacgagctgccgttcgcctcttgtgtagctccatctcgtgcgtcgccgctgtggacgcggccaccgacactcgtgcgccgcgtccgcagtcgccgcccaccctccccgccgcgtccacagtcgccgcccgccctccccgccgtgcccaccgcgcccccagcggcaaagagagagggggtgaggtaggaccgtgggccccgcctccgcctccgccttcgcccccacccccgcccacccgccgccggcctcgactcctcgcccgtcgcccgtagccgcctccgcccacgcccgccaccggcagccgcctccgcccccgcccgcccgagcctagctcctcgcccactgcccgccaggcgccagccgcctcctctgtgcggatagagagaggggggggggagagaaggagagagaaaaaaagctgacaggtgggccccatcggttttatttattttttgctgattgtatcgccacgtgtgtgccacgtaggctaaaaaccgcttcgaatcgagttagggggtatttcatctggtttgcatagttggggtgaagaatgtcaggttttgtagtttaggggctatttcggacgaccgcgatagttgggggtaattcgtactttttccaaaaaaaaaaaaagctaatcaagcactatatctatttgtgctaagctactaatcgacaatcttgagggtaaagaaaggaaagacataaaattggcttaagacaatttacttagccaacaattatccaattaaccaatcacgtctatgcgatcacgctacaagaattggcgcggcgaccacgtaagtacgacaccatggatcgagagccggccccccaaatcaccaatctcaaagcaagagaggggagtccctcccattgtctgtcccaaactacccctatgccccacctgtcaggccacgtctacacgtacgtacagtcgtacacaaacaaaaagcagcagaggagaggcttcttgcccgcgacgaaacgtgccccgggcctctcgatctggcgccatctcggccgtccgtccgatgcgcccagatgatctgcgccgtccgcggcaacaacgtcgcgctatttatagaccaacccacacagcttgcttgaccaaccactattcctccctctctctcccactttggttatctcgtttctgcttgcgctgcatgttccagttgcagtatagcaggtagaatagaactagtttttggttggttttctatagcttttccccttcttggttgatgtgttcttggcatctttgccatatggtcttgggtgtgttcgatctcctcgatctccctggtgtgtgcttcgtgagaagatgtggagtggcatgccattgccatgaggagagcttgtgctgcatgcgttcgtgtgtttgttgatctcgattgcccaagttcttgctttcttgtgtttgttttctctagatctttgctgtgtttctgttttactttccgagtgtgcatgcgtgtgtggttcttgctgtgatttggtcacaaagaaacgctcagatctgaggcacgcactggtgctccatcgggacacacgttgctcgatccgtcttgggcttggatgaacattttgcgtcatcggtacacacggcgtgatttctttctttctttcttgtgcgtcttttttgctggtccgtgagaaagcatttttccgttgctgttcttccacgatcggtacgattcttgccaggattgtttttaccttccctgcgtgcgcgtgtgtatgatcatctcctggattttttttttgtgtttttggtttcttgcctttgtgctctgccgctcgcagttcgatctgcagctctggtttacatttccagaactagtaacgttgttcgcggcaacaacttgtctctcttctttgttgctttattttgccattcctaatttcttcacaacctgtctcgcatcttttagtctgttcttcctcttttcttcatctctcttgttctctctctctctccaggcatgtacctggccaagccgccaataggtgcatgccatgatgccatgcgtggtcagaggcacagagcagcaagtttttttttggcttctcttgcactgtccgggagatcaggatcagtaaagctgctcttctttttttctccctttgggtctctctctctctcgttcttctgcaggcaaaactgcagtagtacatctgcttgctcttttcttaccacctgcttcttttgtatccctgatccctgctcttctttttgtaacttgattatagtttgtgcatgcaaacatcagcaccacaatttgctcttcttgccagcacaactgttgttctgttctcccattttttctgtgatttactagttgatcttgttcttggctgcaatctttcaatgcaagcagctttaatttgttgctttacattccttgattcggtttcttagcagtaaataatcttggttccgtttgtagttcttgggggcagctatgattagttcaaaatatactaggttgaataatgatggaccagattgatgttcctgtgtggaataacatgtacggtccagacgattacaaccacattgttcctctcgatatgagatgccctttgaaataaaatgccatcttctctgctttctttcttttttttttctgagttaatcaaatcaattaattggttctaggttgaattctgatcgacgaaccgtgtttaacttctccggttcgaacgatgaccacctgtgcaccaacacccacagttatttctaatcctttccaggttatttcgtttcttgaattttatgagcccagtgatgaacaactgatgctttgatcctccgcacaagctgcgctgtggaaatgatgtgtttaatttagattgttctgagggtgcagttgcttaattttctgcttttttttggccttttcatctgcagaaataactgcagctttgaacggtgcgtgccttgggcgtgacgaaacaatctgggccgttggttgtttgcgcggagcaatctcaggcgtccacgtgtcgctatctgtccagctttactgttcggcgccttgtctgtactctccccgttcttggtttgctttttgatcggcttcctttgtgccagaggatttgtgaccaacgttctcgggttttccctgtaaatttcttgattgatttgcccgcaaattttgattgcagcgccgatgatgagttcacaaatgtactaggttgaattctgatcgaagaacctctcttggttcgaacgatggccacctgtgttcctctcgatctgaggcgctgcgcgtgactaatcatcaccaatccaatggattcagtttttttcctttttctgattgccatagtgtgctgatgaatttgtttccctgtgattcccttacgttgaagaccctgaagcaccttttggccgcgtttgaacttgattcagtttttgatttttcaaacaatgaatttgaaaatccagccaattcgagaacggcacgtgtcccgatgtccccggtgtcgcaggtacaaaacagaggcgaacgatctggtccgtccgtggcggcgaagctgctacgcagaacgaatcaccgccgtcatatgaatgaacaagtaagtgcttagttctagcattgttccatagtgtcctgttgtccctttatccttgtaaataacttttatttctcttaatagaaaaaatgtgctccttgcgtattcccgaagaaagttctggcattgtgcgtttctttgttcgagattggtttttgtttcgttcgaatcttcttcttcctcaaacagattcatgtttgctctctgctgcactctctgtgttcttgatcttgtgctctctgctcaaacagattcatggccgatgatgatgtatacgaacaagagattttacctgctctgcgaccaccatccatgatgatgatggtcgcgcttggcagaaaatcgccctccatatgaggctctccacatttgattttctttctttgctgcttcttccattttctctccatggatgattgctctgatgaaacggacgaggccgatgatgtttatgtataaaaaagcttttacctctgatccatgcgaccatccatggtggtcggtgttctgacagagaacacctcccgttatgaggccctcgttttcatctttgtctgatcaccatttttcttttttctttttttgccttcttcttaggccgatgatgctaatcatgctcctatggtcttgaccaagaagctgaggattctctaagaatgtttcccaagagctgaggcccttaattactctgcagttctagttggctagtgagatgaatcgacgaagaaaggtacagtgttagcagtgattgcgaaaccaaagactttcctgagatgcaagcctgtgggtttgcgtttgtgacgtctctttacttggatgagccacactgcatctttctcttgaacttgctatgctgttgagctttcatgcctgcctgtctgtcattatcctctgttttaactgctcaagggatcaactgtttttgccgatgacggatctcttcgcactgttgagattctaatcgtttcttttggactggccggtgatggatgaaacctgagttgtacagacactcttaagtgagttgaatgaagtgcactgacacacactcacattgcgtctctgaggccatggataagcttccaagtttcgtgttacatttagccattcggatgctaacttgtttagcataatgttttcacttctttctgtactcattgaacagttttgatgcaaggatcaatctcgaggagccagctacaggtatacttttgacataaagtttattttcccgagcatgctaatgagaacttgccttttgcacagcggcaatgatgagaatgcaattctatgatgtactttgatttttctatgatgtactttaattctatgatactctgagccatgcatttgttttgattttttaggctgaacttcccctatctcgatctttttgattttttaggctgaacttcccctatctcgatctgttatccatgcgtggttagtagctacatattttttaccttgaccgatgacaattgcgtccattcatgatggtcgttgaacactgttaagggagtttttcagtcatgtcagatttctggcacgtttgctgtacttgatgtgcgctgatcctaattcttctatattttgtgctttcacttctatatttctttatgaacaacggatgccaaatgataagaaaaggatgcaatgatgaacagatttctcgaagttatgttgaggcatttcaatttttcccgttgtcattgcagttcttgatgtattgtcctgctcctcaactgcttcagtagtatcattgagacattatgcccagattttggttattatcattaacttgatgtttgccaataataatattagtcatcattaatttgagatagacaactgcaactcttatctgtcaatttaatcagatttggattttagtctggccaatgaggcgacatcgttccaaaatttaatcaagtggccaagtgctcatttgaagtgtaattttttgttttgtttaggccaataatgatgactatatttctgtattcagtagaatatatttttcttctgtttctgttgctagacctgcatgttaagtccactacgctaactctggtttggtcctataattgttgttgatgaccatctaacttgtatattttccagagcatgaatcagaacacttccatttgggcacattgaaatagatggtgcaatttatacagtaactcagttaactgtcatgatcatttattctgtaaaaatggcttgatgtaactgatctgctcaatcccttataccaatatgcttgatttgcttccttcttgggccgatgatgcgaaccatgctcctatggtctagacctgtgaggaggatttcctaaacatatttcccaagagctgaggcccttagttaccaaccttctttctgattttatgttcttaagagaatgtagttgctttgtgcttcattctctttcttgacaggtttgcaacctcagctgcaattccttgtcttttgaattgtctgtgcagtgggcaatgaaaagaaatccattcgatgatgtagaaatgaatataacctcgcaatgctttgagccccacatttactttgatcttttgattctgaactttcatcctattcttgcaaaatgttaatttcttgtacttgaggtattgcagttgctcagggtgcactaaactggcttctcaatgaactgctgagagtagctagtgctctacttgttttgccctctagaagccttgatttgtcccacaacttcttgtggattagccagtgatgaaacaaaatgaagttcatctaagaatctctcaggccttgaattagcttatatgatactttgcaattatcatgttaaaatttgacagctctgccctgactttcttactactctgctcaatagttgtttgtttgattggcttgaaagcttgttcttgacatacttttttgtttttcattttatgtatatataaaatgaattgactttctatcattaaacgaaaatacagttgactttcttttatgagtttctcagctcttatttttatgcaactgcaactgttggagaatttatacagtattcagcaagtgaataccttctgtgccttctgtattgtttgcaatgatgacaaaaacgattggatgatgtactttgattaactcataaatcgcaatgctctgagcgacacatttgttttggttgtttttttagtctgaacatcccctagctcttgcactgcagaccaaaaatgcataagagcggtttagtagctgcatatgtttgctttgataaaatggatgaggccaatctgcaccatttcattgatgtcacctccgatttcgggcacatttgctgtacttgatgtcttggcgaaattatacagggtgccctcatatggaaggttgatgaatgaattgggaatcaccagtgctctactcaagtatctttttcggttcatctttggtttatccaaaaatctttgtcggatcgcctttttcatttttgccttcttcatgtggggtggatctttaaagaatatttcccaagagctgaggcccttaactagatttggcctcattaagattctttctgatttatcttcccaagaaattgtagtttccattacaaaaaacagagattgcaacaccgccgatgaagtgcttcttgagaaggtacatgtcttcagttcttggcattgcatcgattttatagagttcttggctgttattcactttgtgcaagtttgttcatgttattcacttggctgttattcaccttctctactcccatttcgtcttcaggctttcagctctgtgctcttgccggcgggcaatctgagctttggtcgagtgacaggcggcgcagagctttcgtggacctcctagcgcggtgcagaccaatccacacagcacctgagcctttcctctgcattttggtggtcactgcagttcatgttgctctgcttttattggcttctttgttctactttgtccccgtgtgtttgtgagaaatatgcagtgttttgccagtgatatgaataaaaaatattggttgaatttttgaggtgcaagcctgtaggtttgcgtctatgatatctcttgcgtttgttggaactgtatgaggtacactgcgtcctttcttgcacttaatttgtataaaacaagttatgtttagctttcatacccgatcgaactgacgaacccgttgaacgggtccatggatctcttggttttcttcactttatttgagccatctctgaagaaatgcagcataggaaacatccagagtcatgaaaaataaaattctgatttttttaagccttttgtattgcaccaaagtcttttggattggccagtgatgaaactttagtttttttagtctgaactttcccagctcttgctgctgcatatcaaaatcacatttgatgtaattgatgtctcaggaagagtccctagttctcttcctgagctcattcgattctgtactagggactcttcctagtacagaaaatatagtgtccatggaacctgttgtacggttcgtcaattcaatcaggaaatatagtgtacactatattttccgtacactatggacctgttgtacggttcgtcaattcaaccagtcatttatggaactctagccatacatacactataggcggaaatatagtgtttgacagtgatatgaatcaaaaccttggttgcttcttgcactcaatttgtaccggactagtagttcggtttactatgctgtttagctttcttgccagttattgtcctctgttttgccgatgatgaaagaacctgattgaattgacgaaccgtacgacaggtccatggatctcttggttttcttcactttgtttgaggcatatctgaagaaatgcagcataggaaatccagaagtcacaaataataatctgattatatcttttgtgggccgatgatgcaaaccttgctcctacggtctaacctgtggggaggatttgtaaagtatatttcccaagagctgaggcccctacctagttatcaaccttctttccaatttctcattttccaggtgttcacataacagttgttagtaagtcaatgccttatgtatcttttgtattgtttgtacagtggctatgatgaggaaaagattcaatgatgtattatgattactcacacattgcaatgctctgagccacaaatatactttgattttttgagtctgaacttccccagaaattgccgctgcatatcaaattcacatttgatgtaattaatgtagttagcattgcatcaaatgcacaattgcagtttttgatgtcttgtcatgttcctcactttctcccgttgtagctttcttcttaaattattaatgctagagtatacttttaggctgacgatgtgccatttatttgcatatcgggcatttgagttcaatagtatctggctttcttagttacagcaactttctgttatgtctatgtagccatagtttctttttctttcttttttggattgaccagtgatgaactgtgagttgtactgatactctggtgagttaaatgaagtgcatttgacacatgcgcgtctctgaggccttgaataagtttcaattaactctgatggatagcataccaacttgactgcattcttcacagtagtctcacttccaactctatgcatttgttcaatagttctgatagtctgatgaagctgatacatcaacaaaacactgatgataattcaatgcttaggtaccggcagcaggtaaacacttgattccttgatctgtatcgggagttattttcacggtattagagaaatatgaagtggttttttccattatccaaagtgagaacttagtcattatctaggtttgaggcacaatttactttgtttttttttccaatctgaattccccctagcgcttgtttgctcgatttcatctttgtttgtggcaatcactctgcctcgatcgcgggccgatgatgtgaaccatgctcctacggtctaaacctgtggggaggatttccaaaccatatttcccaagagctgaggccttagttatcaaccttctctctgatttcacattcttctatgctattccttgaccggttttgcaacctcatctgcaataccttctgtgtcttatgtattcgtttgcatagtgggcaaatgaaaacaaaatgaatataacctcacaatgctttgagtccccagattgatcttttgactctgaacattccccctactctgaactaatctggctttgaatgaacttctatgatatttgcactacactggccaaatttctagcacacattcttctgtgttttgtgctttcatttctatcttccttattgattgaaatgttctgattgccagtgataaaactgacacattaatgaaccactgactggtagttcagtgatctatgtataaatctcatcaattttcttcacattttgaggcatcaatgagttggctctgataccttttttctttggttttcttattggctatttggactggttttcatgcacccgactgcttatgacccatcttttggtttttgtgtgacgataatgcaaagaataacaaatgtagcctgaatagaacttctgttcatgatgatacaccaatgctgaggctccagcaggttgaaaactatcagaaagtattttttttcttgagcatttaatacgaacaattccattagggcacaatgatcagttgttatttgccattattagacttctgcatcttttgatgtgtttgtatacttgccaatgataagaagacaatgcaatgatgaacaaatgagtttaatcttgcactacaagattcccgaagttattttgaggcacacatttactttgaattttcccaggttgaattttgtgccaagctctctgcccagtttgcattgttgctttacagtaaaatagtttttcttgttatgatattaaggttttcaatgtgtgatattttaagcttcttttccatataaagatatatgatttttccttttaagccaatgatgcaacacacacagttcgagattgaaacaaattggctaattgcttatttgatatgtgtaaacttcagtttcattgaggcctacaccgacagatgattcttattccttaagttgccatattggaatttacaatgaagtgccgatgatgactatcttattgtactttttgatgaaccttgagaatttgttatcctatgtctgaggtgcttttcctatatattcgtttttttttactttctatgatgtctatataaataaaatggctttctgtcataaaaaatgaaatgcagttggtcaagtgggataataagtgtactatggctttctctcctgttcttgaccccgccagtttttggccagtgatgcatctatgcctctatctgagttccttatatctgtgattgagattgtttctgaaaggaaactaaccatatctgagttccttctatctgtgatctcttgatttctttgcaactcgtttttcctcttgaatagttatttagttggatgattttgacatatcgttattcttgtgtagtgtctgtgagaccattaatcctttgctctgatatctgtcttctccgttgtaggtgaattgcatatttttcgatatttcagcataaaacaaaggtctcaaccgaagagagttctacaccatccagcgaatacaggtgttcacatagagagctgaagaaacacaggtatcaactggaactagctggttacattgagagtcgaagagagtctccttagtaaagcttgatgctgcatttgtaaaatacatttaaatatcatgatttcatttttcttgatttttggaaataaatcttttctgtgtgttctccttatctgctaaagatagaaatttgcattcagttcagtgcaataaccattctatgatgaattgtccttagtggattctgatgaacctgatgtcattttggttcaatgagaacatgctatgacatgtctgagacaataaaatttctcagttcctgcatttgacattgtaaactggctttgagacaatggcctaagtcaacttgttttgctttagttgtcattactttgttcttgatgttatttgaggcagggatttactttgtttttgtaagtttgtaatttaccgatcacttgtgctttctgcaatctgattcctatctgctgtcttcatgttttcgctcatggtctgaccggcacagctgctatgttctcaatttctctttggcacatttaccctctctgctctttttggattgtaatcagaagtcttcatctgttgctttcattgaacaacttttgtatgtcttatggagtttggtgtcccaatgattatgataagtgctgatgaaccaaggatgcaatggtacatttcaaagaatggacttatttaacattaaaagtgacacatgaatattgaaaccaatgctgttgtttcatatggattgttgccacgcaaatggctggcattacattgtcactgtttggaggactagtgctcttcattgaaatttggaaattaaactttgaaatccggttttgccaatgatatcatctttgtaaatatacaaagataagagctctcttgtacaaggcataatgggcaattgatacttattttcgggattgtccttatgtgcaattatttgtattgcttattttgggattgttgtattagttaaatgttgatactctaattgtgatataacagatccatgtctataacatatatcatgaaaatttgtaactattttcatagctcaggaaacctctatttcttcctaaacgcagagtcacagtgattcatgcaaatgtgctttcttcctaaaccaacatctgataaaacatggtcacttagatgaaaagaattttacctgcccatattttctttttctgaagaactgaacagcaaccactgcagaattatgcccgcgatgaatccagatggttgtattgcatcacaaaccatcaatctttggcaagaacaaaaagagataaattaaattaaaatttactcctgttggccatggttggcatccatctgttaggggtcacaaccagagtaagtaacggaggggtacgaaacgcaccatacggcgaggcatgaggcacccgacggcgaggtagcagcggcggtcgccggagccgagggcgaagaggcggcgccgccgcgtcgggcggtggggggcaagagggggatcggtccgtgggatgtggtggaggcttggttgcgaggtcggaaactgcggcgcgtttgagtactcggcgcctccgactctgagagacggcggcgcacccgggaacaaggcacatggaacgtacggccgtatgggcccccttatgtgatacgctgcaggcagtccgacagggaagcagatcctcttgcttaaggatgtaactagtgcctcatcttttcccttatacttatacttatcagccaaattttaaatttttacctttaaatttggatctgattttgaggttttatcattgaagtttattttttagcatttgcatttatatcgttaagaatatacatatcttaatcttaactaattaaaatattagtattttttctttcgtcacattattttcgtccgtgttagtaaggcttccgggatgatttttcgtccatctcccgtcgtttgcatgattgcatcacgcgcaacttctctctacttgagtccgattataatttttgctggtcatccgcatcacacgcactttcccaacatcatcggactcttccaaaaatctcaaaagaaacacatacatacaaacaaatcataaaattctctccaagacatccaatccaatctctagacaaatcatgacttcaccaggcaaagaaacataagcaaaacttcaaccaaacaaatcgaggcaagaacaaaaaccgtacagatagctagagcctgcacttctccttcctccatatcatcagccacccttcccaaccttagcattgatgttccgctggtcccaccacccacgccagactggccagtcgtctcctccaagactccctccatggaaccgcctcctcctccgtggagccatcgtgctgtcctcaccatccttgccgtctccgtgccgtcttcaccgtcctccttgccatcgtggcggtctcgagctcgggggttgttcgatctggcctccgccgccctgcgcctcctcctccacctcacaggagaggagaggcctcactgcacaggagagagggccggagaggcgccagccgccgcccagggaagagggcgaggcgccagccgaagcgaggagagagggattagcactggccgccgcgcaagggagaaggagaggcgctggtgcagcgctagagggagagggagaggcgccggtatagcggtagagggggcgccggtatagcggcaaagggagaggagcgcggacacgaagggaaaggagaagtgcgaaaggataaggggaagggctcgctccactccctcgagagtagggatgaaaacggatcggaaatggacgaaaactagctttatcatattcgttttcatatttttttttcagaatcgaaaactcggatacgtaaatgaaatcgaatattatcgaatacagatacggagcgaatacgagatggaacgaatacggtagcgaatatttaccggtatataaaaaacccctcaaattgagtttattgatcaaggaagagatatcgcttattattttagttcaacatctccaacatttatatcgtcaattttgtagacggtcccacaaccctatgtgaaaattgattttcatggctattccttttagagatccatatgcaaatataattatcattttctattgccaggaccttttactagatgtataacttacttaccattgtataaattggagttgttatttattttacttcacatcttcgaaacttgtaatatttgttttatactttaaatgcttttaaatacaaatattataaactacaaagtggtagatcccgttgagctctacaactttgatatggaacacatctccatcagatgtcgtttgaattgtagatatgagattttgtaaaaattaatatggtatattataatgaatatttatactccttaaatgacctcaaataataaaataatcaataagaaagttgtagatctcatcgagctctacaatgttgatataaagtttgtctccatctgattccgtatggaaaagttatgtatatatacgtgtttttttctaaaatttgctcaatgtctgcggatatccgaaaaaaaaatacggatagtttccgactgttttccgattccgacagatagtacccttactgtattcattttcgtttccgagaaaaaaaaatccgaattcgtttctgaatccgagaatttccggatagttccgaccgaaactatccgaatcccaaaaatggtccggacggacggaaactatccgaaccactttcacccctactcgagaggataagtgcaagattttttttttgctcatctcgtgctccacgtggctcctacacacggccacgcggcttgaccggctcggctacatgagcgccggatttcagcaacacgaggccctgtttagttcacaccaaacttctcccaaactctcaactttttatccatcacatcacatccaaaacttttctactcacataaactcctaactttttttcaaactaccaactttccccaaacttctccccaatttcagaaactaaacacagccgaaatcttaagaaataatcgtagttgatgcaagccctcataaactccgaactgtcattgctggcctatatgcctgttccagtcttataatattctgtcatgctactttgttgtaaacaacatctatactaatataaaaaggaggagttcacccctccaatcctacaggtgaaatcgatatgttcaatccctaccaatcctacggtgaactcggaaacccggcccaacacgcagaatccccgacgcagcataattcattagcgcgatgacaccgtcgccgcaaaatcctccgcgctaaccccgccgccgtgccatcatccacacgatgagccaatccaccaacattgccgcacatatcctaccactgcagtgcgcctcctctcgtgaaatcactttctctcgctgcaaaccgcatcctcccaccacaaatcgcatcctcccctcgcctggtcttcctcaaccgtagtgccggcgagaggcctcctccactacactgtgctcaattctctggtgaactctgccaaacccatcacgcaaaggcgcaagggcctacttggtgtctacaagaccaagaggtaggccaaaccaagaaacccacccatcgttgcttactggaccttggatagatgagaacctcctctagaccaacggtggcattctgctctatctatgcattgcattgaaggatcctatgctttaccttcccatgtactttatgtcttcttgtgctctttgtttccacaagtgtgcaatgcaggcatgcatggaaagtgctcgatgaaatgcttactcgatggaaggacgccacacagaggtcacagctaggagttcaaca

SEQ ID NO: 22759 - DNA, 9484 bp, Oryza sativa
cttgacgtattaacgttgcatagcaatttcaaggcgtagattgaagaatatggtaacaatcactctcgctcctctaatttctcagcatctgtacacgatatcgtggatgagcaccatatccaacgatgagtaatttcgaaaggattcattgtacgactttttttctacacagtacatgcatgtgactatgagatgttttctcatgtttttttcatctttttccttacgaacttgcagagattgaaaatatactttattcatctgcatgattatttcatatgcaggatggctttcattagccataccaacaattatgtaggatgatgtgcagcaatttcacctcatccttcaaaggtaatttgttttcctcggaccctagtccattaaagctataataaagattgaaacatcagcttaagttaccggcaaagcatatgcatggttatagccttctatccgatctaatgattgtctgcttccctttatataaaggtacagagggatttcccttacccaaatgggttggaactaatcaactaattagtataacctatggaccacttcgtgcaaaattttaaattctagtttgataactgaaatagttaccctccatgtgtatttggttaattcgatgtagcaagttgtggtgtcattaagttaacctcatatttctcttccatcatttcgacaatggcatctgtacaatcttccaggtgtggacaagggtcaagatgtgcaaattatagcttgtgatggttggtttggtatagcagttagagttggacagttggtcatttatgttttgacaatggctatttgaaggaaaacaaaatgcaaattttttgctccacaaatgctgttttgttgtgtaacactgtaacctcacggatgtgggcttctttggtgaactgatattgtggcataattaatctccatgtctttgctactgaattgaagagagcaagcttgtaattgtgacatttgagttgataacctttgcttcagctatcttccaatcacaactataattatcttttatgtctgtgtacatccaacatagatcatgatattaatctaccctttatgacgatctattataacatgatcatatattagcatgcaaaccagattactattcatctatcatttagcttcctatcaacttgtctgctggaggtcacatgctagaccatttttaaattttaataaatgcttcctaatcgattggaagtcctatttgtgatattttttttcttttctaggctagaaataagatcaataagtatatatacacatgatggcatatagatgaggacttcttttgttgttgtgctgttgaatgcagagtaccatgaaattttagacaaccggttctttctttctttttagcccatgcaggagaaagagtgaagtatgacattggcccacattctagggactggagccagagtcaaaagtgattggaagatagctaaatctaaatttcaaaaaatttgcaacatgaatgctatattttaagtattaccacatgtttcattatgttattatagctaaaatacatctattatataacactggtttcactcatttatatggttatttgctgttcacacagaagatgcacagttgaaataaatgcccctacatggatatgaaaatttgctttgtcctcctttatggttcataaggtcatgtttacagaatatgtccactaggtcatgtgtacataatatgtccattgagagttgcattttcagtatgcatgtatggaggaataatagatcaatatgctaatgttgtaacactccatgtaggggcatttggacctcggagaaccaaattaatgtgtgccatatttaccacatcaattgaaaatccagaaaatgcacaagtttcttgggaatttagactttcaattaatgtgtttatgtttactctcatggggcatgtttgttgtttcctttttaggattcactgatgtgaatgatttgaaatcaacttaggaattatggtttttgttttgatttagctgaagataagtgtaatcttaggcttgaggtcatcttttgacccatgtagtaagcagacagtatgttgatgaaaaagtcgaacacactggcctgggagatctgcttaacttctgtgcaggtccaaagattgatgagatgcgggcgtgccagtcagtttgatcctgcaactgacaagttatgtaaacaacagataaaactgccgatcggctaacaagccgatgtagtgattccagctgatgacgataccggccgatagcgatagggtttaagcaatcggctatatgtccaatgtagatgatgatatacaggcaatcggctgatgtaataaaataacaatataatcgagtagaaaccaatcggctagaaacaatatataataagcactgatccgaatggttaaagcacacatcggttggaggtccgatgtcatgaaatccacgagattagattaaacagtgaaacctttgttgtcatcggctaaatccaacttatatgtatatgcaatccttgtgagccgatgcaacgtccaaataactcatcggctgaaaccccgatgaaacccttattggcaatcaagaagcaggctagagattatggttgtaagcatgacttagtagatcaaacttaactgatgcagcactaagtatgaaaagaaacataatatctagacaatcaagccgttgactgagttttcagggtggtagatgtctaagctaatctaatctagcaacgcgatttagccgataccggcagaaaccctaaaacaagaagcagccgatagagctaaattgatatgctaagactagattaacaaagacatgataaataggtagacaaatatatcatccaaaccagagtaatctaagaggtcgaatgtactgatgcagctttgaacgacgccgacgtagacgatacaactgcctaggccggcggaacattggacttaccccttagccggagatcaaacaccgatgcagccccgcgtcaggtgccaagtcccgccggacgataaaataaagtagaaaaggtaaaaggtggcgatgcgccgaattgtattgatcgttaagatagattacatagaccccgagtgtacatatttatacctatgggttgatacaagtccttgtcggacaagaaagaaactttcctaaagataaaaggaaaagataaagtccttataggacactaaacacacttttctaaagataaaaggaaactaacaaactattcctaattaatagataacttgctatgccgcattctctttgaactcggtctcttctagataagcttcctttagtagatcaatttccttaaccgaatatagcaagaatccgacaactgacgacttgacaactctcatcagctaatctcaggacttcgaagccgatgctgactctaagccgatgactactccgggcttaccaaatttcaatgttaacacagtataatcagtcttttttttaatttattctcttgtgtgtgcttccatatatatgatgtaggtgttgtttcttttttctgcaccaaacagtcatattctattcttttctcttgaaacatatagcttggctcatagcctgccatctgttggaactatgttacactggtgttaattttctgatctagagtcatcttgatgaaacacaagacataagggtgtgtttggataatgggaaatagagggtgggattgggattgggaaatgaatgaagggttaggattaaatagaagagagagaatgaacggttaggatttaaagatatcttttgatgggtggtaaatcatttccctttcccattagccaaacattacctaaaagttgattacttgttttttttacatgctaatatataaaagaagaatgtgcattgcacgtgcatgattactagtttaagtagtaaaggtgaagttgttttgttgagattcatgtaccattaaagattcgttacgttaacacattaatttttcgtcagtgtcctaaaaaaatccctcatccacaacatccgagatgagagtacaagataaaaagaaaatcatccagagtccgcagcaacaaccaaatgcacaagcgattcagcgaaaattcattgcaaacatagatacaaaatccaataggacaatcaagcaaaagaggaaaaaaaataaaaacatcaccggaagccgccgccaccttcgtagccgtcggattcgatgcaggaagcagccgccgccgccgccacgcacgtagccatcgtcgctgtcggatccaccgcgggaagtcgtcagcaccgtcgtcaccgtcggatccaccgcgggaagccgtctctaccgcctcgggccacgggaagcgaccggcgccgttggtgctgccggatctacccgcaggaagccgccatactaagaggcgccaccaagaggggaggagagggggagagggagtagcagagagggggcggcagaggaggagcggcaccactggtcgggagaggggaagggagggggagaggcaccaccaggaggggtggggaggggtgcggcggaggaggagcgacgccgctggtcgggacaggggaggggaggaggagaggcgccaccggtcggggaggggccgagcggaaggtggagctcacggtcgggtgaaggtgtgattagggttagagtgttgatggatttagaatcaatctgagctgtccatcaaaacgaatggctcatatcgatcccgcatcgggccggcctccatatcgggccacagcaccacacgcgcttcatgtgctggacgcgtaatagcaggctgatagggtctaatgggccttttttttacaacttattttatttctataaggaatttttttaatggctcatatcataaaaaactaaatcctaatcatctaataattttatatttgttataattttagtttacccgttgcacacaggtatttacttattaaaattgtttacataataaaaaaattcttgacatgtcccctctgctcttttttttctatgtccttatctgctcttttttcaattattatttccctcattgtctaatcttctttcatttttatgtctacttattaatatttgacctcaaatacaatttgtaaatcaaaaacaatacttactctcacaaaattaataagatttattaaactccacacattttcctcagataacaatacacaggtatattcccacaatgcaaagtgggtatagtttaactggataggtttcttatggtggaaccagtcaacctggattcaaatatttgatttgacatgggtgctcgaggcattcgtggtaacgtcgtcaatctcaatgttcacattgtgagcgcgtttatactatgtgtttctaaaaaaatttatattctcgcaattcaaaatacattgagtatgaaaattccactcgtatattattacacttacctacataaaaaatacatattttcattcatgatacaaatttccatccgtcgccttttgggcaaagacaatcgcattgttcgtccatccattttctctcgtgctacgaatcatccaaactaacacatcatatatattccgcaaatatatagcagattatttatcggacatatctaaaccaaacaacacttcttgtcactgtacacactccgtaatcaccaggtgcaacgcacgggcacttttgctagtgtgtgtgtgtgtgtgtgtgtgtgtgtatatatatatatatatatatatatatatatatatatatatatatatatatatatatatatatatatatattcttgtaaataggttcaacatgctcaaagattagtgatagattaatatgattttttaaagcaactttcctatagaaactttttgcaaaaaacgcacagtttaatagtttgggaagcgtccgtacggaaaacgaaacaacatctccctttctccagctgccggtagttgatatacggcatgtgaagacatgagcgcctcattgtcatgacattgatgaaactatttgtgaaagaaagttaaaaaactaaacaaatattttagaatttggcggctggatgttttgggtggtgtccgataaaggctagtgtcgtccctggtaaggaccgagccatgaagttaagcatggaacgatcctagtacgaccgtacttctcgtatgggtataaatctagcagagtaaatagctgcgcggaggcggtacccaagaagtggtggtttcatttagatgtgtgaataggcggagagcctacgatggataagcatatgtgggcaaccaaattaaaacctaacttaactataacttaacgcatgtgtgagttttcccttcccagtaacactagaactcctctcactgctagaaactgtgtatgcctgcatgagggatcaagttcatggagcaagtactgccaaagtgaggttattgaaatgctttgctgtgacgcgtctcattcgttgggacttcggatcatgtgttgggcaagtcacgaagtatgggtaaaatgtacatccactacagtttgagtaaaccaatctatttgaaaagccgtgctcgcagatattgagcaccgggacatgtattacacttggctagactcttaacttttaaaatgatgaaacggatgttgcatgatgattttgtactagtagatcaacttctcgggaagcgagaaggggtaaccccagaaaaccatgatgactcagtggcggaaagctatccttaaaaacacaatagatggtggacagaatgtcgctgattaatgaacaatggaactaaaacttgattagtctatgctttcttaggcttatgaaaagaattgcaaaattggtggtggtggcttgaatatcttccatatgcattgttgttgcagtgacttgttgagtacgaacggttggtattcaccctttctatttacaaattaatcaggagtactatcaggaggttgccgaagatgatagcgttcagtaggtcttagatacggtcgttgcctgtgacaataacaataccgctgcattaattctgctgccttaccttaattctgcttttgaatacattccaaactatttggttctatgttccagtctatgcctgtgggctctatgatgtaataaatcgcgcaagacactttatgtatgtgcacttgacaaaatcagctatgtaatcgtgagtatcagactactattaacatgaatgattcttgttataaaaacaggggtcgtcaccactattcctttttcttgggtcttttttccatattacaaacttaatagctgacatccttttctttcaaaatctggtcagaagcaagccgttgatcctttacgcacaagagaggaaactcactaggtatggatggagatcgttggaaaacagtgtagttataatattgtgaaacctggtaactaagcagcagctaattggatcaaattaccatgttagtggcaaggcaaagtctacgttgttccattgcatgtagcatatacactaaaacagagatgcacgagaagggtttttgcataataaaccatttttcatgacctacagagagaacagacatgaaaacaagtacttactcacagtttactacacctgtagcaagagataaaataatcatatcatggttattttgatctgtctaaacctcatcgagtaagggtcgatcctgaactgcaaacttgattatgaagtttcaggaataagtacatgaatgtcttcaggttgccagaaaaccgtacatagattgcaacagcataggacaataagtgcaaaatattggatcatgacaatgacatggcacaaatcgttgggataggatattctcagtaaccagcagtaaaaaaataaaatggcacttcctgttcctaaccttttctctttttttatctgaatttaaattaggaatacatgaaaaacttcacatccaggacagagttgcaaggatgatacaattacaaatgcacataaagtactacgtttggatccagatccaaattcaagataaatacaggatatgactggtaatctagcattgaaccatgaccaacatatatgtcctcaatacaacaggcaattcaaaattgaacaataattaacagacttcttttcaaataaaacgaaaggcagaaccattaaaagctatctgcaatctttcccttcagcaacagtaagataccagcatgggagcaacgttgaatgaggctaaatcctcagcaaagcacaaccagaaatgctccctcgacaatgtgtcattggtgatcctggtagccaggttggtctctcactagtaacattcaagatatcaacatcagatagtggcttgatgcactgatttcttggcccaggtccaattactccaccaaccagatatatgttgtctcccaaaccaatcatcccaaaacctatcctgctttggaattcagatgcacacgacaccatcttatcagggaaattcacaccacgctgcttcataatgcaactattgctcagcacataaagctccccacgaaccattgccatcggaccttgcagccaagagtagtcctcaacagcccaagcattgccatcttcaagaatctgcactgttggtaggcctttgtgcaatacatgcatcttaccctttatgacaagtccagagcatgcagagctgtgtgcttgacgtaggtcagggagaggctcccacgtgtcagcttcagggttataaatctcagcctttgatattgatttgcggcaatttgtgaagcccccagcaacaattatgttcccatccagtgcacaacaggcaaacattgcgcgagctacaagcattggagccctctggacccataaacgacagagaggatcataagaccaaacctcattgcttgcaaagatcctgtcatggtctccagtaagtgggtcaactcgatcactgccaccaccaattacatagagcttgcctgcaaccgaggccactccaaaacgagcaatattcctaatctgagatggcatgacaggaagggttatccacttatctcgaagagggtcataaagctgccacatgttttcaggttcaaatgctaacacacataacaggtcttcagtcgcactaatctgattcctaactttggaaagctcaccatttcgaacagatgctctccaagaatggcagaccatttgaagaacaggatgggacaaaaatggcacccgtgcaaggcactgaagagcaacttcattagggagaccatcaattagtgttgacatcattgagcactcaaagatatgatctcattatacagcaagaaagtcgcaagactgagcctgaaaaataatcaatatatgaagttatgattaccgtacatgaaaaactgccaggattttcaaataaatgatcagagtttcatcttaaagatatcattcaaactgatactcaatgaaaaatgatatgatgcaaacaaaagcagcactcaaacttgaaaccaacacataacaaacaattaaggcaac

SEQ ID NO: 22760 - DNA, 25978 bp, Oryza sativa
tcctgcaccccaacatgatgcatccagtctcatgattgtctacctagcccacagtagaggtagcaatatatatgtgggaggtctcttccaaaatatatttttaccaaaagtagtttattttatttggaagtaagttataatgcctaaggatagaagggattttattccagtaaacatgaaagccaatatcaaccatgacacttaatatgcatctaatatgttcttcaaatttctgactgtgaatgcaatatatgatgacaaacaacaacatggcatcaggggaaaagattagccaattgattatgtacaaaagttgatgaagtggcattgtacttctttaaaactcaatggattttcactcatgttccatatatatcctctaagacaaattggtgttcggtcatctccatttgacgaggaaaagcagatagcatataggttacactatcaataggcattcatccacagtatttctttcagtggccactaagttatactatgaaggaaaacagtgcattaaagaatcagaataaggtcattttgcgtcaaagttttcaacttttcactgaacatatcaaattacaataaatagaataaatatatgcataaacgaaacagaaagcgtgtaatctaaaaggcccactaaaatttggcattctcccacatttcatatccgttactaacatgaaattagaaacaaactaaaccgaaaagaatccaagatagggcaataaaagattgataagaaggaagatttctcgataaataaggaagagggtaaattacagttggtgtacccacaatactagttacatttttcagatagagaatataagctaggtataaagaaactaagaaataaggtcaggtagtacagatacaaaagcaataagaattaggaaatgaattgcatagcatcttccagaatggttctttcttcgtaacaaccaaggatttttgacatggatagattactaagagactatcctagtacacagttacagacaaatcaccggaaattgaaaagtgcaaggtgttccaaaccagggggcggatccaacttgggacatgggggttcacaaacatttcggggaacaaacaaactgttacttgtattaaggttaaggctctgaaattaagggaagagcttcttccagatctagaatagaagctagggttaacgaacgaacgaacgcaagcaaattccagtcccgatgggagagagagagagatgaatcagaaagaggctcaccaggatcccctcccctcccctgctctgctcgccagatggagatcgccgcccccgactcgtctcttggcggcgcaaggagcggaggagacgaagagacgggagattttcttttcttttacgccacaaagggaaggggaagacgctgcctatttctttcgtgcgtgtcctgctcttactcacaagtctctctatagccttatgttatgtatatgcaaaatcatcctgggcccactagctagctgaagcatatcctggccttttcttttctcatttagactaaaatctaccataaacaattctattttatacatgtaactttattcgtataaagtttacatatactaactttatttacatagtaattttcagtaacattttatatgtaaactttacacaggtaaacttttcacatgtaaagtttatatatgatttaaaattccttctctaaataatagagaaaaatattcaaagataaattttgctgttgtgttatgattcaaaaatgaatacatattttgtgatcacaaaataataacaaactagaataaaaaataatttcacaaaagaaataataaaagtaaaaacaaaaatgaatgcatacgatgtggaggcattattgcgagtgaatttgttactttcgaatgagcatatgtggaaggctatgagtaaatgaaaaactccacgaagtaaatttgttacttttgaaacgtgcggagatactagaaaaacggaaaactcagaaagaaaagctagacggtaaatattttactaaaatgcgaaaacagaaaaactatatagaaggaatgaataacagaaaaatcaggatggttaatattttgccgggccattgatgaatcacggatgagatggaaaagagaaaaaagaaacacagaaggtgaggtggtaaaaaaaaatgaaaaaaaacgaaccgggtaggatgcggaagaaaggtggggtggcaaaaaaagggaaaaccggaaggagagggcgttgtgtggcgctcgaactattattccgcgctgtagcgcgcggaatgtaaaataaaaggtgtttttgattattattctgtgatgaacaattagcattggagattattggtgttgatatttggaatttatttgtaaagtggttttggagatgattgaaatttacaggtgattgacagggactgctgtctgttgggtccggtcagaccggcgcagcccacggtctcaccggccgactctgtgtcggtttcggtttcgggttgtttgtttggatatccgtgattgtttcatgattgtggcttctagatggatactatacgtatgtaatactgttgtttgttaacaatgagtcaagttggggatagcttgatctcggaatatggtttctttgttctttctatgtgtaggtcactcgagatgccgggagagtatttgcggcgatggaccgggagtcggcttggggataagacgaagtccgtggtggtcagagatcatgcgggatactaaggctagagttcaatgcacgtggttggtgaagtttccatatggcatacgatggatgtattctgtgcgtatggaatgcggagttgaatttggaaggagtccaaatttggtatgattggttatgtaaagtttatttcttgtacgagaaggtttcctatgaggattaggacttctagtatgagtttggttcgtggctttaggctgcctacctcatgtataaatagacagggagcgtgaggctttccggtatcgcttttgagagcaattgagttgatagttgagttagggtttcgagtttagtcaagatttttgtaaggagtgttgttggtgcacttcgtaaacacagagagaatcaataaagttgtcatccactttaagagttcttcgatttatgtttcatcgggtttcagcggtctaaccggcgacacaccggcggtcagaccggcggcatcgcggcggtccgaccagcggcattagggcgatcagaccggcggcggcagtagacgacaggagctgatccaggcggtcagaccggagttactacctctgtcagaccggaggtattcaggcagtcagaccggtgcaattacttcggtcagaccgcgatccatcgaatttgagggtaacttttatttccgctaaaaattttggtttttgggtatatcaaccattcacccccctcctctggttggcttagttattgtgattcgatcctacaagtggtatcagagccttgttttctcctttggattttaaccgatctagagtttttgccatggctgctaagttttcaactaagccttatgttttcaatggaacggatttttctcattggtgtaataggatgcaatcttacattatggctgaggattatgatatttggagaaaagtttctcatccttatgtggtccctgaacgaattaatattgctgctttaaaaactgattttgaacaaaatagcaaagctcacaatattcttttgagtgggatttctcgttcggattatgattgtgtttctcatcttcaaactgcccatgagatttggattgctttgagtaattttcatcaaggaacaaataatattaaagagcttcatcgagatcttttcaaaaaggagtacattaaatttaagatgaaacctggaaaagctttggatgactgtctttctaggtttaacaaaattttgagtgatcttagtctgttgattcttcttatgatgctaattatacacaatctgagatttctcgccactttttgaatggtcttgacatgtctatttgggagatgaaagttacatctattcaggagtatgttgatatgtctactttgactttggatttgctttacacaaaactgaaaacacatgagatgaatattctttctcgtaaagttgattctaagttgagtgctttggtttcttcctcaacttctttggatgttgattcttcttcatcgaagtcttccgtatttgctttgtttaatgccatgtccgatgatcaactcgaatagatcgaggaggaggacttggttttgttatctaacaaactttctcgagctatgactaatgttaggtacaggaaaagaggtggaccaaatcgttgctttgaatgtggttctacagatcactttcgttcgcgatgtcctaagcttgggagagcaaggagggaagataatggtgatgagaagaccaatgacaagaagccgaagggtactttcaaagggaggaagatcaaggagactctcaataaggcttttgatcaagtctacgctgcgtttaagccactaagcgatgtagatggtgatagtagagatgaagataagggaaagaacatctccagtgtttgcttcatggcgtgtggtgaatcggattcagggtgtgaagacaatgaggtacatacttttgaggaagctattcttattttaagtgcaaaaaataagaagtgcgagaagatgtatagaaaataggaatttttcattgaatctcttaattatgaaattgttagattaaattctcttattcctaatgatgatgattacaaaaattgtgaggttttaatgaatgagatttcaaaaattagaggtgtcaatgctgcacatgatttgaaaaataagtcttctctggctcttggatttgctttgcacacacacactttggatgagttgtttttaactaaaaagttgttgcaaaaatatcaaattgcttttcatgctagtttgatgtttaacatgatttgtgctaaaaagttaaaacaaccacatgatgttttggattgctcaacatgcacattaaacaagattaaactaaaagatgttttaggtcgtgttgagtacatggaagatgttgtgaaaaacaatgaagtgctttcttgccccaaatatcgtaaaagcaaaggtgtcatggtagattgtgaaaattgtgctaatttggaaaaagaggtttcttatttgaaaagttctttgcaaagattttatgaaggtaagaaacaacttaacatgattttggatcaatctaaagtgactagttacaataggggtgttggttttgatgttcatgattatttcaccaaaaatcaaccaaatgttttgagtggatcaatctaaagtgactagttacaatagtggtgttggtttagatgttcatgattatttcacaaaaaatcaaccaaatgttttgagtatgactgaacgtggtgaaatttatacaaaaccaagtgaaaagaaaacagtttttaaatctgctggaattttgccttctctttctgcaacactaaaagtaacaaaaacaaatctttcaaaaccatcttcttctaaagaaaagtatacttgttcttttttggcaaagatgacatattgttggtttttgtttcagattggctcataaacaaaaaaggagagagaaattgcttttacaaaattaaagtggcaaaaatctggttttccctcgaggaaaccggtctgaccgcagtgggtcccgcggtcagaccggctactgagcggcggtcagactggcttcggtcagaccgacggtatagcagcggtcagaccggcccccggttagactggctgtactcggcggtctcaaattgtttttgcacgtggatatatgcctattggatctactggtcgtgtgtcttagtactggattcctaaatttttattatcatctaaccccagtactgaggcttcgacttctgcttgtgtgtacgctttggtggcaaggaaggagaacgtgtggatcgtggattccggttgttcgcggcacatgaccggtgataaaaattggttctcctccctcaaaaaggcatctaagactgaatcgattatctttggtgatgcttctacgagtgttgttctcgctaaaggtttggttaaggtaaatgagaaatttgaattgaagaatgtagctttggttgaggactaaaagtataatttgctttcagtttcacaaattgttgatgaagattttgaggttcactttaagaaaactggaagtaaagtttttgattcttgtggtgattctgtgctgaatatttctcgctatggaagagtgtttaaagctgattttgataatcatgtttcacctgcgataacatgtttggttgctaagtttgataaagatgtgatgttttggcatcgtagacttggacatgttggttttgatcatctcactaggctaagtggtttggatcttgttcgtggtttgcctaaacttaagaaagatcttgatttggtttgtacaccgtgtcgtcatgctaagatggttgcttcttcacatgctcctattgtttttgtgatggtggatgcactgggacagctattacatatggacattgttgatccagctagagtgcaatctgttggaggaaagtggtatgtgttggttattgttgacgatttttcttcatattcttgggttttcttcatggcaactaaggacgaagcttttcaacactttcgtggtttgtttcttcgattggatcttgaatttcctggttctttgaaaagaatccgaagtgataatggtggtgagtttaaaaatgcttcatttgaacaattttgcaacgaaagaggtcttgaacacgaattttcttctcctcgtgttccgcaacaaaatggtgtttttgaaagaaagaatcatgttttggttgagatggctagaacgatgttggatgagtatcacactcctagaaaattttgggcggaggcggctaacaccgcatgctatatttcaaatcgggttttcttgaggtcaaaacttggaaaaacttcttatgagcttcgatttggatgtcaacccaaagtttcacattttgcgtgtttttggtgcaaatgctttgtcttgaaatctggaaatttggacaagtttgaggcacgttctatcgatataatgtttcttggttaccctacacattctcatggctatcatgtacttattttggagactaacaaaattgttgagacttgcgaagtttcttttgatgaggctagtccaggtactagactcgatattacaggtacattgtcacaggttcagggggaggatagttgtatttttgaagacgatagcgacgacgatgacgacaaggtcggctcggccggtcagaccgggcgccaggccggtcagaccgcaagcacacctccgggcagaccgcctcaggacgagcggtcaaaccggccagggtcgtcaggttcgggttctgttgacgctgatcgagattgtcctccagaggctacaacttcgaccagtactggtacagaacgtgaaacaactttagaagtcgctgctactttgcatattcaacgacgacatccaccggaacaaataattggtaatctaagtgagcggaccactaggtctaagataacgactcatgatgtttgtgcaaattctgcatttgttgcttcttttgaacccaaagatgtgtcacatgcattaattgatgaatcatggattaacgccatgcatgaagaacttgaaaattttaagagaaataaagtttggactttagttgaatcaccttctggacataatattattggaaccaagtgggttttcaaaaataaacaaaatgaggatggtttgattgtgagaaataaagctagacttgttgctcaaggttttacccaggtggagggtttggattttggtgaaacttttgatcctgttgctagaattgaggcaattagacttttgttggcttttgctgcttcaaaaggttttaaattgtatcaaatggatgtgaaaagtgattttctaaatggttttatacaggaggaagtttatgtcaaataaccaccaggttttgaaaatcttgattttcccaaccatgtttttaaattgtctaaagctttgtatggtttgaaacaagcacctagagcatggtatgatagacttaagaactttttgcttgcgaaaggttgacaaaacgcattttgtttttaagcatggtgataatcaactgttcattcagatttatgtggaagatatcatctttagttgttcaactcacgctttggttgtggagtttgctgagactgtgcccaaggaatttgagatgagcatgatgggtgagttatcgtactttttaggattgtaaattaagcaaacacctcaaggtacatttgtgcatcaaacgaagtacacaaagaatcttttgagacggtttaagatggagaattgcaagccaatttcaacaccaattggttctacaactgtgttggatcctattgaagatagtgaagctgttgatcaaaaggagtatagtagtatgattggatctttgttgtatctaactgtttctaggccagacatacaatttgctgtgtgtttgtgtgcacgctttcagcttctcctggtgcttcacatcgtcaagcggtcaagcgaataatgaggtatttgaatcatacacttgagtttggaatttggtattctacttcatcttctatatgcttgagtagatattccaatgctgattttgctggttgtagaattgatacgaaaagtactagtggaacatgccattttcttggtacatcattgattgcatggtcttgtaggaaacaatctagtgttgctcaatcaattgctgaatctgaatatgttgctgctgctaattgttgttcacagattctttggcttatttcaactttgaaagattatgatcttacttttgagaaagtacctctcttttgtgataatactagtgctattaacattgctaaaaatcctgttcaacactcacgcacaaagcacattgatattcgttttcactttttgagggatcatattgagaaatgagatgttgaattgcagtttttggacactaaattgcaacttattgatattttcactaaacctttggattctaatcgttttgcttttcttcgtggtgaattgggaataattcatcattttggcatgatttaagggggagttttgcacctcatggttttatcaagcaaaaatatgacaatgagaaaaattgaaaaaagagagctttgttctatacatatggcattttcttgtgcatgctagcaatactatgaaggtttatttgtctctagcatagcttgtatgtattctagtctttttgtgagacttagattttgcttttaagggagatgatgcatgacacttaaattttacttgaattaagcaaatatgcaatgttgatgctagcatatggtttgatttataaatgctttatacatatgctttattgaattgttattcctcaaatagcttgtaattgctcattgtgaaaagagaataaaattatgaaaaaatgaatattgaatccttggaaacagtcttgacgacaaggacgtattcgatgtgagcaaaataatgggtgtcgaatccctggaaacagtcttgatgacagggacgtacccgaaataaaagagaaaaatatgagcaaacatgctctagaaaaagaaaaaaaaattctcttagttgttttgtgcaaaagctagtttgagaaagagtgatagatgcaataggtatatgtgtttagtgtttatttttcaacctatgtgcttgtaaagatgttgcattataaatcgtatgaaatcatgaattttgattgttgattcaagcttaattgtaaaatctttggttcatatttatactttaatgcatgcttgttatattattgatgggttcatcttctttttattacaacacatgacatgatatgctatatgtatgctaagctcctgaacattaatgaacataattcctatgcttgatgaaatcattgtcaaaagggagagaagagaagaaattttttgaaaaagttgagagttgagaagagcatgtttttgttcgattgagaatttctttcttttcaaaagtgagagaagttttcttttggattttcaagcacgatgtgtacatttgtacgaagtgtgctttttaccacttttgttttattttttccaaacactaaaatatttttgatgggtttgccaatgtgttcattgagggggagattgtaaaatcaaaggtgtttttgattattattctgtgatgaacaattggcattggagattattggttttgatatttggaatttatttgcaaagtggttttggagatgattggaatttacatcggattaacagggactgctgtctgttggatccggtcagaccgggcatgtgtcgccggccagaccgacatgtattgcgcggtcagaccagcgcagcccacggtctgaccggccgactctgtgtcggtttcggtttcgggttgtttgtttggatatccgtgattgtgatgaaccctgagttcctttcgacactcaaggcagttgtttggcccaatctttcggagagttgatgataactacgatttgagagaaacgttgacgacccaactacaatcgtacaagacgttgtgttgcgcctttgcgatcgatacacctctctgtgggttgttgatcttgccggtgcagatcaaccttattcctgcaagcaaatcgaagaaacaagcaagaacaagataaaatcaatctgaattgcaaataggaatgaatacacataataagttggggtttcgaatacaagcagatggacgggctagccgacatgcgcgctgcaaggaagtagcaatggctaaactttcatctaaacaaaacccaagaaactctaaaggggtacctagctaattataatggtgggaggacgaccaaagggaccctagggtcgtgatccacctggttggggcgcaccccacatgggccccacttgggccggggtcccagatgaagttacatgcctataggcccatgacaggtgacgcagctccttgtttctttgattgcggccaactgagatggagtttggtgataaggctggatccgttggaaggaggactccgaaacctttccatcaagtactcacgggcccaaaacggagctcgaatgcaaatttggcggctgtttgaagtcaacagtgtagtaggtggccgaatcggattccaacacttggaggacttgatcttgatatcatcttgttcatccatgatgtgagcaatggttgtatctgtagtagccatggtcacatcatcctccccttctttacggaaaaccgtcctcggtttttccatatggttctcatcgcgtggtcgatttaaaacaatctgttttatccaatcaaaacaagagaaactcgaagtaatatgattagaaataacgtgtcactcttgcttgcatgttttatccacatgtacaggaggttctaaatccgaacagatgtaaactctatgcaccaaatatattcctctatcattacattggccaaagatgtgaaaaataacattacgaggacttggcaaatcagaatgagcaaatattttgtccttcaaataattgagctcacaagaatcatcaaacagaatatagcccaatgtatttaaagaagattgcaattgaagttcatcattctcgatggacgtgtgaataacatgcttaaattcagtacatggagaatcaagattaaaagtggcatgttgattcactagttgtggaatggatataagtgaagtactatcgcataactcttctttatcacgaggaacaaaatgcaaatcaacttgtgacaaagacaattcagaagtaggttccattaaaatttgctctaggtcggcatggaaagtggaaaaatgtaattcatcagaagcatactcaccttgagtaatttctgcaccatttaatttatcttttatgcactcttcagataatgtaggtgcatcagccttctcttcattcgcgagtgatggaagtgacatctcaaacatatcgttcttctcattttggggactgttctgaacttcctgcaaaacatcagtgataggaggcacaagcatagcttgttgctccgttgggttctccaaaattttgcgctcaacattgcaagcaagcatgaacaattggcctatatgattatatgtcacattaataagcccagcctaaatatcagaattaagccctctaaaaaatctagtcattgtgttctcattgctttcttttaaaccactataagtgatacaaattttaaagttatgaaagtactcccgcacggttttgtcaccttgttttagatgttctaatttctcaaggagagtacgtttataatatgaaaacacaaaatttttcctcatcattgttttgcattcatcccaagtttcaagcttattgccaacagtgtaccaccaaaaagatgcagaaccggtacatttattagtagcagccttaatcatttgagcattagagaaatcatactcatcaaattgtttgtctactgctagctcccaattaacataagcggcggaatcatacttaccatcaaacactggcaatttagattctacccttgcaagatcattatcatatacctcatatgtgatgcgtgaagaagtcgctatatcttgttgatggtgaagatgttgatgttgagcatgaccatctcgtttccccttgcacaatcctgccatggttagtagcaaataagaaacatacacaagaatatgcacgctcctatcaactactaggtagtgacagctgaaatatcacacacactcaagcttttcaccaagctcttacaagttcttaccaaagcaagtggaatggtgacgtacaccgactcaaccaagcaccccaatggagtttggatgtatcgatgccttggcaaacacttgctgtacagctgcaatcaaatctatggagctctgggtaggcttaaatatatagcaaaggaatagcaaatgctcaatccaaagaatgcaaagttgattgatcgttcaaagtcaagtaccgtgctggtccaaggctagaatgtaatagagacgcgagcctagatacaaacagtaccacaatataacaccagaaacaactcaagcacactcttaatatatgaaaccaaactgattttttttgccttctttctttctttctttctttctttctcttttttttttattttctttcttttccttcttttttttctttttttgtgtggcttttcttttatctttttttatgcacctttctgccttttcttctctcctttttttttattttttttaacaaaaaccgactcaaggatcttaatgtaagattacagggactcaaatataaatactaaaattacagggactcaaatgcaaacccaaaattagaactatacaaaaatgaaatgctctcgttgcataggttccgtttttgcaaacatatcttcaatccgacgcacgaaaaattttcacccaagtgtatgggatgtcacggtatagctgtgagggagggaatcggactcagaaatctcggcctggtggtggtgggcggcaaaggaaggacacggcacacggagttcgaataaaaggaaaaatctcatgcaaggaaaccgaatccggttcaaatagaaaccgatccaatctactaccaaaaaccgatctaatctaatctcctccttccttcttcctcacgcacaacatcacatgcgcaccataacggatacaaccacggcacagccatcgaacagaaaccttagatgcaactcaagaactcaaaaactaaccgacagaaacttctgaaaactacaaaaatagaaccatggcagcgagccgattccgttttcgtaggtcccgacgacaacagagacacggaggcaacaacaactgtggtacaaaacgtgaccagaactcgaaattctaaacgaactagacgctaagaccagcaacacgacgtgacaatgcaacaaaaattcaacaaagcaaaaactgcatagaacaatgcaatggcacaaatgtggctaggtaatgtatgaaaatttttttttggctattttctggttataggtaaatgaaaactcaccgagcaacgaaagctctgataccacctgacgaaccctgagctcctttcgacactcaaggcagttgtttggcccgatctttcgaagagttgatgataactacgatttgagagaaacgttgacaacccgactacaatcgtacaagacgttgtgttgcgcctttgcgattgatacacctctctgtgggttgttgatcttaccggtgggttgttaatcttaccggtgcagatcaaccttattcctgcaagcaaatcgaagaaacaagcaagaacaagataaaatcaatctgaattgcaaataagaatgaatacacacaataagttggggtttcgaatacaagcagacggacggtctagccgacacacgcgctgcaaggaagtagcaatggctaaactttcatctaaacaaaacccaagaaactctataggggtacctagttaattataattgtgagaggacgaccaaagggaatctagggtcatgatccacctggttggggcgcaccccacatgggccccacttgggccggggtcccagacgaagttacatgcccataggcccatgacaggtgacgcagctccttgtttctttgattgcggccaactgagatggagtttggtgatgaggctggatccgttggaaggactccgaaacctttccatcaagtactcacgggcccaaaacggagctcggatgcaaatttggcggccgtttgaagtcaacagtgtagcaggtggccgaatcgaattccagcacttggaggacttgatcttgatataatcttgttcatccatgatgtgagcaatggttgtatctatagtagccatggtcatattagattgtttcatgattatggcttctagatggataccatacgtatgtaatactgttgtttgctaacaatgagtcaagttggggatagcttggtctatgtgtaggtgactcgagatgccgggagagtatttgcggtgatggaccgggagttggcttggggataagacgacgttcatggtggtcagagatcatgcgggatactaaggttagagttcaatacacgtggttggtgaagtttccatatggcatacgatggaggtattgtgtgcgtatgggatgcagagtcgaatttggaaggagtccaaatttggtatgattggttatgtaaagtttgtttcttgtacgagaaggtttcctatggggattaggacttctagtatgagtttggttcgtagctttaggctgcctacctcatgtataaatagacagggagtgtgaggcttcccggtatcgctttcgagagcaattgagttgatagttgagttagggtttcgagcttactcgagttttttgtttggagtgatgttggtgcactttgtaaacacagagagaatcaataaagtcgtcatccactttaagagttattcaatttgtgtttcatcggctttcggcggtctaaccggcggcacaccggcggtcagaccagcggcgtaagggcggtcagaccggcggcggcggcagacgacaggagctgatccaggcggtgagaccggagttactacctctgtcagactggaggtattcaggcggtcagaccggtgcaattacttcggtcagaccgcgatccgtcgaatttgacggtgacttttatttccgctaaaagtttaggtttttggatataccaaccattcaccccctctggttggcttagttattgtgattcgatcctacacggaatagtgctaccgctaaattatttggtttggaagacaaacttcaaagtaatttaaatgacatgtaatttaaaatggtgggatcgggatagctctgtcatcacacggggaaaactattttgatatctagagacttgaggggacatcccctcatttatttaaaaactatccggacggttatgagaaaatccaaaaaatttatcaacacacacataaaaatgttatataagttgtatcaaaagtcaactcacacatcgacatatagcgaaacaaattcagcgtataaatagtaaaaatactgttcaaatctgaattgtttttttctcagtgtgtatgtcgaatttaaacttgatttttggtggactgagtactgtcaattgtttttaaaactttccacgtctgtttgtactgaatttaaaagaaaaagatacatgaggagacatctcctataggtcttgtttggttaatcccccgagagagagactgaaggggatttatttcacatctattatgtggaattattttttctcgatcttctctaattctctgtaatccttttcaaaccgaacaagacagaagggattaaattcccctccccgtcaaacgccgcagcgcgcttcacatcacgacggcgagcagcagcagcaccacccaagccgcagataggaagacggagggcgtcagcgccgccgccgaggaccgcgacgccgttggtgacagcgacgacgactaccgcaaggaggacgacggtgtctcgaagtcgaacgtaagcgtgttctcgtcgaggtcgtacgccatcttcctgccggcctgcagcatgctgccgaaggggcgggcccacttcaattcatgggtattcaatgaatacctaagatttttgtaaaaaaatacatatataaaatatatattccatatgcatatctctactacttaaaaagttcgtagtggtggtcttgattcctgacatagcagatgcatctgatagacacgcataatctcaaccatccgattgccatgtccaacggcgtcaatctcctccccatcacgcgctcgctcctctcttgaatcgacctcctccccacgcccactcctcctcctcccacgccgcgtccttcgccctcctccctgggcgaagctcgccccgccgccgcatcgcctcctcaccagccacgcccgccggcctcctccgcgatcgccgccgccctctccaacgcgcctccacctcgcatcggatcgatcatccaccttcgccctcctccctgcgtcgcctcctcgcctcgccgccgcatcgcctcctcagcagccccgtgccccgcgccccgcgtcccgcgtcccgcgccgccctcgaccgccgacgctgcgacccgcgccgtctcctcgctgccgtcgccgcgccccgagtcccgcgtcccgcgccgccctcgaccgccaacgcgggagcaggaggtcacgccgcgtcaacaccgccgaggagccgcttcctcgccgccgtcgcgacgacccacgccgccctcgactgccgccacctccgccggtcacgatcgccgtcatctgaaggtatgtatcccctcctgtcccaccacttctgtcagccgccgctgccgcaatagccgcacgccacaccatccccgacctgcaaaccggccattgccgcccgcacgccacaccacgctgctgcgaatccctggttgctaggtctaggttaccatctccgtcgccgctgcccaatccccaaccagccatcgcagcctgcacaactcacaacatagccgccgaatccccgctgctaggtcaccgtcgccgctgcccgatccccaactgaccattgctgcctcatccctagcctaggtcaccgggactactgctcccccgtccccagttcaaagcccccaactaggttctgtatattgttgatcacgagatgtaaatgccacttttcaatcccaggaaacctagatccaggaggaatcaagcaggagttcagggacatgcacttggcatctgctgaattttttttggcattgatacggtgagtctgtctttctctaaacattagaaaaaatggagaaagaaatggtttatgtatgcctttcatgcttttaccatgtttcgatttcagtcttgatgttctgcccctgtccgtttgtttgctcctgactcctgctcagagattgataaagggttcttccatttgcatatttcagagtaattttgaaaactgaattgaaatggtgtgattttgtgtgagatagcaaacaactcttctgattggcacattgtaatttaagtgcacagttgttataagtaagtcgatagtgtattttcattcaatgttctgcagtttactagcaaatcaaactcagatttttctgctgagctgattgctggggagatattttctgtcaaatggcatcccattagatgaatttgtgtactatgttcagcaggatttggcaggagactaatgtgcatgcatgtttaaaccactgggaattatcatgtgatggcataaagtatttttcttctgcctgtttaaaccactgggaaagaattataatcctcatatttgcttccaatttccaatttaagattgtttgtttggataacaatggtgggagttctgtgccaacatcgtcaacaagatcaggtgacattttcatccatctagctaatgttatatttatcgctcaattgatatattattgcttgctaatatgaggatcactcctccctcaggtccttttgctgatataactaatgtaattgatgccaatttgacgaacaaccatcccgctgctaataaaaatggaactaatgtgccaaaagatcgtgagaattgccagcacaacaacttggactctacaggttgggcgtagcactatattatatgttttgtttctttttaaggcttttgtattaagcacagtttttgtgtgcatgcactcttcaagatgttacaaaactaagtgcgactaaactaaaaaggaagcgtgctagggagtggtatgcatcattgaccaaagagcaaaaggaagatagaaacaagaaggcacgagatatcaggaagcggaggaactttgaatcacaaggtttaaatctctactgcagcatatctaaactctctaaacagaaaactttattattaaattaattgaactttcagataatgggtctcaagctgcgacatcaaaaaaaattactactacggcctcatctgtttcaggttgagttgtcatatggtcactgctaaaaatatgtttgtaaatttgtgccaaaaacattttttaatatgtttgcatttcaatagcagctccgtttggtgatattaaaattgcaagcactgaagatcaatcagtagggggccggttggatgttaatgatgcaggcactgaaaatgtgggttctattgtaacgcctgtgcgtctaccatttactaacagttctgatatgtcctacagtacacccagcgagtataccatgcctctccaggcagaaggtccattcaaataactcaagtataaaatgacaatttattatatttatatatgcgtatgtgtgaacctcagattttttgtgcagatgctcatggagatgtcactaatctcagcgcgtctgaactaaaaaataagcgttctagagagtggtacgcatcattgaccaaagagcaaaaggaagatagaaacaggaaggcacgcgatgccaggaggcggaggaaggatgaatctcaaggtttatatataaatatacgcatatatgtctatatccaaattaaagctttacgaatatcttggctcattattattattttattaattaaactctttcaggtaatgtgcctaaagctacgacgtcaaaattttctactcctactcctacgcttggagatatttctattgtcaccgctggagatcccgcaggaagggaacaatgggttagtaatgatgaattattggacacccctacaacaaagggaacaggtaatgtatatccttacgtgcacttgcaatgaatggtttcacaattgcaattgtttatagttcaatgtactatgttcaaacaggaagtgtatctcaacaacccacgatcacacctagacgtctcccatttacagtgataaacaatatagcatattatgatcttaatgaaggatccgaagaacctttgagctacatagttcaaggagagacacagaacaataatgaaactgattttctagctacgaattcaggtcaggatacacaaagtcgtagaacatcattagagaattcacgaaatcctgtatcccggagcctttcacaagaccagttgcagtcacgtcgtgctggggatagggccaagtatgctgctaaaacaccagaacagaagcaagttatgctagaacgtcagagatcacgacgtcagtctatgacagcggaacaaaaacaagagatgaatgcacgccttagggttgcaaggcaaaatttacctgatgtggacattcatgaaatgaatgcccgtcgtagatcaagacggcaaaatgtcactcctggagaaaggactgctcatctcgcacgacgtaatgcacgctacgctgctcggcgtgacaaaccatgcgctgaatcaattgcgttggagtgccctgagggtagcagcccgtcgttattaaatccaacgccttgcttggaaacaaccgatgatgtgccagctacatcgagccggccaactgagcatgctgcagatcatcttgcacgatcatgcacttttgatgatggtatgatatatgtatgttttcattcatactcgcaattttgtacccttccgcacactaacttttcattccactaaagatgatatggattccttcatggatgatgacacggacgatgaatactacatgtttgctgggctaggtaccatcgtcctcatacttaaatctctctttcacttgtatagatttttgaaaactaaactccttttccgctaaacaatcctaggcgatgatgacgatgacgagatggtacaatctgatgacgacgacacgcaatcaccgacctcttcagttcctgatccgttcgactgtgtgtatagcaacattccacaaagcacaaatgttctgaaggctgagcctgactgtaaacactgtggcgccaagaggttccagtacgaaccgccaggcttctgttgtcgggatggaaagatcaagcttgtagaaaatgaaacaccccctgaactgatgaggctctggacaagctcggatccagacgccaagcatttccgggataacattagatattttaacggccacttctcattcactacccttggtgtaagccttgacaaggcctttgcaaacatgagctcgggcgtgtacacatttcgggcccatggttagatctatcataacatacattcttttggtcctagagagtctggtccagagcatcttgagctgtatttttatgatgacgatccaaccttgagtcacaggtttcgtcgttctccgagccttgaccaggatgtgatcaggactgtttcagacgtccttcggaacaacccgtactcagagacatttagaagtctagggcaggctgatgacctcgcgaactaccgcgtgacactaaatttggatcataggttggaccaaaggcgttacaatgtgccggtgacaactgaggtcgccgctgtctgggttgaaggaaacgagagaaggaaatttgagcctagcgtgacaatatacggtaacgactgtacccgtaaatgcatccagcctttctacggatgttacgatccactctcgtatcctttgttcttccctagaggagagagtggttggcatcaaggtcttccaaaggacaaaataaccatgaaggctgcaaacgagcgtcatggcgatgatcctggtaagtttatctttgtactatgttactaagacaattgataatgccccattacgtgactgcactaacccaaatgtttctcacgtgcagattgtaacagcaggatacgggtctctgtaagggactactactgctacaaattccagatgcgccgtgggattttcaatcctatacttcacggcggacgcctattccagcagttcgctgttgacatgtacatcaaggttgagagctcccgtctggactatgtgaggaacaaccagaaggagataagggccgacctgtatcaaggtttaatggacagcatccaggctggggagagtcgagcaagcgcggtcggcaaacggactgtgttgccagcgtcgttcgtaggtggtggccgaaatatgaagcgccgatacatggatgccatggccttagtacagaagtatgggaagccagatgtattccttacaatgaccagcaacccaaagtgggatgagattactcgagagcttgagcctggccagacaccacaagatcgtcctgatcttgtggtccgtgtctttcgagccaagttagaggacctaaagaagcagttgtttgagaaacatattcttggcaaggtcattgcacatgtttatgttgttgagttccagaagaggggtctgccgcacgcacacttcttgttgatcatgagtggtagatacaagctaacatctgcggaccaatatgactgcatcgtctcggctgagcttcccgacaagaagaagtatagagagctctatgatatggttgttaagcatatgatgcatggcccttgcggtccactcaacggtaaatgccaatgcatgcgagatggaaagtgtaggaacaactacccacgacagttcaaccctacaacctcacaaggcaaggattcatacccattgtataggagacgtaatgacggtaagagtagagtggttagaggccatcctctcgataataggtgggttgtctcgtacaatccatatcttctacggatgtacaactgtcacatgaatgtcgaggtctgttcgagtatcaaggcagtgaagtacctatttaaatacctatacaagggacacgacagggcctcgatatcaataaacgaggcagatagcaacggcgaaatcgatgagattcagcgctacagggatgcgaggtgggtgacccctccagaagccttgtggcgtatatatgggtttgacatatgccacatctcgccgtctgtgaggcaattgcaactgcatctgccaaacatgcacatgttggctttcgatgcagacaaggatcttcgtgatgttcttgataaggaagacgcaggcaggtcgatgcttacagcgtatttcgaggctaaccggcagcatgtctgggctcgagatatcctttatagggatttcccaatgtggtttacttggcagacagcaggtaagtactggaaaaaaaagagagagaggtgtataggtcgggaggattgtgtgtgcccacctggcagagggggagcgttactatcttcgggtgctgctaaaccatgtggcgggctccacctcattcgaagacctacgcactgttgatggcgtggtcatgccttcgttccgtgctgcagctgaaagaaggggtcttatagaggcagacaacaccctcgacgagtgccttatggaggctgcggtcttccagatgccagcgtcgctatgcaggttattcgctaccatattggtgtattgcgaacctagcgatgtccgtggtctttgggacaaacatctagatgccatgtctgatgactacaggcgtaacaacacatgccctcatgttgtccaacagatggtgctgatagatatctgaggcatgctacaatcaatgggaaaggaaatcacatcgtttccgctccctgaaattgacgaatcacatgatagtaccagaggagatcccagagagattattgaggagtcatccattggtgtggagacggacgatatgaacctctcagaccagctgaatgatgagcaaaggtccgcattcaacaaaatcatgaatgcagttggcagtgctcaggggggtgttttcttcgtagatggcccaggaggcacgggaaagactttcctgtatagggcgctgctagctacggttcgcggcaaaggagatatagcggtggcaaccgcgacgtcgggtgttgcagcttctataatgcctggaggccggaccgcacattcgcggttcaagatccccctcaacattgacgaagggtcttattgcagcttcaccaaacaaagtgggacggcgaagcttctccagatggcgtcacttataatatgggatgaggcctccatgacaaagaggcaggcggttgaggccctcgatatgagcatgagagatataatgggttgtccgcgttctccgtttggagggaagacgattgtgtttggaggggattttaggcaggtgctcccagtcatcaggaagggcactaggtctcagataacagatgccactctacgcaggtcctatctttgggattgtatggttcaattaaagcttgttcgcaatatgagggcgcagagcgacacgtggtttgcggactacctccttcgagttgggaatggaaccgaggaggtgaacaaggaaggactcataggccttccttcggatatttgcgtgtcgtgcaaagggaatgaaacggacctcgaaaggctcatcgataccgtgttccccaacctaaacgataacctgacggacccaaactacatcacatgtagggccatattgtccactcggaatgagttcgtcgatcgaataaacatgaagatgattgagcggtttagaggggatgtgatgacatatcatagttttgaccgagcagatgatgaccctcataactattacccgccggaattcttgaactctctaactccaaatggcctacctccgcatgtgcttaagctgaagataaactgccccatcatgcttttgaggaacattgacccagccaacgggctttgcaatgggacaaggctggtggttcgtcagtttggaaaaaatgctattgacgcggagattgttgtagggcagcatgctggaaagagagttttccttcctcggatacctctatgtccttctgatgatgagatgttcccgtttcgcttcaagaggaagcaatttccggttagattgagctttgcattgaccatcaataaggcacagggtcaaaccattccaaatgcaggcatctacttaccagagcctgtcttctctcatggtcaactatacgtcgcgctgtctagagcaacctctagaacaaacataaaaatactatcgatgccggtagaagacaagaaacaaaataaaaagtctaagcgtactggcgtgaaggacaatgagaagaaaggaaaggatttgtctaaacagtctgcaacatacacaaaaaatattgtgtttagagaggtcctcacagattagaagaggtatattatgtgactaattaaccgtccacaatatgcttgcttaaattccattcttactgctgagtgcttcttcatatagtttagttcacgtatggctttgtatgcattaggtgttttctgaagacggtgaaataaatcacctataagatctgatctttggatgataatatcttatgttgagtattattaaactgaaattctgcgattgctttgcacctttgttccctacaatatgtgattcacttgaatgccattgattcctagcagtatttgtgcaactggctacatcgaaaattatattttgtaagatgtttacatctgaaacccctgtacataaaacttgctattggaatcactgttgcaaatatattgtgtcactagcccgattaggataggataattgcacaaatgttttatttttccaagttataactgaagtatattaggttaatttgaaacaacagtgactaaatgaggtccacatttaataatagtggatcatgcaatttacttgaaatttatctgaagcattccatggcttgcttaaatatgcttgcttaaatatgtatgtactttcttagatagctgtacagataacggattgcatctttggcaatggggtgctgtgcctggattagcagcaaaacattattatgctcttgatctattattgtcaggttgacaaagcaatatggactatagacgcagtggaagcattgtaggcgtgtgcaagaaatggtgaagggatgcatctagcacaaatttccttcctgatgcacattcattgttaacagtaggtaat

SEQ ID NO: 22761 - DNA, 17408 bp, Oryza sativa
caaatttttgtaaagtcttatgttccaaacaagccctgaagctaacagatggcaagtatgtgatgtgaactttgtgcggtgaaagcaacctggagcctttcatctgcatatgtagctgttgattttatagatcgaacccatttatgccttttgaatgcatgatcaattttttggtcaaataagggcatctatatagttaatgtggactgatggcatatattatatattaataatatttatttagtcagtgtttgacttgacatacactctgaaactgcatgtataatagaacctgtagctgcttccgtgatcacgtcaccgctgcccacatcgccgatctactccgcggatgccgtttcatctatacgaaatttgacttatgaagcatagcatactgtggtattgcctatgattttacttgtaaggaataaaatatgcaccgacaatagtgtatttaggcgccattgttttgcagttgctgctgctttccagcagaactagcctgatgcttataagcatcagcaattccattgttttgcttatggctgattactggatcttctattaactgatgcattgcctctgcttgcctacctctgtgtgtgttgtgtgcttgtcagcactgactccagatgcgtgcagtcagcatgaagctattgtgtacatactagatactggtgttggattgagagggttgcattttgaagttaatttggttggcatgaatctattgtgcagatactgtatactgttttttttttataaaaaaaaagttggatactggagttccagtgactaattgaaaatcatagctctcttggattgagccttccaagctttgacaagttagatttgagcgtgtttgcatatttcgtacgagtacaggaaactatgcattacatttccatgatactataatatggagtaatctggaattagatggttcacgaagaatgtggtgatattttatattaatctttaatctttctcgtggattagcaactgaaaaaaaaactttttatatgcgtgtctttaccgattaaaaagggcatactgtaaaatgaactacgacaaaatacaacaaattcaactccaatgccacaaccagccaacagccagcgattgtgactcaatgttgaattaattgataaaggaaacaaactatgggccttatgggcctaatcgacccatatgacctgactgttagagtccaatgccactgccacaaccaaccaacagccaacgatttgtttgggtgtttgtgggtattttgacgtgccagaaccagccaacagccagccggcgatttttttggtatttgattcgattttgacgccacggcaagataacgctaatcgtgattagttaacaatcatcacataaatggcgccagcagctcttgttgccagccgccaccatttccagcagctctggttgccagccgccaccatttccacccattcttccggacgtctcttccgaacggctaattaccacgcaatatggagaatgccgtagtcgtgcaaccatggaggtcactctttcttcattctattatttcttctgttgatggattgtgcaatgctatcatatcgtgtatattatcttccccatgcagaattgttcggttccacgatatacaaatggatcacatacactggaaatggtggattgtccgtgcgagggtcatcaagaaaggacatctgcaagagaattattacggcgatctacaaattcgactaatactaattgatgaattggtaagtcaaaatgatttttcaatcttctttttcagaattttagatctaatatgtagtttatttccactgtgactcactgtatgtagcaagcctctcagtgcacctcagccaatcaaatcacgccgaagctaaaatctttatatttattgattgattgattttaacgacaataatttttttagtgtcttatagtcttacatctcataacatgtgtagggcactaagatggaggcaattgtttaccgtcgtcaagctgagcatttcaaccagcttttaagatgtggatctgtttatgatttctataacgtcgggtttgatccgacagaaatgatcgtgcatctaagatttaagataagatctcagttctgcatgattctcaataatgtaacaactacccgcacgcctcatggtcctgtccacatgctacgttgtccatggcgttttccagaatatgatgatattttttggcaaggcacaattctttagtagatatattgtttgattcggtactgacaaaaataccaatctttgtttagttgctagcaaatgaaaaactaatgtgtctatgagttgtgcagatgtcattggattagttgtgcatgtcggggacattgagttcaggagtttgtatttgcgtcagacgccgacaaggataatcgcgctggttaatcctaggtacgacatgctccatttttttacatgtattaattaattgagatcacacaacactcatgttgcatataatttttgtaaatcaggttgcagataattttcgttcgtgtatgggaccaacaacttacccgcaacttgactaggtggcgctcagcacggacacatttcgattgttttgtggctacgctgacgagggtggacagaagagcaggtaaggaagcccccctctatttctctaacatatttgccaccgtgataaatcacatattttaaactaactgacattttccttttgtagatgaactatcaactacttatgagtctgacataatttttaatcctgattcagcatcagcaaatgaattcaatgttttgcgccaggcattagcagtatcaccttctaatgttcaagagcaggttgaagagtctatcggtagaagaaaccttcataattatcaacgccaaaactagaagatttaaatgaaggcaactatagttgcatttatttcgcatacatataatgatttttcgcttccaagtttttatagtgtcatcagctttgttgcttactcagaataagcatcacaattttataatctcaatatgatacaaaagttgtatgccactcatataaaatgatgtccatgaatctctatgaaaagcattttttacgtgcgatcaagatgatttttccgagcggaggatttgaccgtatgtacctgagtgtctggaaaactatatattttcacgtgcgggcggcccaaccacattgtataatcgattaacccgtgcggccaaatcataccgtccgcatggaaacaaattaaaacgcaaaaatcactgcctgcccgccggccagcacgcatccggccaccgcaactcgtcgtcgccgtcgtcgcaccgcatcacgcatccggccgacgccgccatgaccagccgcggccgccgcacacacccgaccgccgccacactgcataatcgattaccccgtgcggccaaatcatacagcacgctcagaaaaaaaaattaaaacacgaaaatcgctgcccgccttccgccccgtacgcaaccggcgaccgcaactcgtcgtcgtcgtcgtcgcacagcagcacgcctccggccgccgccgccgtgaccagccgcggcagccacacgcacccggccgccgccacaactcgtcgccgtcgtcgcgccgccgcacgcactcggccgtcgtcacgtcatccgaaaaattgttttatatctaaatcgttcgctcgttgcttgcttctggtacttcaaaagctaagtgctttgatttttttgcatgctactatgcactcgtcctattaataactgagaaaggatgtatacaagctatgggcctgatcggcccatatcacggtgcaatgaaacatgacgagctgcttccgttttgtcgccgcgagattgccgccgcgcgtgtagcaccgaccttccgtttatcccgtcggttcccacccaggcatcccatccactgcattccaatcgccgccgcatccaagcgcctttcatcggcggtcggctgccgcgaccgcgacgacgctgccgccgcaagtgcaacacttcaaatcgatcttcaactgcaactgaattttgaagaggtgcctttctactgcactatatgtgaaataagaggtgagagcaacaccaccacgttcttgtggtatactctcgtttgttgcaaattgaatttccatgttatctgtttgtctaatattacaattttttttggcaacttcaatgattcacttccaatagagtgtcaattacaacaacatgatgtcggcaaattatcgcacacacatctccaaccgggttcatgcccccgcgtcagaacagtcgcctgatgcatctcaacctgtaacaatcaaaaaaccatttaacaggaaaggatatttcacatgtttgttattcttcttttatttgtcattttgtgcaaaaatttttatatcaaattttcgtaagttgagggtacgtacctccttttgtatgtttaccgttactttatgcatggctgcaggtcagtagagttcgatgagattaagatggaacacgtcttccgaacatgctggaaggtgagtgcgaaggtggtgttcaaatctcccatgcagcaaaacaaatttggtgctcaatatattcggtttatcctaaaggacacaacggtatgtcacaccaatcacctctctcctcctaattgctagatataatggagcgttgtgcacaaaagttatggaaattatgcctttattctatatgtacaatttaaacgtaggatacaaggatggaagcactagcgtatgaccagcaagcagatcgttttaatggaaccatacagagtggcttagtctataattttactaatgtggggttccaaccgaccgatgtgcctacctatgccaacctaaccatgcaagctaagttttgtatgattctgacaccaaagacagccctacgcaagcctcgttttgtagacttcagtgctatttttaccgacgcgataagtgatgatatgttcataggtaaagcaacaaccttcaataactattttcatccctttttttgaactctatagttatgttcattacataaatattcgttcagatgttgttggtgtgcttatatacgtgggagaaatacatcatcaccaactttatggacaaagcttacctactagggatattgccttggttaatcgtcggtgagttcattttcagtttttcctttacataacatgttctcatattgtgagtggtccctaatccacttttagtactacagatataaggtaatctttcttcgaatttggggtgaatatgcatctcgacatacagtgtggtggcaagcacttgcatcatagtattactgcatgtctgctacatgtctcaagaaattagatattctaaccggtaagtaacaaatcatcctaataggaattactatttgaccattttgtttgcgaggtaatagaactgaacactgtcagactgacttgcttatcgtgcagagacattaactactacggtggactccgaattgaccaactctacagattcactcagtgcacctgagttgggcgtgattcgtcgtttattcgttagttctcgtgaggatgctcaacggttcactcaagcagtcgtttccttgagagcgaaatttattactattgcttcccttttagaccgattggatcctcaaggaatcatcagacgagatgtgcctttgatacaacaagaggatactatcgcccgttttaaaaaagcttaagagattgcttttagattcatgattttcgttatatgtttaacatttgtagggatgctctggtctattaacgttgttttttgggtcgtagaaacataaattaaaatgtcctattatttcgattatgatgatttgttatgtccggatttggtccggtatgttcgaaccagataaaaaaacacatggttttccgatgatgcatatgttcccccttgcaatgcacgtgttattttcatacacaaattaaaccagaactataatattatgaaaaaatattttacgtcctaattaattgcatccggtttgttcagaccgtttcgaccaaaaaatttaatcgtgatacattccctttattttttttaacgagatatacttacgtgcacggtccaacaattttgttctctcaatttttttccttctaattttaatcgtacccatgatatcggatttattcagtttcccgaagattgatggacaaaataatcgaaggaaggaagaagcgtgaaactgcctcgactcctgcgtacccaggacacgtgataaggcccatcaactcatccagattaaggcctatataatattagtcagtcaagaatcactttcgacttgattaggcccatcaactcataaagattaagccctatataagataagctggtgccctgtttccttgctaagtgttgccgtgatattcagtttgatctgctcgtcgtatcgccgccgcacaactcgccgaataccaaggctggtaaacaagcgccgccgccgtcgcaaaatccaccgaaaccagactacgcgaccaccacacgatggatgcatcgccgtcaaatccgccctcgtcgactccgccacatccgcagactcctccgccactactgttgttgacgacgccgccgccgccgccagtcccgtcgtcgccggctccgccgccgtcgccgccgctgccgccgtcgccgccgccgccattgccgtcgccggctcctcctccgccgcccttgccgtcatcttcggcgccaagcaatgtcagcacagatattgatcctgtaagttaagcacccagcttaattagtccatgaagactatcgatacatatatatatatatatatatatatatatatatatatatatatatatatatatatatatatatatatatatatatgtgtgtgtgtgtgttctattgcgatttgggttacttatagcaggcagtacattagctagctaatgttaatgcatggtactgtagattaatgctatacactgtacgttacttgattattaattaaagcacctagctcgccatccactattatattaaaaaattattacttacaaatatgtcaattgcattaatatatactcctacactagcttgtgcgtagtgctcagggttgcttctttacttatatgaggaactcatctctcgcactcgcaaaaccgagggactcattaacgtatgattaattaaatagttttcaattagaacaaatagatttttatggttttataaaataactctaacaacataactcaacataaaatcaacctggccctcagcttattttacaaataatatataatactctgagtggtatggttcaccaagaaaaaaagattaatagctatgatcgagcaaaataaagcattgcaccaacttatgcaacaataatattgacatccctgccgacgtgttttttgtttagtgttatatataatttccatatgcaatatagatatccttgcttaatctcatgtggtactcaggtcaatcaagacgccattcatgctgatatgattacaaccccaccctcgaagaaagcaaaaaattcggaatccgaggagcatggagtatccaaagtcagcatgccaaatattgatgtaccatcaaatttgatacgatctatgtttggccagacctacaagtatctccctcaaggtacattattgttttcacatactcccttcattccacaatgtacggcaaaattactttttcaagttgtttcataatataaggcatatatgcatgcatgtcattaactaacacctcttctccactaaaatattattattttaactctccactaagacctctaattttattgggtgcatgcataattatctcttggtctttggtttaagagtggttgtgctttatatataaaactttgtgatatcagaattcatttttttttgttttacagattatgaattaacaaatgaggatgtaatggccatatttttaattgaagattcggctgaaaattgtacactggtggacatgggtcatttttataacaagaaacgtcacttaacgtgccttctctctggagataaatttttgaacgatgatgtaagtaaaactgcctatgatgaagcaacgttacaatttaattgccaacatattctttagtaattgcagatttttaattgaatcaacaggtcatcagtgcgtacatacactgtttgagtgagcaagcaaataacgataagaaagtgaaatatgaaaacccgtttctttctgacatgctgaaagcggctggggtcaatggagtaaatgaagatgaagataactttattacaaagatagtgaagaattacctacaccatgaactggtattgtttggctctctatatttgatagtatttaagtttattatttatttatatatatagatataatataatataatatatgtcctaactccatatgtcttgtttagatttttattccaataaatatgaaagataatcattggtatttagcggttgtcaacatagaaaaaaaacagatacaagtacttgattccatgtgtatgacattcaatcgtgctgacctcgcaaatacggttagtgtatatgacatgtgaactctcttttttttttaagattgtaattcatttatgtatattgctgactgtaaatatgataattgagcagctacaaagactacaatatcatcttaatattattggacggcaacaggacttgcctagccacaaatggggtgacctcaatgttatcaagtggccaataatagaacaactaaaagaaagaattcaggaagacaggtatactacaaataaatttttcatgtaatataatattaatataagatgaatgatatatttcaaatggtgtacggttgtttagtttttaatagttgtacttatactttaaaacaatgcagttcttcatgtggactattcatgctcaaacttatggagaattggacaggagaatcactttctcgttctattacacaggtgtgtttcttaataaaaaaatagttgatcaaatatcttatctatttaaaattaaataaatttactttttaatgcgcaggaggatattacactttttaggtccaaactagccagtgtattattacgttggaaaacaaataaggcggtcatgacgaccggggaacaaatcgaagataccaaagatagtgatgacgatgttgttatattaggtagtcatcaacggaaattcggctctacaagggacatcaataaaactaaagaagtaaacaaaaaatatagttcactactctctgtagtatctaagatgagtaaacaagagttgataagcggccttctgcactacatccaacagattaattgtgctgaagccatggagtaagccactgcaatgcattgtatacacaatcgtaattcatatatgcattaacttattttctttgattgacaggaaaatatgggtacaaagttcaaggccgcactatattagcttgagtctcaaacagcttcaaacaatactaaagaaggatgagccattggaaagtgattgcttcaacatggctattcgtaagttcatgtatgaaaaaatcgagatgattcataaaactaaacaagcaatatcgaatcattgcttggacttgcaattttgggtaagtttttaaattctaatgctcatgtcattctctattgctcatgttattacctataatcgcaatatcgaatatattgatttatctattgcttatgtaattgaaccattttttaaatcatgtagagtgctactggctttggtaaagtcccggtccaccatgacaacataaatcttgcagagaccgtcggtagttggtcggaaattcattacaaactttcacagtgcaaagcggtaagatcgctaagataccatcctatatggccgtgttttatatattatcttgacggatgatcttttgtagattcttataccagtacgccatgctcgaagttttatcgtgcttgtagtggaccaagaaagtcaaacgctctatgtgttagacccaaatccacttatgccagaatataaaaataacccaaatatgagatacaccagaaaactgataactatttgtgatcacttcaacaaagctatgagaaaggcatgccctggctctaggtggaatgaagacatcaacttgtggaggcaagtaattgtcaataatccggtttacagcaggtaagttatcttcttaaaaactcgttcaaaccaacaaatttaactgtgtagagaaagggaagctaactcttcaatttccttaggagtttatcgggttttcttgttcatctcttcatgtgtacatggaataataaagaaccacatttgccggcaattaatgtaagtcttgacaggcattaattattcatatattacattattatatatttaccaaaatttaacttattaaatacatgtgcaggatggtgacgagctaaggaaactttttttgctaaatctactgatgtaccaacaaaatgagtgtgaaagcaacatccctaacggcgtacaagattttctaaagtgtataaagaattcacaacactagggtagttatttaactatatggaacaacattagggtttaactataatatggagtgatttaatttgaggtaatcatccattagaaatgccgtatctacaaatgctggatgttctatattttttgtttgtgctttatttgtatgatatcatcaaattttcatagatgtcttctatctatgttactttttataatttatgtagtaaacgccatgagattgtttcattacgatgccatatttgtcttttcaatgccagatcttatccccgtgatcaacaaaattccccgtagcaacgcacgggcaccctactagtatgaaaaaaaggaaaaaaggcctacctattcaaaaggagcccaactaaaaacgatttctatccctcccaccatctatctccccactatttcaggcccattggccaataaaaaaaagcccaaacatctaaccctatctctccacctcaccaccatccaactgcccggaggacatgacgcgccggcgcgccgccactcgctagtctgcgctccgctgccggcccgcccgaggagacgacgcgccggctgcctccgccctccagcctccagcagtctacccttcggccgcggcgcaggcgcgcacggcgccgtcggcgccttggcggctcgggcgctcggcgcatccggcatccccccgcggcgcccgcctccatgctccagccgccgccgcccgccggtgcggcgccgcggtgacgagttgccgcctggcgcctgcctgcctgcctacgctccaccgaggcaccgaccacggcagcctgctagcccgcagtcgcaggggcgcagggccccgcgccgcgtcgccgccaccggccaccgacctgccgctgccgtcgacgacgaggtgacgaagtcgatacctcactgagacaatgactcactaactcttccctagttggctagttcccttcatcacttcatggctaattggtacgaagtaggaactttggattaggaatttatgatttaattcatacttgaatgactgaatgtctgaatctagcatggattgttcatggttgaacattttttatttaaaatttgaatataggaatgatttatggttaatatagtatatagtatcaactactatattagtgatgtaaggatgagaatttcacaaatttgatatgttttgtctattaatagtttagtattatactctaatatgcttaacacattcaatttatgatcaattctatccctgcatctatgactttatgaaatcatgttcataccgttatatattatacaaactttgggttgaaaatttttttcttcctcttctaatttcgaatacccaagttgaaaatcctgggcccgccccttctgccgatgacgaacaccccgccgtgcagcggcgagcgcaggatggagaggcacacggcgccatcgctcctcttgtacgagtagtgctccggcgccagcttcatggcggcgtccttgccggcgaacaccagcgtgatcgccgggagctcggtgtccttcgtgtagcacagtacggatgagcccttgtctgctagcggcggcagctgcttcttgaggtggtcgaagagcaccgggttgaggaacgtgtaaagggtggaaacggtggtcatgatcgcggcggccttgtcgctgacgatctcgccgctggcgaccttgatgccggtgatggcgacgaagtagaggttggggtcaatgttcggcgccttgtcgacgccgacggggatgagcggggtgctggtgctcgcgctggcgccgcaaccgcgtcgtcgtcgccgagccatgcgaagctcctgagatcgccgtcgatgaagtaggcgaacctccggaacgacgcggcgaggacgctgcgcctgccgaggccgacaacggcggcgtccttgcgggaggaggaggcggaggcagaggagcacatgtacaccacagtgtctattcccctgcttgatcagtctctcttctcaccgacactcgaagactattgacgattgagttttaagactttgatcaccatgcttaggcagcttagcttaaaacattaattgaatatatatatattggtcagggttttcttcgacatggttttaaagatggactagtgggtcacttaatatacgtggaaaattgatgaggacccaactagttcggatataaccatgactaccttatgtattgatcaaccaaagatgcatatgttctatattagatttacttgttatatatttgaactaacgttgttacacaatgagtttgacgtgttttcgtttgtagacgtactttgattgtgcgaaagaaaagagaagcgtaaagaatgcatggatgattaaagaagttgattggggaccaaaccaagaccttctccaagtccacttccatttcaccacgtcacttttgatccatagaagataagagatcaagttttacacattttggattcggattcgggcctctagacagcatcaacttcaaacggaccgagctgctaatctagaaggaatttcggggcctatgagtacttgttggaaagcttatggagtctactttcaaatggttttggacccacgtcaaaatttttatcgagctgtcgggaatctgcaaaataagtcacgtatctcatccagtccgaatttgatttgagttttgggtcttgtaattgtgtcgcggggttagcccaagagggtatgcaccctagggcaaccctagaacgtccctaatcatatttattcagtagccgtcatcgttgagagtcgggttttgcttagattaatctgtcaagaaccgtttcaccgccagatcggtttgtggaacaccaaatttgagtgcttaatcattcatatgcaatttggttgcaatctatcttgttcttgcttgtgttcttcgattcgcatgcagggattagccttctcggcgagggcaaccaggtttcggcactgttgataaccagaggagacgtggtgctgcgattgcggggttcagtagcgtgttcgttcagaagccggatcgaattgtgtcgcgactccgcccaaatcgactgtttatcaatacatatcggaagatcgggacctaacatccctcatcagttagtatcatagcgcggttgcccgttaggtaatttatctacccataacaagaaaattgccacacaaaaatattgcatccattacctagccaatttgagccgttgcattgttctattaatttttgcgtcgttgaattttagattgcatcgtcgtgtcgagtgctggtttagtttcagatttaatttttagttgtgagtattgcatttgttcatcactttgggttagtcatgtccgtcaatttgggtccagttttgcatctcatcggttgttgctgggaccttgaaaaatcgaatctactaatcatcaggtttccgtttttgtggtttggaggagttttctttgagcggtttctgtgttgccatgtcggttctgtgttcgtgctttttgtgcacacgttgaggagagaaacagattggcatatcggtttgttttctatagggggtttatctgatctgtgtcgtcaaacggaagaaaatctccacatattttccaatcttccacagtagtctgaatccaactcgtccttgtcacggccgacccccacctccacctcacgggtttcttccatgcctcctcctcgatcaccacattgttaggtattttggtggttgtagatttgagtttttttttaaaaaaaaaggaacctacatgcatgatgtgagcattccatttttgagctggtccaattttagttttgcactttgcatttgagtccctacaatatttatatttacatttgagtccctggttgaggtcattgattggttcctgctgaaaaaagtaaaaagaaaaaagaaaaggttgaaaggtgcaaagaaaaaaaaaagccgcacctaaaaaaattaaaaaaatgcagaaaggtgcttaaaaaaagccgcaccagaaagaaaaaaaatcaatcatcttttgagtatggtttgagagtgcagagttgtgcattgattcatatatagtccttaatgttgtcgggtgcttgcttgagctagagttgagtctaggttaggccagcacattgactagtactttgaactattattcaactttgaattttctgattaacacaattgcgttcttttgctactatatattgtgcctcccaagctccacatatatacttctggtcagcaccactttgatccttgcaatcgctacatcaagttcttcaaggtgtcacgaaccagccaccagttgtaccgtccttagcattgctggtaagacacttattcttagtaagctgctccatttggctgagttgttgagaggcaccgctacactgtgtagcagattattagggataaccttcactgtttgttgttgtttttgtgtttgcaatgacaggtatgagtggcactcaaaatcagcaacaccaacaaggtaacaataatcgtgtgcccgatgattcttattctaaggttaagtttaaaataccatcatttttggattattatgatgctgagaaatactttgattgggagatgacagtagagcaaaagtttagtgtctaccttgtgcctgagcaacatagaattcgacaaactactagtgagtttaaagattttgcttttatttggtggactgggttagctgtagggagagctttacctactaattgggaagaacttaagttagctatgcgcgatagattggtctcaccatcttatcatagagaattaagcaagaaactgatgtgtttagaacaaagggataaatctgtataggattactatggtcagctacaaaagggattgatgcgatgtagcatagtggagggaactgaggattttatttgtcgtttttacttgggattgaggcgcaaaattcaggacatagttgagtataaggattttaacattgtcaactagttgtttcaatttgctatgcttgtagagaagaaattgctagggcgtgatcaacaaagtcaagaacaaggcgagcacgtacatgccgcgggcgaagccatctttggggctgcccaagcccatctctttccggacacccccaccagcaagcaagcgaccagttgcgtccggagtttctgcagcgccaaaaccacctccccccacgacttttagattcaggtaaaggttcttcgcaagtacccaccaagagtgcctcgtccgtcgctttgacgggatgcacgcccagcattcagtgccaccgctgccatggatttggccatgtgcagaaggattgccctagtcaacgggcatacattgctatggaagatggctacatcagcatcttcgacgttgaagatgatgaggaggaagagaggaaaaatggagagaaagacctatccatagctatatgcatgcttgaggaatgtttaattgaccaagcgcctataatttctgaagatgagaaagaaggtaatgataatggtgctacaactactcaaggtatgcatagttatgatgtgccaactatatccactacttatgctacgttagagaaacccatggtggaaacaattgttgaaatacctttgtcacaaaacaatttgcttgatttttttgataaagaatagttatgcgatgcttcacttatatctatgccataactagtgaatgagcatgttagttctatagtagagccaccatgtgttgaatttaaacatgttattcatattctagcgagaatgaagagcttaaattgctatcttctttaaatacttggggatatattcaatttaatgatctttgtccactcaattgtttagagaagaaattatttgctagatttgaattgccatgtccttctgatgtgattttttatgttattggcaattatgatagtaaaggagaatataatatgtatcgagtatatatttgtttgaatttgactatacctcattttcatgatgaaatgtattgtctagaggaccgcatgcatataagtaattctttatctatttcctctagttgtttaaatgagttacatgttggtttgcaagaatgtgagagttgcggtttttttactacaaagattttaggatccaaccatatggacatcaagaaatgttctttaccggatgttgtgatagataaagataagttcaatacgctccatgacaaggtgaaaccgaggacagtttccaatcaagaaggggaggatgatgaggacacaactagctcggatataaccatgactaccttatgtattgatcaaccaaaggtgcatatgttctatattagatttacttgttatatatttgaacaaatgttgctacacaatgagtttggtgtgtttttgtttgtagaggtacttgcttgggcgaaagaaaagagaccgagcgtaaggaatgcatggatgattaaataagttgattggggactaaaccaagaccttctccaaatcctcttccatctcaccacgcggaaaggctaatgagcgatcgatcgctggcagcgatcgttttttttcttttttttcttttcctcttttagtaagtttatacatctaaagtttacacatctaaagttaatccacctaaactttgtaaagagaatgtttataagtcaaaagtttatatacccgattcaaatattttatattttcctcttttagtaagtttatacacctaaagtttacacatctaaagtttatctacctaaagtttgtagagcgaatgtttataagtcaaaagtttatatacccgattcaaattcgaattcggattcaaatattttatatataaaatatttctatacacaaagtttatgcgtgcaaagtttacggtacaaagtctatgcacatgaatgagag

SEQ ID NO: 22762 - DNA, 11084 bp, Oryza sativa
tatataaaactaacagacttaatttgttgatttttcaggattctgtttatttccagcaagtatgtgatgtgtcgataagaactccaggctctagtattaacacatttgaaggtcacctcatttacctacttctcgttttcctacaaactcactgcattctcctggattttatcaagtaaaggttttgcgttctggatcttgtggatcgaccagtgatgacaagctatacatcacactgattatatgaaggatatatagcataacagtgtgctgtgcggtctgaggctttgaaatagtcatttctttgtattccacgttcttttttttttttggttcagttcaatgtgatcaccagtttgaatcatttagcatctgaccttctgcttaactgcagtattcttgatcttgtcgattggccggtgatgacaagaccattgtcatactagatattgatcatatgaagtatgtaatgtaacattctgcttctctgaggccttgaattgttcattgccttattctgcatcatttagtatttggctttctatttgcattgtttcaaaaaatgtctaaggtcaaatgtttctcctctttaggtcatattcatgagatatgcagaagctatgaatgcatctttgtacatggccacatgatcataaactctctctgatctgccacttgattacaactcgcaataactgtttgctctttgattctggcgagtaattaatttgcagtttggacacacataattctgcttccgtatctcgccttctattattccctttgtttatagctcaagaaaaggttgtgatgttaatgtagtgtgcctatgatgaaatgtttcgacctgtgtcaggatttgaacaactgggcatgtaaatctcagtaggtttttttttgctgaggcatattttgttagctgtttgaagggaacacaaattagtctatgatgaaatgtaccaaactagtggaacttgattaataaaatgccttttaattaactgtgttctcccgtgttatgtcaagtacaggttttgaccttctcgatcttggtggatcagccgctgatgtcaagtacattctgtttgatcttattaacctctattatctgttatgttgcagtgtgtgtttttctaccttatttgacttaaataaaaatgaggactcgttgacttttccagattcaacctatttccagcaagtatgtcaatcctttctttgttttctacaaaattcagtttactcttctgcgttatatcaagtgcaacattttagggatgagaagttttaccttctctcatggattggccagtgatgatgagctttacatcttacagacactgatctatgtgaagtatacagtagaacagcgcgtgcggctctgaggcattgaattagttagtgtcattgtggtctacaagattcttttatcccagttcaatgtcatatgattatcgctctgcatcattagtatttgtccttctatttgaactgcttcaaaaaaaaaatgtctaaggtcaaatctttttcctctttaggacacaattttagtctgtgtattcaaatgtatgcagaaactattgaatgtatctttgtacatggtcacatgatgtttgtatcaccacccatctaaagcaggcttaatgtcagtctgctttgtacatggtcacatgatgtttgtatcaccacccatctgaagcaggctgaatgtcagtctgcatgtgcagaaatgtgattctgatggctaacatgatagcatcttttcaacattctgcttcagtcttattaccaacccacaactagcatttggcttcagatatgttgcagagctttgtttattttcacttgatatctaacttgtataaacctgacagacttaatttgttgatcttcaggattatgtttatttccagcaagtatgtgatgggtgtagataagaactccagactttagtgacaactgagttgaaggttatccgatttacctactactctactaatagaccaaataggcatagtaacactatattctttcacttgataccaagagatgtgatgtacaaaaaggaaaatgtatctgtcattttgattttttttttttgcacaagatgttgcagatattatctagagtttaaacataaatttcgtgttagatacagtaaatggtgtatcatgtactttgattttctgtgagagaggccagtggaagttttcaaaaatcatttgtacgtcatattaccaaataacctgctgtagtgtttgaaagcatttggtagaggactccatggtattacaaatcaggctacaataggaaaattatagtaaactgctatggtccagtattgaaagtatcaaggcattgagaaaccataggagtcccctctttattttcactgagtcctgttttctactgtgttctaagcaattcacaaatagaagtcacaaagtataacctttgatcacttgagtagttagttcctaaggaaataactactgaatgccattcaattgagacagtcataatatctccgaaacctgccatagcaaatgttttcggtttaggccacaagagcatgtcatataacaagtaaaatgatgatactcttgcatgtatcttacatgtattggcatctccgcaataagcagaccactggtttcttctagagccttgagagtggctacctcgccaccaacaaccatgttaatcacgattccatctgcaccaacatagatcatcagcaacagtaacactcaacaatatgacaaatgatgataaaatgatattttcttgacgtgcctgctgccaagcatgtagacatacgtctgaagtaagcttcctgaaaaatctcaattgaaacttctagtgagcctagaattaaaaaaatcaaaccagaggagttcaaagaaactgcatagcgcgtactcaacagacatcctgaaaaacaagagagtggctcaccttcttcgtgggaagctcatagtttattagcacgcgagccataaggggagcctctcctagtgttgcctggggcaagcaggcatctgttgctactacgatggttagttttgaatctgcactttcagtcttgggactatccgcaatatcagcagcagcagcttttgtatgattccattggattgttgcttgccggaacttgtcaagaacagatgctcgctctgattcagcctgatcgctgtactgtattgacaaaaaccattaggaatgaagttggcaacaaaatccaacacaggaagtaggtagcaaaatccatgaacacaataaagagaatttagctatatcaggggtacataaattcagtttgtctaattgcacaggcatatctgtaattcgtttgggtacataaattcagtttgtctaattgctcaggcatctctgtagttcgtagatgcagctacattattccatatccacagtttttttgatgaattgaacagctacctaccaacacaagcgattaacgtaaaatcacagaaaagtgtacatcaatttgcagcacaaaacgagcataccatatacagctacattgtgccatatcacagtttttttttctgaattgaacagctaccaaaataatcaattaacactaaacggcttcgtaaaatcacaggatcaatctgcagcacataccagcggcgacaatgacacgaaggggaggctggcgacgtcggcgcagacgagatcgagctcgtcgcgggaggagacgccgacggcgatcggcagcgcgccgcggcggtcggcgacgacgccgaggagctccaagagcgtcctctgcaacacaggcacggccacagatttaaaattttcaattcacgcggcgtgtgccctccattagtcggagctgggcatggcatggtcaccatcggagagagagagacgaggggcggtgaggcctcgtaccatcttgaactggaggcggtcgacggcgaggtagaagtggcggccggagctggggaagaagaagagggggaggaggaggtggattactgattagccaacacgagacgagacgagacgagacgcgagggtgggcgacgggggagattgggggggcgctcacctggggtgggatggcgtcgcggcgggagaggtcggagatggcagcgcgtcggagaactccgcggcggccggagatctcatggcggccggtggtgagaaggcggcgctcgccggagagaggagggaaaaccgaagcgggcggagagggagagggtgggggaatattcctttcctccatggtggaatattccaccaccgtggaaagcccaatgggccatatgggtctctcagcccaaatgaacatcggaaattctgaattaaggcccccatttagttcccaaacagaaactttttaccctgttatatcgaatgtttaggcatatatatagagtattaaatatagaaaaaattaattacacaggttgcgtgtaaattgcgagacgaattttttaagcctaattgctccatgatttgacaatgttgtgctacagtaaacatttgctaatgacggattaattaagcttaataaattcatctcgcatattacaggcgaaatctgtaatttgttttgttattagtctacttttaatattttaaatgtatgtccatatatccgatgtgacatgtcagctcaaaattttttgccaactaaacaaggcctaaattcatcttgtgcccatgatcttcttcttttttttcaaaaaaaaaagggttaaactttaattccagttttgaagtttgtctcccttttaagtccaacgggtggaaaactgaagttgtcgttcttaagaaggaggaaatattttttaggggaaaaaaggacatatatttgacacatagaagataaacttgtttggtttgatccctacaaattttcggtaatgtaatatgagtgtgacaggttgtgtgtgtatatatgtttacagaagcaattgcctcgtacatatgaatgtttatttacatttacatttttttataggcattcataccaccggatgaaattgaagccataatcaagtggcgcactcgagcgcctaagaaaagagagccatgaaaagcatcggtcctggaggaaagggaaatggtgttccttgaaaaaaaaaaaagcttactatcaaattgtagtaggatatagcagatcaaaccaatgttttcttcgagtaataacaatctcgtgtttatttgatctaccttggtatctgtactgctgtacaattatgtacatcgtctcagtcaccaaaacaccagttgcaaaacataaggcggtatggtaccaacttaacctacatatgtacatagtgatagtatgccatccagtcggtacatcatgcctaaacctccccaaacattattttgtgtttactgaagcactagtgattaattagctgcttgctgagctaaaaaaacccggccccaaatcctatcctcttcatcatcttgagaaactcctcgtggtcgacctcgccatcacctgcaaaaccaaaaattcggattattatccatccgtcctcattcgatcaagtttcgtgcaccaactagtccatcaattatggcagcatatcacatgcacataagtttcaatttagctgtttaggacgtattgagcgtattaggtgcacataagtttgggacgtattggtggtatgcaccggctaacaaatgctacagaaaaaactataaaaataatgtttatacatctccatctacatgcaaattttcacatttaaatttattatctttcagtgataaaaaaatagaaaagaaatgcgacagttttaagggtataaatttattaaaatatctcttaataatactctatatatttgaaatcaaaactttatatacacatgtcgaaaattaaggaaagtattttaaactcttgaggggtattgaggaaatgtcttctcatttgttcaaatgctatccaaatagtcataagaaaattatgaaaaagaaaattgacaccattcataccatatacatataaactacttaaagaattaaaaaaaatcaaggtaagactcaactcacacattaagaaatagacaaattcacctttggatttgtcttatttatttctccacgggtagattgaatttgaatataatttttggtgtagtgaaagatgttagtatactctaatttgcaaaaaagaaaaaagaaattttcacaaccatttacattaaatttgagaggaaaaattacactaggggacgttcccttgagggaatagaatcctatcctgtaaaattagatgcacatgtaatttgtgagtgtggcgaaagcacctgaatcttatgtgcacagaatatgtcccagttaatcgcttggtaaaatccaagccaattacagaaaagaaaatgctgggggtgtgggagaaacaacaaatcagaccgttctcgtcggcggcttcgatcatctccctgacctcgtccagcgtgaagggctcgccggtctcgatggccagccgctggatgtccacgtccgagatcttcccctgttcatcatattcagattcagattcagattcaaattacgcacaacaacgaccacaataacaagaacaagaacaagaacaataagaagaagaagaagaaggaaaggacactgacgttgttgtccttgtcgatgatcttgaaggccttgttgagctcctccctggcgtcgcgctcgcccatcttgtcggtcatcatgtgcacgaactcgtcgaagtcgatcgtcccgctcccgtccttgtccacctccgcgatcatctggtgtatttgctgcatttgcacacgaaaacgattctcatttgcaatcgtcgtcatcctctgctttttttttactgtcagcttagcttccagcaactgatgaacatatcggttcgttgcttccctcgtcggagaaatggattcagaaaaggaagagatatatgctcaggcaggttttggtacctctggtgtcatctcaaaccccagtgctctggaaacacacagaaaaatgaacaaaatctcagcttgtagccacagcttataattagtactaggatttaggactgtttcggcagttgctttggacagttcccatgttatccgttatcacgtttcatgaattgctatagagcgagttttgtaaaaaaacaaaaaatcaaaacaaaaaaaatatacatatatcatataaatatagcttttaaaattttaatatttaattaatcatgcgttaacaattcaatcttagccacaatagtattgaaacatatgtacctcatggcgacgttgagctcctttggatcaatggtacctacaaggatgcagcaaagcaagcaagcaagaacaagtgagcaattaccgagtttcagttcatcgatcagtgcaaagaggagaagaggcatgaggaaaaaaaaattcagaacctgatccatcggtgtcgaagaggtcgaacgcctccttgatctccttcctcttctgcgccgtcagccgcttcttcctcacctgcttctccctcctgtacccgtcgccgccgccgccgccgccgccgccgccggcggccgacgatgcctcgtcgtggtagtagcctctgtatttgctcgcctgcatgcgtctcgtggttatttcagttcagagtttttcagcgaaattttttggttatttctgctggttcagactcttgctctgattctctccacagtaactgctgcttctgtttatccttatcctaattgacttcagagaagcaaccactgggagcaaactgaaaatgaactctaatttttttttcaacctgaagtatgtacatgtttaggatcacggttacgttgttctaataagcaattcttgaacttatttaaaatattcagataacaaggtttcatgcgcaaagcttacaaaacgatatgttgctaacgaaattcagctacttggtcagaaactaatctcatcaagaaaccggatgaaaaccagacaccaaaccaacaaagtaaaattaatctgaagaagtcgacatagccataggagaatcagcatctcaatcagcatatctgcagagggcaagcttgcataccatggtcaagtggtaatcggagctgaaactctctcaggcttcagagagatgatgatcgagaccaaactcctccagagcacctctgaagtctgaaacctcacttgcttttcctctcctctcctctttcttgatgcttcgtttcttgaaggaaccaaagtgagatggactgatggaggaagaaagggcgagtgattaagaatggtttcttgtgccgtgacgaatgaatcgaacagtgcaaagtaaagcgagaggaattgaagaaaaaaggaggagaagaaagcgatggggatttggaaagaacagcacagcacgtcagttgagtcttatcactcatcaggtagtcgtcagggattattcctgctccttccgggtccaaatcactttgccctgggtcctgggtcgcagccagttctcggcattatttgcacccaaaaaaaaagggttttggtttcttttgttggctgaattctggtgtttgtaccgaccgaagctaattttggattttatgactcgtttggatgggaagaaatttgtaggaaaaatataggaaaatatttacaatgagagcctttgaatgatggaaattgggttaaaatgaattttaaaggataggcagattttctccatattttggtacctcatgtttacaaatgctatgagaattccaatgcaccttctttctttctcgctctgataaatcaatatgtaaatatttaaaaaagaattgtttttttctgtgagacatccaaacaaacaattcatgcggtttatttcatgtagtatttaaccaggcatgatatttcaatcatgtttttttttccattctttgtttcaaaggaccccttaaattttaaaaatacttttaattaaatcatttgtttgccttcttagctattattagaaaaaagaaactgacaacgaaagtgacaaaaaaaaccctctagtactaaatccaagctcagccaatcacacatactgaatgtaacgggctcctttgaaatgtacgaattgaaaatttcatagcaattagtttaactcattcgaaaatcctttataatatttttttcaggaaattagttaaaatatctttgttctaaaggaggcctactactgaaagtaactttattgacatacatccttttgatttcaggagccttcatgggttgctgttttatctggcaaatacagaagtgagcaccatcgttggacagcgtagtctctctcttttggttgaattgctgattgaaagcaatgttatgtagtggaagcatacatctcaccagcacgaaagcacacaggctgtgttctttcgaagaggttaaaaacccctcccctccacacgtaaaacggagcaatggattaacgtataattaatcaagtgataacatttttttaaaaaaaaggttaatatgattttttaaaacaacttttctaaagaattttttttgcaaaaaaacacaccgtttaacagtttggaaagcatgcacatgtaaaatgagagaggtgaggttgagaacctttactaaaagacagttgaaagtgacgtgtataacttcatacagaatggttcaattatgatgacggtacaactacagatagaagatacatcctctaaagtgtatactgtaacctaaaacggaggtagtagatgctggtaaggtgtataccgtgttgtgcatgtgtgtgatggtgtacgcatgtgtatatgttgtatgagcgaaaaaaaaaagtttacccatcgccaacttatccaaaggagcttctataaaatagcatcagctctaactccatctttcgtagagctgtaggccagtcaaacaatttctttcgtagagctgtaggccagccaaacaatttcaactctacttaaaaggcaatagagcatgctaaagttctttcccaaaataaactagagacttggagttgtgttttggctggttcacaaccctacttcaaatccaactattttaagttaaatttagaagttgaagaccaagatttgatcaaactttttagtttggaagaaaatctgcctcaaaaggtaatattagaatatcaaaattttattagatgtgatttttaattataaacttgttgttggtcataatattagtttggtcaatttttgctcctatgtttgttaaatatttgcgattaaagtggatattactttggtaataatcaaaccttacgtaccgttaatgaccaatactttgcacggatttatctcaccaataaccagtcaaaccccttatctcgtgcgtaaccaacggcgtcacgatagctctagggttcgttaatgaattgcgtccctctatatattcagctcgatctcttcctctcttccacgccggccgtccatcgaatgcatcgattcaagtggcgaatttgcaaaggtttgatctccgttggaatcagattcgtgtggaatagcttcttcacaaatataatatcttcttcagatttgaatttgatttttaattccccatcttataatttgcttttcgatcggtttcgggccatcgatcgatctctccctctctaatttttttcctactactagtcttgttcgtttgactgttttttcaagattcatggatatggatttttgcacctattttggcgtgtgccagtacgagacgaatcccggatgaaacttttggtgaattttggctggatttgctgtcacacattcacgtgacggttcatgtcaagaacaaattaatctctcggtaattttatttttgtttttactcaaagttaaaaaccaccgttttaaacgtcagtttaaccccagcgctccgtgtactactaccaccagacaacaaaaagcaatctgaggataggatgatgcgataggcgatcgtgagcagatccagaccgtacgttacgcggctcaccgtatcctagccgtccacgtgtttagctggctggtgctggtccatgtgtgggccccacctaactcgtgacacgcgcgcgtcctttctcatcttctttttccaggtaaacttcctcatctccttcat

SEQ ID NO: 22763 - DNA, 7003 bp, Oryza sativa
cggtgctcgcgtgtcgctgcgtgcgcgcgcgctcggccgtggtgatatcccttgctcagttcatctgaggcacgcacgaatcgaatcaatcgaaacccattttatttccccttaagagttctttctcgcgaaatcgaattcccccacctaatatatagttagaatttcagccttacgggtggcgaatcctgaattttgtctctggattttgctggaaccatggacagtttctcacttttttcttggtttgttaatcgatctgtctgccagatctactacggtcggattgcttctttagtttgaatctgtgaaaccttttgttttcgatttttcacgtcggctgcttctttaatcttgattgatttctgatgacttccgtttcgattgtagcgtgccgatgatgattaaaagagctaacaatggtgaattcgatgaatgtgcttgcgtgccgctgggtgcgcagctatggtcagggtttcacttatcgcacgataatcgcgtgattatcgcggttatcgcgcttatcgcgggggtacggtaggggaaactggcgatatggtttggatgaattttgaccaaattcaaaattctggaaaaaaatcgaaaaaaactgaaaaaattcatggatatagttcttgatttgtaattgccaatggtgaagaatttttttgaaatagagtaagctaaattcaaatttgagggcaaaaccaaaaatggtttacaaattgaaaaaggaagaggataatgagccttaagtatcctacatattcttccaattattctcaatttctagttttctacacatattcaaccatatttttgatttttttaccctatttattttacatttacatgatttcagctacacagcccgcgataaccgtgcgaatatcgcggttatcgtggcaaaccgtgcgattatcgcggtgaaaccgcgaaaccgtcgagttttgaattcaaatttttagatgtgatttttgtgcgattttagacgattatcacgcgattatcgcggttatcgcgctaccgtggggtggcgataaccccggcccaaacgataaggtaaaccctgatggtgatatgcattcttacgcagaggcacacataaatcgaaatcgattgttttttttcctcctctcatgtgtttgttcccctattatgtgtttcttctcttctgttactttcgatgcaaccctcaaaatctgatgttttatgttttcctttttggcaaattcttgatggaatgagaatatgtaaacacggatgtaaatttatgtaaacacggatgtaaatttatccattaaccagtaatacgtactacgtaaattgaaacaaatatcacatcaaggtcgttgctctctaagaaattgaggaaaacacctgtgaattaatacggacgcatttgtacaggagacccatgatttgggtgaataactggagagctcttcgttttgaaaataaaatcggcacgaacaccaacggtggtttctggtttgtattgaatggtctaacaaacctagaaaaagtagaccatatgggatcattgtactaaactccatctaattaactactactccctccggtttaattttaattgacgttttggacaatgacacggtctacaagatatatctttaactttatttttctattataatatatataataaataaatgtatgtttacttttattatagtgctttaaaagacaaatttatatatgttgttctagtttctttaaactaaatatttttaaagttgttgatggtcaaagttataaaagtttaaccttaaccttatccaaaatgtcaattaatatggaaccgaagggagtatgtgggaagagaaagtttgaaaggaaatcacaaactggaagagagttttaaaggaaatcgcaaacaagaaaaactgatactctagtttggaaggaaattctgtttgcctcatcagttgcaaaccacacatcaagattacaggttgaagagttgcatcttctgttcagcttcagtacttccaagcaactgcgacagtgagccaaatgcacaaagcgtaacatgacgaaaaagagattctacataattgaataaacaccttgatctgatggaaaagacaccagattctatttgctattatcatcacacagtacatctgattgtgcacattacttttgaatgatgtacagaagcatcctaatgcatccttggacacagttctaatgctaggcctattgtaccccaaaggccttctggatttcagctatgactcggtctgcgacatcgggaccaaacatcctcggcaaatttgaagtcaggtcaacctcgattgacttggaccttacaatttggtccctctttatcatgttttctctctcgccttcttccatctctgaagtatgatcagcacaactatcaagccaaatttgaagaagtgccctagcagctgttgctagttgaccacgcactatctcttccaaggtaccctctcctccttgcccacagtcgatgctcatcagtattgctgtcagtgagaaggcgctgcgcacgaagagggatcgcgatcagtatggacgggcctgcggcaattcttcgaccttctcacgctgtttgtccacctgagtattttcatagtatctctctatgtattcgggatggagcgcaaggtctttccgtgggagaaggtccagaagcaccacgatcgaagttgggctaccttgtataaattccatgaggaaatgtggagcatctgtcgaggcgttcagaaagatgagaagagatgtaatgtcgattgcgccatttgggactttgcagtgtagtgaggactggagcatgaaatcaatctgtagacaagaaaaataataattcaaccccacttgtcattccttgcagaactcaagaaattattatactgtgctaagcattaggcagcttgattcaggtgttcaagtggtgagattaataacattgtttgaatgccattgatcattttggccactccaattgtatctgttcaattggtgagataccttttctttggagagtaaaaagaaatctttgagtggtaggaaaagatcacgaatgaggcacaaacgcttgagcagaccaattgttgccatttcaatcttggatgtttcgcagcactaataaatcaactaatttgagcattactaatctaacaaacaatcataatttgctccaaagagttggattgtggatcttggcttctcaaagcttgcaagttcaccttgatagggcaatcacgaatagttcggcagcaaattttcagtgtaaaacagtttcagtaaactgtactgaaacagtttcagtgtaatttactgcatttcgtcataggattgctctactctacctgcctgtcactacaatttcactatttcatatgactaattgtgctctagaaattactgcagtagaaataatctccaattaacagaacagtaaattttaattagcagcttatacttcgtggggagagaagctaagccaatcgcgcaggcacaagctaaaatctgtatgatctgacgaacaaatgtgagagaggaagggggtgccattaccgtcgatcccggcgcgccgcggcgcacgtcgagcgagcccacggcgttcccggcgccgccgccgccgctgcggaacttggcgacgtcgggcggcacggcggaggggagcagccgcgcgcccagccgcgcctccgcccgggacgcgagctcccgagccacctcccggtgcgccaccgccacctccacctccaatggcgccgtcgcgcccggcaccgacgacgcggacgcgggcgcgcacgcgcgcacggcgcccctgagctggggaggcgccgcgcgggggagccggaacgcgccgcggtggcggaggggcgggtaggagatggtggagtgggccggggaggtcgccggcggcgagcggaggtggtgctctgggcggagcatgaacgacgcgaggtgagaggggagtgagattttcctctttttttttcttatagaaaaatgactctgtgttacaaaatccatcgaaaggacatttctactgcaaaaagaaatctcgagacggtgaaaatatgagataattggcctgtttcggcttctttttgctgcggcatgcagccacagcaacgccaacaactgaacattcataattgaacttttacgagcagttcaaattaaggcactctgtgattaggtttatatgctagtttttgaaaaaaaattaagcctaaaagacaacattttttatttggttttctttaaagctataagcatttttacattgctatatatgactccaaaattaccgtttataaaacaactaagctgaaaaattaaattaaaactataagcttttaaactatctgagtgagtgtagctcaactagtttgtattttttttaaccaactcacctaaaatcaaaatctagatttgacaccgttacggctaattgatcttccaatgagatatgttgacacagtttttcaaaggtgttcataggggtagggtatgtgtgtatgggttcatagtactacctctgtcccattataagtgcagtcgtgattttccgtgatcgtccatcttatttaaattttttaaaaaagtttaaaaacataagtcacgcataaagtactattcatgttttatcatctaataacgataaaaatactaatcgtaaaaaattttcaaataagataaatgattaaagttgggtacaaaactcatgactggtgactgcacttataataggacagagggagcatgtgttatgagcatatatgtttatacttttttttgaaaagcatataaagagcacctaatcccagtgttaaattcacgtaccagggacaacaaaaagctgcctgaggatgagataggaggaaaacgatagctgatagggatcgtgtgatgggggcgtgagcagatctgtgccgtccgttccgccgcccggcgcatctcagccgtccacgtgctcgtctagctgccggtccatgtatggggcgtatggctttttcttcttcctcattctttttttgagctttgagtgtcctcatctcatctcatcacatcagctctcgccttcagttcctccccgccgcatctcccatctcgtatttcccatcctcccttcgcgcgtctgggtgaggattcgggcttgtacttcttgttaatccctagtccttcagtccttctcccatcaggtgtcgatttggtctattggtttttcttttttactttgcttaattctcgtttttttttttaaaaaaaagggttgttctgttggatctccagctggagccaaggatacatactagtagtaatttctgttggtttgttttagtgatttatcttggtttttttagatctggtatacatctcccgtggttcgattgggctgggtatttgttctttgaagattggtgttttcagtttttcttgcgtgctagtgatgattaaagaagttaaaaatggtgaatcctggattaatgtgctcgcgtgccgctgtgtgcgcgcgcggctggagattttttttttctctctgttcttctgtgagttcttctatggaaaatatattttttttcttctaacctctccttaatttgactcgtgtgcgtagttacttgcaggttgtcagaattactaggttttgaaattacgactggtactccaggctggtagagcggcaaggtatgaaaatgtataaattcatcattgctgggctgcggctctatattaaagagagatgggggattgcaggttttgcccctcccccccccaccccacccccccacaatagatggaattcagctctatgcctagttcgtttaatccctcccacaaggggattgagggagatttggaggggatttattccacacctattgttattgtggtgtggaattattccccctcaatcccctccattcattctctcttgggtttaaacgaacaaggctagcaaatccggatttttgtcagaattttgccttaaaggaatggtagatcctgattttttttccagaatcttgctggagcaatagacaattctgtttgtttgattgatctgtctaccacatctaccgtggtccaattgcttcttaatatgatttgtgaagactcgtgtttcaattttcaaggccgattgattcttttatttgatttctgaagacttccatttcgattctgtcgtgctggtgatgattaaagagctagcaatggtgaattcgatgaatttgttcgcgtgctgctgggtgcgcagcagtggtgatatgcatccttacgcagttcatatgaggcacgcataaatcgaaatcgattaaaaggccggaatgttattccattatctaaaaaaaaacaattgcttcttaatatgatttgtgaagacttgtgtttcaattttcaaggccgattgattctttaatttgatttctgaagacttccatttcgattctgtcgtgctggtgatgattaaagagctagcaatggtgaattcgatgaatttgttcgcgtgccgctgggtgcgcagcagtggtgatatgcattcttacgcagttcatctgaggcacgcataaatcgaaatcgattcaaaggctggaatgttattccattattaaaaaaaatcgaaatcgatttttttcctcatgtgcttgtgtttcttctttcctgctgccttcgatacaactccaaaattgctgttttattgattttgaaaaggcttatgatagagttcaatgggatttcctgtatgaggtgttgcagaagaaaaactttgaccagcgggttataagttggattaaaaagatcagtgaggggggtaagatgagcataaatataaatggggcagatgggcataaatataaatggggcagatgggccctttttttaaaactttcagggggttgagacagggtgaccctttgtcacctattttgtttaacctggtgggggatgctctgtcagctattttagaagaacctgccagaaatggggtcttaag

SEQ ID NO: 22764 - DNA, 31292 bp, Oryza sativa
tttctgggaggatgtgtggctgaacaaagtgtctttaaaaacctgcttggctgcttcccatctctgtattcagcaagttatcaacacaaggcactgtgaatgagttgtgggatgggggggattgggatttacatttcagaaggaacttgaacagtcaagatagactagagttggataaactgcagagggagctggagggggttactctaaatggagagagagacatggtgatttggcctcatgacaaaaagaaaattttctccacaagatctatgtatagggtgctaaaatttggaggggtggtagatcaagaaatccaaggggtgtggaggtgcaagatacctctaaaaatcatgcatttcctctatatgacagggagaaacaggattccatgtacagagcaagctttgtctaggggaagaaagcactacacatgttttatttacttgtcccattgctaaatttgcttggagtgtaattgctatagttctaatttgcataatgtacctatctctttctgggattgtatcaaggttgtaaccaagaaaatggggtttcaggggggaatggtggtttttgcaggaatgacctggggtttgtggattaccagaaataattgggtttttaacaataaactgatcaaatcacctttgcaggtcgtgtacaggtctttgtctttgatgcaaaggtggaaggtgctgctaaaagaaaaggagtgtactagcttggatgtctttcaagcaaagataatgctgacgttggaagtgctgaagccgactgataatcttcctgatgatataggatagttcatgggaatgggctctgaaaatatttggtcttttgttgtgggtgttaaaatgtctggaagggggctaggtttagtggatgtccaagcttttgttgagctggtttggaaaactggaatccccagttttttgtttccttttgtttcgtttttctgtaagaactctgtttcgtttgggctttttctaaagccgggtaatatatgcctgttgtcaaaaaaaagatgctgttttctgtttacattttttccttttggctttgccgttcgaactctccattcttgatacaataattgtgtatttcaaccgaaaagagaaggcaaaaacaactctccaaaaaacttggagtttatgttttgtgccatgtgtgcttctagagctgcgagtagctgtagggagccaggattagtatggctggtagttagtgaatttctgattgatagcatttcaattttgtcataaactggtgcgttgatctatgaaattaggcagttagattcatcgcaaatttttaatgggatgagaatatgtaaacacggtatgtaaagttatccattaactagtaatacatttgtaaaataaaataattgactgtcctttctctttaagaaattgaggaaaccacccgtgaaatcagtttactggtacttataaattatattatctttttgggcactttcttttaatgagggcatcgatgtatctctagaggaggccgagatttgggttgaaacggctagagtaaaaaatcggcatgaaaaccaacactacattggtttgtataattgtatagacaaaattatgacatctgatggtatttgcaattataaatttataatcacacaatatatctgattgttcaagcaaaagggacaaaagactactaacattactttcgaatgatgtacagatgaattcctggtcacagttctaaagctaggcctcttgtaccccaaaggccttctggatttcagctatgactcggtctgcgacatcgggaccaaacatcctcggcaaatttgaagtcaggtcgacctcgattgacttggaccttacaatttggtccctctttatcatgttttctctctcgccttcttccatctctgaagtatgatcagcacaactatcaagccaaatttgaagaagtgccctagcagctgttgctagttgaccacgcactatctcttccaaggtaccctctcctccttgcccacagtcgatgctcatcagtattgctgtcagtgagaaggtgctgcgcacgaagagggatcgcgatcggtatggacgggcctgcggcaattcttcgaccttctcacgctgtttgtccacctgagtattctcatagtatctctctatgtattcgggatggagcgcaaggtctttccgtgggagaaggtccagaagcaccacgatcgaagttgggctaccttgtataaattccatgaggaaatgcggagcatctgtcgaggcgttcagaaagatgagaagagatgtaatgtcgattgcgccatttgggactttgcagtgtagtgaggactggagcatgaaatcaatctgtagacaagaaaaattaataatttaactccatttgtcattccttgcagaactcaagaaattctaccacgctaagctactgagcactagggagcataattcaggtgttcaagtggtgagattagtttcataatttgaatgctgttgatcattttggccactccaattgtgtccgttcagttggagtgattttgtttttttgtttttggagaggaaacaaaatctgtgagtgataggaagaatcacgaatgaggtacaaactctagaacagaccaattgtttccatttcgatattggaagcaaatgaactaatttgagcattgccaatataatgaaaagtcataatttgctccgaagagttggattatggatcttggcttctaaaagtttgcaagttcaccttgatagggcaaatcacaaatagttcggcagcaatttttcagtgtaaaacagtttcagtaaattgtccaagtcttttgacatgccattgatctattctgctctgtttgtgccagcctgtttttaccagtttaccactaccatttcactacttaattagttaattcatatgattcactacttaattcatatgactgattctgatggtgctctagacattaccagtttaccactaccatttcactaattcatatgactgattctgatgttctccaatcgacagaacaggtaaatctgtacgatctgacgagcaaaagtgagaggaggggtgccattaccgtcgatcccggcgcgccgcggcgcacgtcgagcgagcccacggcgttcccggcgccgccgccgctgcggaactcggcgacgtcgggcggcacggcggaggggagcagccgcgcgcccagccgcgcctccgccagggacgcgagcgcccgcgccacctcccggtgcgccacctccaccatcacctccggctccgtcgcgcccggcgccgccgccgacgacgcgcgcacggcgctcgacgttttgcccccgagctgggaacccgcgccgcggcggcggcggcggagggggaggaggcgaggagcgagggtcgggaaggagacggcggaggacggcgagctggtcgccggcggcggcgagcggagttggagcattggatcacggcgaggtgttcgacgcgtggacgaacggagcgagagatgaatgtgagcgagagggagtgagaaggattccgtgaacgtgtagaactatccctcttttacttttgtaactagtgcagtatatacataggagatgattgaaagagagatctgaaagctgctgttacaaatccatcagattccaagacattatctattgcaatttgcaaatgccttgttttttttacggacactgcattactgaaatgtgagataatgccaattgaggtggtatttgggaatcacaaaaatgactagtttagtccctccttcgcaaacaccacatgagttggtttttttcttttatacttcctccgtttcaggttataagactttctagcattccctatattcatataaatgttaatgaatctagacacatatatatctagatttattaacatatatatgaatgtgggtaatgttagaaaatcttataatataaaacggaggaagtaccatgctaatgactgggcagctcaccatgtagcgcataagcttgggaaccgaggtgatacttatgccctattcttttctccaataaaagttggataaacttttggatactcgtgacacgtttttcaaactgctaaacgatacgtttcgtgggaaaactttttatatgaaagttgttctaaaatatcatattaatccatttttcaagtttgtaataattaaaacttaattaatcatatattattactacatcgttttgcgtgaaacacttaatcttcatctttatatttatcttcaggagattaaacacaccacctaaaccttaatacacttgaggccatctgctactgctgatcactcactgctgttgctgcttatcgctccatgggccaaggcccaaagctcacaaaaggccagatgctgcacactagctttcttcctcagtccactagctcttcattttcctttttcccccctctaattattgtgggggccatattactgaaggagaattcgaaacatcttgaatcttctcagagagcttgagagtgaaatgagtgggccggccaaagaagaccactatagaagtgaaaggggagggcaagagcggtttgaaggtcaatgaaatgggttcagttcccttgtcaaataggggccccgacccatgtttaatcactgaagtgtggttgagtgagatgatccgcaaccaacaaatgatttgtcattgtctctaaatcactgaatgaattcgttttttatttatatatgagaactagagagttcacaactcccttttcatttattttgatcactttttagtttctgcgaatacttatcactaaacgtttaaaaggttaataggatccacgccaactataaatatgccatttcggataaatgccactactattcatgatattggttacgtgccactgaaatttgaggagttagaactacactatcaccgttgcatttcccgtcagacccctaggcgttagacccacatatcagttccatctttctccatcctccctcttctttattccctatctcttcctccatcttctacgactgctacaagggacatcgacggcggcgaccgagccctcccactgcggatgggataaggtcgatgacgacagtggctcccaagccctcccaccgtggatggggttgaagacgacagcgttggcatctcctgagccctcccgccacggatgggagaagattgacaacggcggtggttcccaagctctcctgccgtggatggagtcaaagaagatggcggtggcagctcccgaactttcccgccgcggaggtggtcgacgacggtggcggtgacgatgagcgccggagagagagagagatagggggtaggggaaagagaggagagtgaagggaggagaaaaacctggaattgacagctaggtcccacgtgcaattgatgctaacgaaaagttttgatggatatagcgatagagtgacacggttccgatttccctaaatccgaatgacacgtcatagccgatattgtgaatagtactaatttttatctaaaattacatattcgtagtgatatggatccaagtaatcatttatcaaggtagcgttttgtctctagtggggcctaataataagaagatattagaacatgccaaacaattatctatactactcccaatcttaaatttcgggtgtttaggtaaaaaaaatcagcatccaacagtagcactatacaaacactcccgaaaaatccttatgcctatatgcagaaatctagctctccgcaagtttgaagagggtctagctcccaatcccatcaccgagcgagtttgcctgcaccgagaggatggctcgtcccatcagaatagaaaaaaggatgctgatttaattttgtttggaagttttgtagttgggccattgtttttgttgttttgagaagttaaaataggctatcttggaggagagcatattttttttcttaaatctgattagagattcccaaacaaaaggtttaggggattatattttgatactaagttggtgatgctcttatgtggcatatgtatttagaaacttataaattatgtataccacttaatttagggttattttggtcattttacctagaaaaaggtgattgtgttgttatgtgtgatggtcaaaagtgaaaggtagataaaaatggagggagtattttatttattactctatctcaatgttgcttaactataccacaatccagttaatcacaagtttttccataacccagttagtcacaaatgtggcaaagaaagtaatagtacagcacgtgccttcagtgtcaatgccagaactcacccacgaaataattagtacaaaagtaatttgaagtggaagcactactggagaaaccatctttactcggtcagctaaaaaccacaatagtttcggttccaataaaaaccaagactaaatatatcttttagtcccagtttataagcagaataagattgtgttttttagtcctggatatctatctttagttccggatttggactcccggttgtataaccgggaaacaggcaattacgaaccggagataaagatgacttgtgcagcatgaagtccatagaatgatttgaaagcatgcagttttaaataaataaaatgtactgtatactagctagtgtttgcactttgcagacatacactgtgattaacgttgattattattagctctatttcacaaagttattttcactttttgctaatcaagcttttttaagattaattaagtttacaaaaaatataacaatacttttaacacaaaaggaacatattattaaaatatattaaaatctaaagttgatgtcatagatgttgttaacttttctataaatttaattatactaataaaaaatttgactaggaatacgaaacgaatggagtagtaattagtactccctcccaaaatatttaacgccgttgacttttttttaagtaatgtttgaccgttcgtcttattaaaaaaattaagtaattattaattctttccttatcatttgattcaatgttaaatatacttttatgtatacatatagttttatatgtttcacaaaatttttttgaataagacaaacggtcaaatacgtttaaaaaagtcaacaacattaaatatttagggacggaggaagtatataattaaacttcctatcttcaaaacaaatctacaaagattagtttagctctagcttcttgaaagtaaataccgaaatgaactccttacgtaaaaaaaaaagaaatatatatacaaagataataagcggatggatgtggtggcgagagaaacctctagagccatgcaaaaaaaatgcttaattagcttcccatgaacgccttgcggatctcggcgacgactctgtcggcgacgccggcgtcgaacatcctcggcaggttcgccgccaggttgacctccagctccgccgccgccaccttcctgtccctcgccaccatccgctccctctccgccgcctccatctccccgccgccgccgccgccggcgcagtgctcgagccagacgccgagcacgtccatggccgtggcggcgagctcgccgcggacgatcccgtccagcgccgccgcccctccagggccctcgccgcactggacgtcggccacgacggccgccggcgaccacaggctgcggacgagcagcgacggcgagacgtaggggcgggactgcggcaccaggccggcgacccggcggcgggcgcgggcgtcgaggcccgtggcggcgtagtaccggtggatgtaggaggggtggagcgggaggtcgacgcgcgggaggaggtcgaggaggacgatgagggaggccggcccgccctggatgaactccatgacgaggtgcggcgcgtcggtggcgccgttgaggttgacgatgagggcggtgatgtcgatggcgcctccgccgccgccggggagctcgcggtggaaccacgcctccagcatgaaggcgatctgtgtgcaaaggacgaaataaataaattattactacaaatttacggttaaggagctgagagctggattataccgttctatctatgtcccataataattgtatttatgggatatgaatttgtcccaaaataattgtcataatagagtaccgatggtcctattaatcacttcttattaaatctctccctatttgatcctcaactacacttcgactcttaccaatacattatttaaataagatgtatcatagcctttcttctcaatccttaaggccttaagggtgtgtttggttgggtggatgagcctcgatgggagatgaccgcccgatttttcgaggtgtttggttgaagggcagggtggatggggcggcccgaaatagggaatattccctcaatatgcgatttggctggatgaagccatccagttttggtctagatgatgtgtcatattctgattggctgtggttggtttgattttctgttaagcaaggtctaaatgatttttttctcctaaaccgtttatctaatttatgatttgattacaccattatatatatatatatatatttgttacaattaaatctttaaaacaagatatcggatgattatattttgataaaaatatataatgacaaatgggcccccactaacttttgcatttttccattcatgggatatccctccaatcaaataagaaattggatcgctatatccatacaaaccaaacaaaaaattagatagccatatttaacaaaatatgatggacatatcccatccatatatgaccgtgaaccaaacacaccctaatatatgctacacaacctagacagtttatatgggaaaaatgtagtaaaagttttcaaactattaaacggtatattttatgcgaaagctttcaatatagaagttgctttaaaacgttagataaatttatttttcaagtttgtaataatttagatttaattaatcacgcgttaatgactttctcgttttatgtgcccgcttttaacctacatccttttaggagattcgaacggggccttagctttaaagatatttggaagtgatgagatttgtagatttccatgcattttaaaactttgtgcttccaaattttcaactcagttctaacaaccaaaatttgactatgaagccagcacacgtgcacgtactccctccgtaaagaaaaaaaatcagcttagaaagagatgtgaagtacatatttattatactagtaggtgttatattttcatttaggtgagtgcttttgtagacggagggagtacatttcaatgtaacccgaccaaaaactactatgttttttttcttcctcgaaaacccattcaaaacgtaaggaaaattcgccgctttgatctttcgttctcaacgatccatccatcgaacggaaaaaaagaacaaaaaaaactcgcaacgcgctgctgtgtgtgtacgtaccgaggatcccggcgcgccgcggcgcacgtcgacggagccgacggcgtccccggcggcgttgccgaaccacgcgacgtcggcgggcacctccgacggcagcagccgcgccccgagccgcgcctccgcctcgccggccaccgccagcatcacctcccggtgtgccagcggcggcatcctcgccaccgcctcttctctgctcacccgcgacgccgacgccgccgcgctcctcaccgccgccatcctcctcctcctcgccgccgccgccgcggccggcgacaggcaggaggggcgagacggcggcggggcggcgcggcagcagctggtcggagcaggaagcattggtcggtcgcgcggacgatcgagctcgatctacgtactccgagattcagcatctcgcgccgccgcggtctcgtcaccctagctactctcgtgtcacactgtgtgtacgtgctcgtcgagttgggctatataggcagcttgggttaggcttggtttgggtacagttgcttccaaatttggttttactgtttctgtccaatcagccagctataacctcaaccagtcaatcatagcgaaatttcttgaaaatcccatcaatatatttcatttgacagaatagctcattaatttgtttgctagtatgcattgaataaaacaaagtcaaagtaagcaacacgaacaaaattgtctaaattacatatagtggagacgttttaaatatttagtgagagtataagaataataatactcctaggcttctagctagttaagtagtgagacctttgtttttaaatatatttactataattttttgaacgaccatttaccttaagtactaagcactacctctatcatacaaatactttatattttttatagttctagacttcaaaggccctcttttctatttttttcctaaatacatatactttatacatattttttttaataaaagtcttgggtattattttgaatacccatgaatcatggtgggtccgtcttaggcataaatgatgctttctgggaattgagatatatatatatatatatatatatatatatatatatatatatatatatatatatatatatatatatatatatatatagtaccatttattttgttttggcttgtttacttgaagtataacttatattttcttatatttacactcagttttcaataagagaaatgataaatattactagtagttaatagcatcatatattttaaaataaaggaagtatgttcgaaaatatcccacacaacaaacgttacccattttttcttggaatctgtcaaaaagtcttgtttcacctatactgttcacacaccatatttttttaaaaaaaatacaagaaattggaaaaaggtaagtcaacgatataaggttttgtgattttcccatgtcaaatattatttggaggatatatatatatatatagaacatagtttgatccagatctgaatgtgtaagtttaacaaacattcacttcatcaacatacagcccatgaaccatgaggaacttccaaactatttgaaaattgttcacgaccaccttttatttagataaacgaaaagcgttacattttcaaaagttcccgtccatccgtagcatatacacgtgacacaacaaagaacacaagacaaggcacaagcactataaaccgtgggatccgagtttcgctcacttattaactgcatgggtaactgtgttattggaatgcgggccataacaaagtaccagaacctactctctccataaaaaaatctctccatccaaaaaaaccaaatctacttagagataaaacacaagatagtaaggcagaataattgagatggaatgttatgtcctacatttaaataggttaggttttattggacggaagaagtatcataagatttgcttccatagactaatattatatatgctagtttaagataaaaaccggcacctatagtatttgtactttctttttttcaaaaaaaaaaagtagcagctatgctaaactatagatgccgatttttcttaaaaaaactgatgctcgagccgagctgagccaacaccccaccacgataaaaatcgtgccccgccccatgtctcctaaccttatccactcccatcgccctatctcactctcgcactctcctcctcctcctcctcctcctcctcttcttcttcttcttcttcttcttcttcttcttcttcttcttcttcttcttcttcttcttcttcctctccaccctcctcggcatctcccctcctctgcatccacctcccccacttctcctcctctagatcaagcgacaacgaccggatggtggagaaggaggctcggccctcctctccgtccgatgatggcagtggtggggtagaagtcagcgcgaagggcgaggtggcatccgatgtatgggaaggaggtggaggccatcacaatccttccctcgtcaagctcctccccgacctcgccgagcgcctcaccaacagcccactggatccaacagcgtggaccgtggcgtttgcctagattcggcgatggtagtggtggtggagaaggctagcgcggaggcgcgaggtggcggccgatggcctcgaaggagatggaggtagaggccgtcacactcctccccgacctcgccgagcgcctcgccgcgaacatccggatccagcagcgtggaccagctactccgttgggccttttcttttcttgattaattgaatactttaggtgtcggttgtgtggtaagaaccaacacctatgcccaaaagtaaaggtgttgataaattggtgccggctggaaaaccgacacctatgggatatacggatgaggtagtagttacaccaggaactgcatagctaccgcatccgtcggtggatatgtaggggttgttcagattgatgtcatttcaaaccataccaatttttagtaaagttgtcaaatatgtgcatctatttttttttaccatactctagtaaatacataagaaattctgtcaaaacttagcaatattaccaaattaccaaaatatggtaaggtttaatctctctaagcgtggcactaccatttgtaagatccgacggctacgagtgatcgaagtagcaacatccacatgcatgaattgtacttccttccagtagtcaccactcatcatcagcacgagccagtcactctcagttagccttagcttacccgttgcgtcttcctgttggtgcttacaactgtacgatcggtacgtgaccagtaatagttgcagtatcgccccaaaagcggccaaacagtccacaccaacacaagaaagtttgcctcctacttctctttctttctttattcttaaaaaaaagagagaaagagcatcgaatggattatataaacactggtggagaaacgctttgttgtcccggttggtaacccctttgtagtcccggtttttcaaccgggactacgaatccgggactaaagatcgcaatctttagcgccggttcaaataaccgggagtaaagatcgatttttagtcccggttggtaacaccaaccgggactaaaaatatggtcccggttgttgttactaaccggaactaaaaagttttggtttttttttcttttccttttatctggttggcatttttccttttttattgttatttagcttaagctagtggatcgaataaataaaatcaacaacaaagcctaaaccatagatcgaatgaataaaatcaaacaacaaagcatccatattgtttacacttgttcagaactacaacatctcatcacagagggcattcatcacagagaacaaagaaaggaaaaagaaagttcacatctacgacatcattcatcagatagcaaagagaagagaaaaaaaaaagttctcctgccgctgcctcccgaccggcgccggccgccgccatcccgaccggcgccggccgccgcctcccgaccggcgcagctggccgccgccgcccccgacgcagcccgccgccagcccgccgccgcctccatctcgccgccccgcgtcgggccgccggcggcggcctccatcctgccgccccgccggaggggaagggaggggaggagggggaggagaggggaggaggagatggggtgagagaagaaggaagagaaggatgggaggagaggaggagagaagaagataagatggagatggctggatgggagaggaggagattaggatgaaattaataggagactttgcatgcgcgtgtactggatagaggttttgttttaccggttgtttaacaaccgggactaaaaatcctaactttaccaaccgggagtaaagatcacggtctttactcccggttggtaacaccaaccgggactaaagttagaatttttagtcccggttggtgttaacaaccgggactaaagatcacgggagggcctgacagcccctgacaacatacgaaccgggactaaagatcccggttggtattaccaaccggaactaaagatcaaatatgcctactgtagctaccaaccgggactaaagatcatctttagtggaaccgggactattgtggattttggttgactgaccaaagatggtttctccaccagtgaaataataagaaaattgcaaaaagaaaaagtaattaaaaagatttgatgtgtctgcatcctggtcacttccaaaagtgtgacaagtttcatgaccaaattaagtaggcgttctggtggaaaaatgttaatctgggtttgtctgttagataactagatactatatactccctccgtttcgaaatgtttgacgctgttgactttttagcacatgtttgaccgttcgtcttattccgcagatttaagtaattattaattcttttcttacatttgattcattgttaaatatatttttatgtaggtatataattttacatatttcacaaaagtttttgaataagacgaacggtcaaacatgtgctaaaaagttaacggtgtcaaacatttcgaaacggagggagtatgtcccaagagggctaaacaccccaatccatgtcaccagaatcagaagatggtagcctggtatctatctaggcattggttaaagctgaaagcctgaaactaatgctttgcttcaggttacagagcttgaaaagttatctgaagaacaaaccaggcccccagaccccaagcctggtatgacgcaacagcttctgcacgcaatttttaattgagtccatttccatccaaacatcatgaaaaatattaacgagaattcacaaaacagtaagctcttattacttctgttgtgtaatgacaaagcatggatactactgaatccacttgcagatcacaacagccgctgaaatacaacacaaggcatcacagttcaattcaattcaatcgtggacagtctttgagcctgatgttctaccagagaatcgatttaaatatgaactaggaaacaaatgcagccctctcatacacaccacaagaacgaacgatacatttcagttagtcaactgaggactagcagcagcacaagtgcccatcaccacaacaagttgagcaagattccaacccaacccatgttctccaatcttcctttcagtctcgacgaaactcctggtcttcgctggctttttgtcgctgcgggtgattttccggatggaacaacctgttaggtaaatacatagatatcatgaaactgtgcagcaaaagtaacagttttcactagccacttatttcagtgcttacaacaaatgaaggtgattgatcctgttatgttgtctggtcatgaggtgtagcagtggaatttgtaggccgcctcctcctcttgcatggctctgaatcgacttcgacatcttcgtcaggaaaattctgatcagatacttctggacaagcaaaaaggaacacgaaacatgtgttaattccaggtttcatggctatgagaacttgagaaggatgacaattgatagtattaatcaatgaagtttgctgacacaagcaagaaacagtgcaacaccatacgcaattgcagtttactgatctgtttctgctgttccattatttgtaaagatccaaacacttgcttgtttgttagctagttttaggaaaataagtgttgaaaaaatctttttacaagttagatgtgattacacataaggtaataaatacgatgaatctatgaacaaagttgttctcgaaacagttaaaagtcaaaggcaaaagggaaaatttgtttggtgaaccatgatgcaacttgttgagtatatgcagaaaaaaacatggttacaaaatttgtgcattgatcaaacatgaattgaacacaatagctacttcaactcattaattttttttacatttgcagcaggggcaaataagatccatattatgtataacttttcatttaaaactgcaccatttcgagcatacttatttaccaactaaagagtctaactgcacagtcaagactgaataataaacatatcctaaactcgtatcaaaacagaagcaagacttgcactgaagaaagcgatttgcaaataagatgaccaaagtagtaacctgtgcttttatcagcaagaattcctccagcacaactcttcgcttctcttccatgcacccgaaccctctgtcggaccatgtcagtacccgactcatcgtcatccacagaaaaccccaccgcatcattcttgcggttcacaccggcatcgcgtggtctgaaacgccttatccatggattctcagggaagcagctcatgcctccatcatgagcgtgagcatcattcctctcagaccttaggttgtcgcacacaccctcccggtgcaccctgaacccaattgcgccacccgcatgactcctattcctgtcaagcccatggtggtcatgcctatagagttgttccatgaaggatgcctccatggagcttatgtacaagctgtgcctctcatttgtccatccatctgacatcaagtccaggaattgatctccctgccaagaagaatcacagcataaagttttttttaaaaaattcagggtctgcaaattgcttagctcatacaaaaaaattgactgaatactgctgttacatagtaggaaaggaagtcctgaaagcaaatgtccaagatcatatatgtattactatgttcttaatcagaagatctgatcatagacacaggggtggtaaatgatcaagtgccaatcttaaggagtggaaaaggataaattattcaattttagtcagttttttttaaaactgaaaatgtatatcttccttcagttttactatgacatcatcagttgccagttggttgcagtgacagaggatgccctgaaggaaatgttcaagatgttcattctccagtttcttaggcccaaatatgtgcatacagaaacgagaaatgtgtccgtacatcaatttgcaagatgtgatcaaaacgagaattttaaatttgtatggacaaatggaaatcaggtgcgcagaacgcatggttattgcagcctgcatgagactacacaaacagaaagtatggacactcccaaccaataaatttgatacaaataaattcgatcgtttaccttggtcagcggctcggcgttgatcggcgggttcaacgacacatcccccatgacaaaatctcccaagaagcaggacaaaaccaaacaaaaattgaaaaaaacaattaaccctggaatccaaatctctccaaattggacacccccccgaacgaagaaatcacaaggccctggattactacacaagcaaatcagaggggaacaagtgaacaacccacaaacaaatcaagaaaccagcaaatactttcttcttttctttttcaaaaaataaataaataaccgcgattcagagcaagaaaccgtaagcagagaaaacccagaagaacagaacgaacccgcgacgatctcgccttgcctccccggtggagggagagatcagagacgacggcgagatatatagtctagcgcgacgacggatcggagaggaggaggcggaggcggttcatccgggcggcggagaggggaggggggagaagtgtccaggtgggggaggtggggcccaccgcacgggcttttacgccgacgtggtggtacttttccacgtggcagccgcggggctttgtcggggggagaaatatctcggcgcggcgccccgatattttttttcgcgggggtgtgtggcaggtggggcccaccgggggtgggggtgggggtgcggaaaagatcagtgggcgggtgacgtcactagggaggggatggggtttgacaggtaagacacgctggccgagaatgggaggttgatggggggtttgccgatttggggattgaaagggtgatccgggtgggaatcttttcggggatattattgttttgatgcgcggatacatggaatggtatgcattatcgtatatatatacttccttcgtccttaaatataatagattttaaaaggacgtgacacatcttacatcctagcacaatgaatctagatagaatgtcggttcaaattcattatactagaatgtgtcacatccataaaaaaaatccctgtcgacgggggatacccgtagaccggatatagagggtattggggtacgctggtataaggatctacgtaatacgacatcgagtaatcaaaagacgagaattatactggttcaggccccttgacaggtaatagccctaatccagttgatatgggattatatggtggaaaacacatattacaaaggaaaagacggaactcgggagattcgacaaggttgtagtcgagatgatccgactagctctcgtcaacttggctccttgtaggctctgacttcgtaggctgtgttggttgtcggggctctgagattcgatgccttgtggtctccccggggggtcccttttataccgcagattggatgttatctgagtaggactccgatataccagacctgacacgatacgtaggtaacccaattcttgtccgagaaggtctctccttatctgttgtctttacgaagagtttccttaaatgccaaaggatttatccgtgtacacgtggatataccttgtcggtatgtggcgtgtatcgtggggtaaagggtatgcctgacccgtaaccctgacagtagcccccgacttctgctcaaaaatgaattcgtgtgaccgtttgcaactccgggcgtcgagaacgtgtcattcctggtgcgagaaccaaagagatgatgtgtagtcgagcgcaccgtttgaagtccaacggtcacgaatgaattttgaacggaagtccaaaaaaccgccatgcacaacggacttaaaaatctccggcggggatttctcctgtttcttggaattcgcaccgtcgggagtgcgtctatttaaagggatttagggcgtgagctttgaggtccgcctacttcattaggcatacactgctcctttgcattcctcgccttactcgccaccgcaaaaagcccttgcctcaccgattcatcgtccgttcccggcgatcttccggcgatctcccaacggccatggatcttgggaaatcgacctccaccgctgcgaccctgaagaagcttcaggaggagggcggcctccctggccgcgacaaggcggagagggaagcaggaggtactactccccaacccgtcctaggtcgcatggttgcgattgaggattacattgtctgcgggtttcttcctcccccctctgaattccttttgctagttttaaacttctatgggctttcactttgcacttgaatcccaactccatcgcgttcctcagcgttttcgtgcatctttgtgaggcctacattggagtagagccttttctagatttgtttcgcttttattacgagttgcgttggatggaatccaacaaagtgtctggctgcgttgggttccgacttcgtgacggaatgaagtcgcgctacgtccccttccagtgcccctcttctcgcaacaaatggcggaacatgtggttttatctcgagatcaaggactcggatcctgccctaattgttcctgaggagcagccggacaaaattccggtttggaccgccaagccccctttgaccccatctctccaatcgtttatcgacatcatcgatgatctccgagaacggggcttatcggggtatgaagtcatcgcagacttcgttggtaggcggatccagccgcttcaggctcgggcccacccggcatataactattccgggccagatgacgcgacccgggtttctcctcggggtatctttcttgtattcattttgatatgactgtactcgcgttcgctttcgacttatcggaaattaattcttccttgacagctctgagcagcgacggcgtggagcggcgcgttggtcaagtgatgatcatcggcccgtcaaccgcgagcaacatccccgcgcccctttgtgacaagggagcggtggaacgcgacgaggcaatcaatgtaagtctattcaaatgtctttttcctccttcatttggaatcagcttgtgatcggacttagcgtaggcccttcccttgactgatgtcatcggaccgctcgcggatcaccaggtggcggcttctctgaaggagaaggtggtcgaggaggcgtccgacgccgctgctggtagtggcggcaaggctccgagtaagccgaggaagttctcgtccgtgctcggacaccgtcgcaaggcggagacttcgacggtaacattcgcctcgtcgttaagctgagcgactaggaaggttcttgttctcactggcgactttgcagatttccgatgcatctcctcctcttgcgcgtcgtcaacgccttgtgacgatcggcgagaagtaagtcgcgaaacttctcagattctcaagtcttcttttcgaaccgaactctgatccgtcggtgttgacagggaggcacgagcgaaagcggctcgggccaagtctggggggacttctagcgcgtcccctgtaacagcgtcgactgacgtcgttcccgtgatcgggagtcaggaggcgacgccaagcggcccaagcagcgaccccgtcggaaaccgtggcgcgccagagtccatcctcacctgggaggagctctaagtcgagatggggcgccttcttgaagccggcgctcgcggcattggtcgcgaggtctcggaggcgagggcggagacagcggcggctaacgcgcgcgcggagcggctggtgcgggagctggccgaagcccgcgaggacctcgtgaaaatgagggaactagtggctggcaacgagcgtcaacgcaagggactcgagaaccgcatggcggaactcggagataacctctccgagatccgtggttctctgagggtcacatacaccggcctccaccagcttgccgcggagtgtggggtcaagtcgacgatccccaagaaccccgacgagttctccctaacctcttctctggaggagctggcgacagcgatgggagagatccccgcgaagcaggcggcccgacttgcggaggagacgtccaacggcatttataccggggcgtgtcacgtcctcgcgtgcgtgcggttgtcgcgtcctgagctagatctccgcgagatcttggaccagggggcggcgagcgacgcacgtaagggggtgatggaggaagtcggtgacctgggggagtctgtcgtccccctcttcgaagagtaggagtacttgtatttttatttccttctcatgatttgtgaaccccaaactttggttgtctagctctgttcatctttgatctcgaaaattcatcttatcgattgtagagaggtcgatgatgaggatgtccagtagcgcgggcaacctgaatcgatggcgataaccccggtactcgagttagaaccgagcgcggcgcatatcgtcgatggccagattgctgatgccggagccgaaatgacggcaactgacccgagtgagtgatctcgtcagccttattgctttttggtggtttccgagttgtcttaataaccatcacgtttggcagatctcgaggatgcccttgcgactcaagatcatcgtatccaatactagaagacgaaatgtgaagtggcggaactcgagagggcgatgctagccgtgaaaaaagatcaagctgtggaaacactccgaggtcgagaggtgtggttctcatcttatctgaagaattgctgcgcctctatggcgagggtgtgccgggatcttcgggtagcccgcggtgatcctgaagaatcggcggccgggtacatctcgtggctcaacggggcctgtgctcaactcgacggcattggtcagcgtatcgacgaggccttgaagcaagagtgtcgtcgagcaagccgatatgccggggggcatgtgttggcctgtgtacgagatcaccgcccgcgcctggaactcgaatttctccgtgagggttttaaccgttctcggagaaatccggcagagattgaccatctcgcgagatcaatgtcgccgctagccgagaagattttccaatcaatggactggcgttggccttcttggtagaatttgtaccttgtaacaagatatcttgggaaaagacgtaatgtgacaaaatatttatgtgctaacagtaaggaatactttgtgaataaagaaatatatatttaacaaatgtttcttactctgggtgttgtttgtaagagcgtgttctcagttaacgaccttagttagccgtttgagttgtacactctccctagcccccagccttgtcgtcggagggatgtccttgggtgacaaggctcttggacccttggcctgtcttggttgaataagctctgatcctagcccccagccgtgaagttggaaaagtcaatttctgattacacggcttggttaatacgcacggcgagaactcttacacgaccagatcttacatggtctttcgtctctgaaggatctgacaaggccttatcggctctgagcgtccccagccgaagatcccttgggttcctcggaggccttgtcgagacggcgtaaagggacataaggacaggtttcaacgctaggcgttgtacagagtgaggggttgtcaggtgaagacactttggttgttatatgggaccaaaaagtagtctttattgatactgtaagggtgcttacaggtacaatggtattgactcatacatagaatttacgtagttggtcaatgttccatgaattcgctaattcgcgaccgtcgccgtctgcgattttgtatgcgcctggccgcaaggcttgtgtgatcgtgtagggtccttcccattttggtgagagtttgtttcgccctgcttgggtctgaactcgtcggaggacgtagtcgccgatcgaaagtatgcgtgctcggatgcgcttctcgtgataacggcggagggcctgttggtagcttgctgctcgaacggcaactcgctcatgatgctcctcgagaaggtttatatcgatgtctcgctgttcatcctggttctcgtcggaatgcttctgtactcgagtactctgatgtcgtagctcaccggggagcatggcttcagaaccgtacacggggaagaagggtgtttcctcattggacgttgtcggtgtggtgcgtatggcccatagtactgatgggagctcttcaactcattttttgtcatgtgacatgagtctgtcgtagacacgggtttttatcccttgtagtactatgccgtttgccctttcgacttgtccattgctttgagggtgagagaccgaggcgaagcatattttgactcccaagccgatgcagtaatcttggaaatcggcgctgatgaattgggagccgttgtcggttatgatgcggtgcggtagtccgtatctgcaaaatatccctctgatgaacttgatggcgttatctgccttgatttctccagtaggtgatgcttcgatccatttggtgaacttgtcgattgctacaataggaatttgtagccgctctgtcctcgtgggaatggcccaagtatatctagcccccagcacgagaacggccaagtcagagggattgtttgaagcgcttgtgcaggtagctttgtgtgtttgctgtgaaattgacaggcttcacatcgctggaccatgtcgcatgcatctttgagggctgttggccagaaaaatccttgtcgaaaggctttgccgaccaatgtccgtccgacggcgtgtgacccgcatatgccttcatgtatgtcgaggaggagttgtctgccgtcgtcgatagagacgcacttgagaagtatcccgtttggcacctttttgtataaatcgttgccgatcatacagtagatttttgctttacgggttattttctcggcctctgtgtcattttcgggtaactcctcgctgttgatgaatttgattagcggggtgcgccagtcatctgttgtttcaatgtcagccacggcgcgttctacctcgatgacatctgagctgatgtcgggggtgcttgggacgacttcgccgctgacttcttttacggagggtttcgtcaggacgtcgagaaaggtgtcgggctcgagcggttctcgtctggatgcgcgtcgggctaggtcgtctggctcgacgttatccttgcggtagacgtgtcggacctcgatcccgtcgaacctcttctcgagcttcctgacttctgcaaggtacttggataactcggggttagagcatttgtagtctttgtgcacctggttcgcgactagctcagagtcccctttgacgattagtcgcttgaccccaagtgcggctgcggctcgtatcccggcgagtagcccttcgtattctgcagtgttgttggttgccctgaagttgaggtggattgcgtgtttgaattgatctccggatggagatgttaagataagtccagcccctgctccttggctattgagtgcgccatcgaacgccattgtccatgtctcattgtcgccttggttatctgacttgttatctggcatggtccaatcggccacgaaatcggcgagtacctgagatttaatggctgtttgcggcatgaagtggacatcaaattggcttagctcgactacccatttcgcaatgcggccgacaacgtctttgtttctcacgacttcgccaagagggaaggaggaaacaattgtgactctgtgggcttgaaagtagtggcgtagcttccttgatgtcatgatgattgcgtagagcagtttttgaatctgtggatatcttgtctttgcgtcatggagagcttcgctgacgtaatagactggtcgctgtactttctctcgctcaacgacaataacaatgctaacggagtgtggcgtagcggcaatataaagaaataattcttcattaggttggggagcaacgagtacaggtgggtttgataggtagcgcttgagtgtaataaatgcctctttggtttcctgcgtccatacaaatttgtcttgtttcttcaacaaggcgaagaaaggttgtccttgttctcctatcctggcaacgaatctgcttaacgctgccatgtatccggttagcttctgtacttccttgagtctcgtgggcgacttcatgttctcgattgctttgatcttctcaggatttgcctctattcctctgccagaaacgaggaatccgagtagcttgcccgacggtactccgaacgtacacttctctggattgagcatgagacgatatcgtcggaggttgtcgaacgtttcccggaggtcatcaatcaatgagtcgcttgtcttggttttgacaacgatgccgtcgacgtaggcctcgacattgttgccaagctaattgctaagtgcgccctggaccgtgcgttggaaagtgttgccagctgttatcaatccgaagggcattttgacgtggcaaaatactccgaacggagtgatgaacgctgttttctcctcgtcctccttcaccatgctgatttggtggtagccagagtaagcgtcgaggaagcttaatagttcgcatccggctgttgaatacaccagttggtctattcgagggagagggaagtgatccttggggcacgccttgttgaggtctgtgaagtcgacgcacattctccatttaccattggctttccgcactataactggattggcaagccactctggatggagtacttccctgatgaagccagctttgagaagtttgtcgagctcttctcgtatggcttgttttcgatctggtgcaaatctccgcagtctttgtttgactggcttggcatcgggtcgcaccattagtttgtgctcaatcacctccctggggacccccggcatgtcggacggttgccaagcgaacacgtcggcattgtcgcggaggaaggcgatgagcgcgagttcctatttctcatctagtgtagccccgattttgacattcttgtcggggttagcactagagagcggaacgatcttgacggcgccgttcggcttcggcgtcttgtttggctttctcactttcttgggtggctcagacgtggcgggtggagtgggcgtttgctcgaccatgtcgaggcttcgcttgtcgcactgcaccgccagttttgcgttcccttgaatagtgattgtccccttcggccccggcatcttgagtacttgatatgcgtagtgggatgcggccacgaacttcgcaagtgcagtcctcccgatgatggcgttgtaagctgtatcgaattcagcgacatcaaaggtgatttgctctgttcggaagttgttggcttggccaaaggttacaggcaacgtaatcttgcccaaaggtctggatgatgattggggagtaatcccatggaaaggttgatcagttggcgtcaactcactttgtggaattcccattgcctccagagtgctggcaaaaagaaggttgatcgagctgcccccgtcaatgaggacccgtgctaccttgatgttccgaatagtaggttcgaccacaatcggataccgtcctgggataaccgcggtcttgggatggtctgcttccgagaactccatcttctgctcggaccacttcatcttgggtgcagccccctgccatgtcgagcaaacttcgcgttccactttcttgtattctcgcttggaggagtacgtcgtggaaccgccaagatgtgcgaaacatggaggtcggagtctgggtacgcagagtccgattcgtgaggaggcgactcctcgttcttctcgacaacgcgtactcgcttgcctttctcaaacgccatgtgcttctcgagcgactttttgaaaacaaggcaatcctccagagaatgtctgtctgttttgtgtatggggcaccatgatttctttgtgtcgctgccttgtgggtccgggcgcctgggagggttcgcgtactctgctgcgagaacttccgcttgagctttccttttcccgtttttgcgatttttcttcttgctcgactcagatgtgtctgcggctgactttttctctcccccagtcttcggcttgtcgttcttgcgtcttagtgcgtcgtcgacgtgggcgcatctttcaacgatctggaataaccttcgagtagttgtgatatgccttgttgccaactcctgggtagtgtagcgatctctgacgccagacttgaaggcgcgaattacagaagcgtcggtgatttcggggatggtattcctgcattcgttaaagcgccgaacgtattccctcaaagattcacctgagttctgtgttaacgcgtgaagatcgtcctcgatcgcgtggcgcttgtatgttccttggaagttggcgacaaactgctgccacaggtctgcccacgaagaaattgagtagggggggagatgcatcagccacgaacgtgcagatcccttcaacgcggttggtaaatagtttgccaccgcgttgtcatctgctccagcggcataaagcactgtcgagtagacttgaaggaattcttctgggtcgatgctcccatcatacttttcaatagctccgggtcgaaatctctcaggccatcggacatcacgtagggaacgaccgaaagccctgcacccagcgctcggagcggtgggttgtcggtggtcgcgtgaccttcgtggatgtcggtctgacaatgaagaggacgcagaggatgatgatgatgacgatgggtcacttggttccggcgtgcgattacgagggtgacgacctggatctcgggaatcttgtcttcgtctctcgttgttgtctcgacgccgatctcctccatcttcgtcgttacggcgacggccgtgactagtgttgtctggccctcgccgatcatgatcatcgtggtctcggttatcgtgtgggcgacttcctcgatcatggcgtcgtgaggagacatggtgccgagagcgatttgcttcatcccgtgtgcgtcgtgcttctcggcgcccgttgatttgatctcgaaggtcacccgtgccacgaggtgggggggtagctcgttgaggtgattctctatgttctggaatttcgccgttagcatcgctgatgggtaatcggttttgttgcgccgcggtggcggcttcttcgaacgcgttgctgaggttagccaccgatgcccgtagtcgttccgtccaacgctcgaggtcgttgttcaggacaggatcgtaaggtgtttccctcaatatggcttgaacagccctgatatgttgggctggggtggtcgattgatccgccgtctccgcgtttgcttgtgctaacgtgccaacgtcatcgatagccaacacctcccgcgccgcgtctgatgtcgatgacccataatcttcgaggagatgtaaaacagatggttcgtggggattaagatcgattaccccaatgaaccgatctggggccaaagtcgctccttgttccttgccgttatcccggactgggacgtatgacttaggagacggagtttttatggcgccaagtagaactttgcaactcgagaggtcgtgattctttgtcttatggatgggacaatagacgttccgagttggggaagtacgctggattccacgttctttgcaggcgcggatctcagcacgagcgttgacgaatacccagcaatcttgaagagtatgtttcttggttttatgaataggacaccaagacctgatagtttcggaagtcatctttgctggcctgcggtttgtgtcggagggacaaggcctggtcgcatcagaatccttcacgaacttagatgtagtcagcaatccgttctccgtttcaacgggtggatctttcgacgtagaggcgtcttggtttgtaaccaccgcgttctcgtacccagtcattggaggactggttgagatcggcattgtggtgtaaaccggacagacgatttcgccgacttgagtccataccagcattgtcgaggtgggaagaacttgaccggaactggtgttgacgttgttgtcgacgaagcttgatggcataatagtagaaccttgaataccaaggccccctaactggcgcgccactgtcgacgggggatacccgtagaccggatatagagggtattggggtacgctggtataaggatctacgtaatacgacatcgagcaatcaaaagacgagaattatactggttcaggccccttgacaggtaatagccctaatccagttgatatgggattatatggtagaaaacacagattacaaaggaaaagacggaactcgggagattcgacaaggttgtagtcgagatgatccgactagctctcgtcaacttggctccttgtaggctctgactttgtaggctgtgttggttgtcggggctctgagattcgatgccttgtggtctccccagggggtcccttttataccgcagattggatgttatctgagtaggactccgatataccagacctgacacgatacgtaggtaactcaattcttgtccgagaaggtctctccttatctgttgtctttacgaagagtttccttaaatgccaaaggatttatccgtgtacacgtggatataccttatcggtatgtggcgtgtatcgtggggtaaagggtatgcctgacccgttaccccgacaatcccctatattatagaacggaggagtaatactttctccatcccaaaatagagtataagggattttgaaggatgtatcttctagtactgtctagattcgtaataataggagtacattctctaaaatctcttatatttttagacgtatggagtattatataagagcaagtataataaagcttatattcagcgggtgatatgaaatccaaatcatactaagtgataatctggatgagaaaggagaaaagatggtgcaagcggcgcacttgctccaaggcatcacaatactttgtcactgttgcaagagaaaagagagaaaatagcaccaaagagaaaatagcaccaaagcaccgcagagaaagtgattgatgtggttcaaaaataataaagcttttacttgtttaccgtgcttattatactctccaactattatgtttggaggtgggtgttgggaacccatctctcatacacggaaaacggagcggtccattaacacgtgattaattaagtattagctaatttttttcaaaaatagatcaatatgaatttttttaacaacttttgtatagaaaatttttgcaaaaaaacgcaccatttagcagtttaaaaagcgtgcacgtggaaaatgaggggggagtgttggaaacttgctcttgcaaacacaccctaagttgcttttagatgacgtggcacacaattatagctagcaatcgacgatactattaaacccgctctaagcatgaaataaatcggtgatatcttttttctttttaaggaccgagcaagcacatcctcggttagaaagtttaatggtatagtttactgtagtctatcttaaaatcaacatagtatattccccgaaaaaaaaaatcaacatagtatataatatatttgctataagttttgccttcatttttttcctattcctctctctttctcttactaatgcattcaatgtatttatcttgaagcacgtgtagaactagctctagtatgagagccaaaaccttcattttctattatctctctcctcaacataagcttatagctaacttataaggagttgtttggttcaatgccacactttgctatgccaaacgttagacgcaccacagttttttttggtaggtgttttgtttatgccataattgtggcttgctacactgttatcccacatgttatgggaccaaaattcctttgccaaatctggcaaagtgtgatggcatctaaacaagcctaaaattttcatatttcccatacataccatactagactaaaaagatcagaatacccacacttctcaaataccatgcaattattactctttatatattgtcaatgcatttattttctacttttaccaactctgatgcaatgactaattaaagattaacttattttggaacaaacaggagaaacaaagtaaatttattttaggatggagaaagtaggtagtagtaggagtgcaatttagatgtctttcttactccctccatctcattttaagtgtagttgtggatttccgtatccaacgtttgtccgtccgttttatttgaaaattttttatgattattgtttttattgttattagatgataaaacatgaatattattttatatatgcgtgagcgtgacttattttttatttatttttaaataagatgaatggttaaatgttggatacatgaacctacaactgcacttaaaatgggacggagggagtaatgcgtaatgtcatgttggccctagaatgataaataggcaacatatgtagccattgcctcacatatttacactaatttttttatggccaaattcgtacatgcaaaattatctagagaattggtgtatgaaatatgcaaaaccttctgcacttccattatttgtaaaaaaatatttgagggaaaagtataatcttttagagaggctggcggatataagtgac

SEQ ID NO: 22765 - DNA, 6689 bp, Oryza sativa
cgactacagggcagatatttcagaggagataaaagtgctcttactaagaaggcaggctcaaatgatctcacgcaaatacgaggcaggctcgaatagggctgtaagtgggtcagccgcgaacccacttatagatcaaaataaacgggttcgcggcttattttagcctataagtgggtttcgcgggttagccacttacacccatgggctcaaatgatctcacgcaaatacgagggccacaccaagtagggctcgataagaagccatgctcattttgcattggctaattagttatcttagcaagttaggtcggtttggctcgctgtgctataaaagttattcgattttgcggaatgatgacaaattttctcgatcgcttgaatcattaatcattcaagatatgtcagatgacgatagagtaacacacgatatttgttaacaaggttcagtcgaagtctacatcccagagatctgattatgggtgttcctccccaatcaacatagcacctagccattacgagtccatggcctcgctgccatcatctccctgcgcatgtctacactacattatagtagccatgattacattgtggtgtcccctcctctctatttaagagagagcatatgatagagtccgactctaactctatcctacacctgttccaactcctagtaggactagtatattcgacaaagattctaacacgttagctaaatgtacgagtcggctgacgagctggcttgttaaactcgttaacaaattttatcttatttctatcacctttataatttaccaatttatcctatgtgcaataaactccccctataaatacggatagtttagaagtaactaaggagtactagttaagaagcacatgtatgaaaaaagtgatgacctctcatactagcaagctaaacatagctagcgagctaaaagctcagctcagatcactataactacgagttcgagtggatcagaacatatctccaaacaagccaatccaagctacaagcttcatttttttttctacccctaacaccaaccttcgtacttccgataaaaaagtagaggacactccccctcgtatatcccttcatcccttgcctaaagtatatggtgtacatatcgaaggaaaccctaaatcctttggtctgtctgcctctattaaaactgtcaacaaaagcaaaattaacccagagagcaaagaaaagcaagcaggacacaatataatatgaaagcattcaggagcaataagagtatgcccacatcaggggagaggaaaagacgtaaacgatatcacgagttggatttgtagaatcattagatgattaatcttgatgatgaacgattatcaaaaggtgagtgtttgttgaaaatatggtgaagagtgttttctatcggtgaacagtgcgtcgacattatgttgccggtcaaactgggtagtgggcgccggttaaatcgaaggtgtccgggcgatctgaccagttagcttgacggttagaccgacagactctgagagggagtcggtttatcgtggtaagattaataagtggtaagattaatcagttgaaggtaaagatcttccaatgtagtacagactaaagaccttaaggcgtactatcgaccaaacaccgagcatcaggcaaacacgtatcaacaaaacatttaaaagtagatcaactttatttcatcaatatgtgtttacaaagtgcatctaaagcactcctctctcaactcttgaaccagaatcgaagctaaaaaaaaccctaacttttctctctaaaaaagtcaatgtcttctagtctcaatccctcatctatttatacccatgacatggttgccccaaaccatgaatccaactagaactagaactcttaatcacatagtaaacctaccaaaccagagaaacaacatccccatataactccacacttcaatcttttcaaacttggacttcaatccaaatttaacccatctttccgtgcgcacacatcaccacatatatgccatatgaaaaccttcacctctacatgcattgctatagttgtctagcttgagtatcccgcatgatatccttgatcatctagacctcatttctcccaagcatagtcccgatccatcactggctatactcccatagccacaagcaacacctgcaaacaaatctatcatccactcatttctcatcaaaattttggtttgctccaacacctcgtaacaaaatatggatagtttttgtctatatttccatttggttaacttggtggtcattaatcacaccagctacaactagcaagcacagtactatgccaatttatggcacactaacaatctaacattcatatatgtataaaacaatgaaagataaaagataatgcatgaaggactcatgcatttcttcaaactgcatttgtttgtgtttttctatagataacaagggcgtgaatagcttgctagatgttaatgtgtggacacggcatctgctccaattgtcttgtgtttgacaagatatggttgtagaatatcatgcattcaatacttatcaggatcagtactccaggcatgaaggttggcaatggacaggagtcgagttgtcgatgacatcaaaatttatgcctgcaaaatcatatagagaagaattggcatatgacaatatgaaaaaataatgtactcttcagttatttgcaaagtttggtttttaggggcaaaattatcattcaaaggggctgacggatgtgagtgacaaaaacttgacatcggtagaaaaataggacaaaagtactagtacaacactatactgtagaactcgacgaagtcaatggcaatttgtagaactaagcagggatgggaaaaaaaacaaaggatttctcattataaaaacattatgcatcaacggaactggaagagtcttccaaataagataaatgtactcttactaagaactgtacctattctaaagaagatcactgaaccaaacaatctaacataaccacaccaaccttcatatttattactataggaaactagagcgcatcaatcctctcccctcatattacacatgcaattctgcaaacatataagagggaaagaatcatttgatctgtccggctctaggaaaagcaagatagacaatctaattagtcagcaaaactgaacgacgctggggagcaagacaaaaagatgaaaacgatatcacacatctatactttctatatagttggtaccacctaacaattacttcctccgtttcacaatataaatcattctagcatttcccgcattcatattgttgttaataaatctagacacatatatatatatatatatatatttatttatttatttatttatttatttagattcattaacatcaatatgaatgtggaaaatactagaatgacttacattgtgaaacgaaggaagtattagaaactaaagctcaacatgcaagcatgccacatcatcacccactagcaattactattctagcccatttaaattccatgcaagcatgccacatattcactcactagaaattactattctagcctatttaaaatctatgcaagcatgacacatcatctacaatattatattatagagatcaacaagtgtatgtcaaattatcttcctcacattattttctcaacatttcaacttttatcatttcaacaatatttaacattaatcatccatgaataccgcagcaaagcgcggggtatcacctagttatattagatttggatacttggtgaacaatacgaacaaccaagaatttgattgcagtggtaaaacttttactcaatgatatttaccgattccacaattaaaactaaacctaattcctcttaggttgattccattttttaatagaaatatgcatattatcccatgttatcttttttttatatacaaatatgtatgttatcccattttttttatagaatcatgtttttttattttcaaagtgtccaactctccgctctcattttatccctatattttgatctcattttttataaaaatctacaactcttcctactcatattatccctatattttgatctcatttttttcttacaatttgtaactctccacgctcatattatccctatattttgtggatcatactttttttttcaaaatgtcttcttagtagcttaatcctatatttgttcgttttaaaatgtcttcgtagaaatctgcaactctccatgctcatgttatccccatattttgtggatcgtgttatgtagagatcgtttgcattaaaatgtcttcatagaaatcaacaactctccacaatcatgttattcgtatagctctatagatggtgttccttaaaatatcttcgtagaaatcaacaactctccacgatcatcttattattcttcgtatagttatatggatggtgttccttaatatctctagtttgtcccaatatgtaaagatcttttacttcaacatattaatcctaatacaatatcaatggattatggtaagaaatgtacaataaatttatctttcatttattcatcatcaaaatattggtttgctccaaaacctcataacgaaagttagtagggcatagggatgaaaacagagcggataatgctcataccatagttgttttcatatcttttgccggatacggaaacaaatacagatagcttgaatatggaaacaaatatggattatctcaaataggaataagaatcgaatatgatcggacacaaatacggaaacaatttttttctcagaacatgaaaaccaagtcaacttctaatagaaacaaatatcaacatatataattagctcattttatataaaatgtagtataatttataaatattttaaaattttaaataatattaatagtgtgaactagtgttaaaagatgaactactattaaaacctaaaaaggtatattgaaggtcatagagttataaagaaatggggtgtgtctcatggtttctgcggatatccgaatagcactgttcactagatatccaaattattatccgtattcgacgtaaaccccgataccatattcgtattcgtatccgtgaggaaatatccgtattcatatccgaactatctgagaattatccaatccgagaggtatccgtattcgatttttctccggagcggacggaaactatctgcttcgttttcatccctagtagagtaggcttcgattcttatattattattctctccatgataggcaacgttaatcacgatcagtataaccaggaaacagtgtaatgtgcctatttatatagacacaacaaaattcaaaattatgcatgaaggactcacacaatttttcatttttcatactgcatactttgtgtgtttatatgcatcacaagggtgtgaatagtttgctatatgctaacatgtgagcatgccatctcctccaaattgtcttgtgtttaaccagctttggttagtactccctccgtttcacaatgtaagactttctagcattgcccacatacatatagatgttaattaatctaatacatatgtctatattcattaacatctaaatgaatatgggcaatactagaaagtcttacattatgaaacggaggaagtatcatccatgcaggaattatcaggttcagattaggaatgaaagttagacctgtcctgttcatttcgactacaaggagtggataaagtttcggattttcgtggcacgctttgcaaactgctaaacagtacgtttcgtgcgaaaactttctatatgaaagttgttctaaaatatcagattaatccatttttcaagtttgtaataattaaaactcaattaatcacacgttattaccacctcattttgctgaaatacttaatcttaatcttaatcttcatctttaggagattcaaacacctaacaattacccattgcctcacctttttttaccggacttaaaagttggcaaagactattttttttcgtgaacgcgcaaaaggattgcacgtcaatattagaagttggcaaagaccttcagtaaagacgaaaaagaactagtaaaaaagatagtgtagttctagttgaagtgatgggcaatgggtacccattcctgttcctagctcagatgtttagctaaattgacgataggttttcatcaattacattgttagacaatcaaactgtaaacaaacaagcaaaatgagaggaaaaaactagcgaaatcaaaagatgaaagtccacagcctcggggaaacttcgtagtggtttcttgaaacttatttctttccatagaattcctatgttccaaagattttggatgtgtttcttggtatggattgggaacccatctcctagcacggaaaacggagtggtctattagcgcgtgattgatgaagtattaactgtttttttttaaaaaggatcaatatgattttttaagtaactttcgtatagaaacttttttttacagaaaatacaccatttatcagtttaaaaaacgtgcgtgcaaaacacgagagaagtgagttgggaaaagaactcagccgtagtggtttctcgacacttatttcgtttccatagaattcctatgttccaaagaggccttatttgatgcataccttttgccaattggcgttatctagcccgaatgcttctcaatcaattatagtagtatagcatatggaaaactctgtaaagagggctgcagga

SEQ ID NO: 22766 - DNA, 3160 bp, Oryza sativa
gatttggcagggtacaggcccttgagcgctgggtcgaccatccggtccaacgcatcgatgtcatgcagctggggcgttgcccaccggacaagtgactgctctgtccggagtctagcgctgagacgatagtttgacacaacagtcaggggtcaggactaagaaattaggaatcatcaaatgtaggcataaacaattcagggatgcagaatcagagaaaaataggaatacctgtcaaatggtttgcggcctgtcaagagctccagcatgacaactccaaagctataaacatcactcttgagggtatactgcccagtcatgtcaacttcaggggcactatatccagaaccctgatctgaagcctattgagatttatttggaaacatgaaaaatatggtaagccatatgttgtgtaacatcttggatactcaagaaaagaaccaatccattcagaacttaagtttccttttttaagtaagaccataaatttctttacaattgaaaatatatatgtttgttggagcaaaatgatttgagttttacctggaattcagaatcaggaacactgctggcaagtccagcatcagaaacatgaggattgaactcggtgtccagcaagatattagatgacttgaagttcttgtggataatagaaggagaacaaatttcatgaagatacctacagaaagttaacaggaaaggtgattaggtgttgacagaattccatgcaattaagagaatttacaagtgatttgtgcatatactcgttatttacctatcacattccattctattataatggcaagtcagatcaattttcacaagtcattaagttggaaaaaagacaataatttatttgaaaagtatccaacagatagggagagagatcttagttttcacttactctagtgcccgtgcagaacctaacgcaatcttaacacgagaattccagctgagtggtttgctatattcatctgggaggtgaagcatatcatgcagcgaaccatttctgtggaaatcataaactagcaagtgctgtccatgctccatgcaatagcccacaagctcattgagattgggatggtgcaactttgaaatgtttgacaccaagtcaaagaaatcgtctgaagattggcttggcaacacagtactgtttagtttcttgacagctagtacctgattcatataaggagaaatgtaagccacattgatcatgtgaagaaatgaactgtctttgtatatccaagtgtgaaacacttggtaacttccaaggcagaacaaatatatgatggtggaaatctgaattggtaagaaagcaatcaactcaatattttcatttacatattgtactataaatgaatgaagttttgtcactattgctaggaagaaatggaaaccatgtatgaatgtattgcttctgcctctaagattgcttaggtgcatttatgtaggaaaagttactctaaaatcaaatttacagcacagttttaaaaactgcacagtaagatatcttttgctattctctcaagcaaatggcaagtgcaatcatgcgtacctttccatcactgaattgtgccctgtaaacacgtccaaaagtaccctctccaacaagattgtccatgttgaaactatctgttgccatctgtaggtctgcaactgaataaactgttgcttttactgatgctgaattacttttctttgcaacaggcttgtttgaaaagtcatcatcatcgtcatcaaatgactggttgcgctcaatcttaggaggtggttttagactaacggccacaggggaaggcaaaggctccacctctatcttggtggattctggtataggcttcacatctgcatttgtagaaccatgcatacattataacttacaaaactaaagtgtcgatcatggtatatcaaacactgcaacactcaaacactgacctttaacttcattggaagggtatgaactgaaaggctgtcgctgttcaacatgttcttgccttgtacctttgcgttttctctttatcaagaagaatgctacaactgctccaatgaccagtagagctacgataattcctgctatagctccagcacgtaaccctgaatttccaccagaacttgatgagctaccactgccattggagtgtctgcctgggctttttttacggttgcgtgatggtggaggtgctgtgaatggtggtggtggtggtgccggacctgtgctccaagaattgccatcggttctgttgaacataacattagttcaagatgcagccatccaaaacattagggaactaagacataagcaatacttactgaagactatttattttctttagctcattaggaatccaaccagtaaaacggttgtttcccacatttctgcaataaaggaggaaaaactggacttagtacaatattgtgtgatataaccgatttataccttcaaaatgatttgcttacaaattatccaggggaagattagcaaggacattgattgatccagtaaattggttgttctgcagatacctggtaagatagaacataggttataggtataagagaacttataaatttattatattattcaaagttccttcttacaaagttttcaggcttgacagagaagtgaaactttgtgggagatcaccagtaagagaatttaaggagagatcactgtagcaatgtacagaaatatagtaagagcaaagatacatcgtgacttgtaagaaatgcaaacagagaagttagaagaattttgtgtgcacattgagatcaacctagaatacttgttttaagtaagagtactcacagtgttgataaacttggaaggttggaaaagacatctgtcatatttccttgtaattggttatgattaaggtttctgtattcacaaagaaaatccaattaacccatagagtacaatatgaatttcaaggcaaatttgtatttgggtcaaaaggtactcacagatacttaagtttaggcattgtggaaattgagtatggcacatttccagcaaactggttcccagcaagattgctgcaaataaaaaattcacttaaattatcgccataaataacaaagaacaattagatagtatgtgtcagtacaatttttttccctaaaatagattataaaatggcaacatctgaggaacttacagcct

SEQ ID NO: 22767 - DNA, 786 bp, Oryza sativa
cacgcgttgggatcttcctcgcccaaaaacataaagtggggcggggtgtatttcgcagtcacaaactcgtacagttccggcctggcagctggttttggtttttctggttttttaaattcgatgcgatgaacttttacagcttcattgatgaggtctgcgaaggtcatgcgaggcttcgttgtctggtcgcagataccagcggcgatgttgttgaaccgagcagtcaaatctgcatccttgctgacaattctgttaaacacggttgcacagagggacgccaatgcttcctgcaatttccagtcatcatcttgggtaccttcaaggcctgaaactgccactcgcagtatctcttctcctgtcaacccccaaccaagtgcttctcttagcacctgcaacattacagtgctttcggtcattccgatataaataggatgcatataaaagcagtatcccatcttttggagactactctgatggatattcagtaagcatggatgaaattttaatgatacaagttgtgcttcagttttgctttaaacaagtttgttacccatggattgctgcgaatgtagaggttgccaaactatttaatgagctatggtttcgtgcatctgacaatgtagaggctgccagagttatatttcattatcatgaaaaaaaatgtttgttgacataagaagtataaatgacagcgactaacgtaccttgggtatcaaatcaatgatggcctccttcagattctgaagatgttcctcgtcagtggagtagggactacacagatgattg

SEQ ID NO: 22768 - DNA, 8577 bp, Oryza sativa
ttgaaaaaactaacaagctttatttgtctttttctcttggatttgctttgcatgctctcatgttgttaatgagttgactttgacaaaagaacgttttgaaaaaaaatataaagttgctttttgtgcgtgttctttgttcaatgttttgagtgcataaaggattaaacaacacaaatatgttttggtttctccaaattgctcaaagtgttttttgaatgaaatgagattgaaagatgctttagggcgtgttgagtatatggaggatcttgtaaaagctgatgaggtgctttcttgttctaattgtcacaaagaacaatggtgttttggttgatgatgaaaattgtgaaaatttgacaaaagaagtttcttatttggaaaggttttctgatggtaagaagaaacttaacatgatttggataagtcaaaagtgagtgcttataattgtggtgtaggttttgataccaatgcccattttacaaatcaccgatatgttgtcttgagcataactgaaaaaggtgaagtacaaaacccaaacctaaggagttttgccgtctctttcttcgacgactcaagagaaaaagactttcattgcaaaaccatctacttcaaaaatttcttgtcgtgagagatacacttgttctttttttggaaaagatgaatatttggttggtttttgttttagacttgtccgcaaacagaaaaaggaaagagaaattgcttttgcgaaacgacagtggcaaaaacaaggttgtggattaaggagcttggttagaccgacactaaccaatcggtcatactagttgccaatggcggtcagactgcaggtatatcaatggtcagaccggcgactaggcccgggcagactgcaggtacaactgcgatcagaccgacctcggggcgattttgcgcgtaattcaaatcggatttttgtgaagcgtcaaggtaagttttcaggtatgtttggttccgattttgttcgtgcatatgtacctactggttcagtgttggattccaaatttttttatgactaatgccaacacggaggcctcaacatcttcatgttcataggtattttggcggcatactccccatgattgtttagtgcggagacggtgatttcttttcaaggtaacatcaatgtacttttgagttgacataactttgttctacttcttcgtttataagcttttcatgctagtgtttgaagaggtagttttggtaattcaaatggatatatgttaattcataagaaccttggtgatatcattggcaattagatgtctttttcaaaatctttgatttcttcttgatttttcttcagggagaattggaggtttatttgaggggaagtttgtgctttttcggtgcattcatgtctatatccatgcattgctctaaatctgaaaataaagaaaaaaaatgagaaaaagaagagctttggtatatacctctagtatattcttgtgcatgctagtaaaataattgatgtatatttgttgatatgttagcttgtatgcattttagtcttttcatgtggcttggatattacttttaagtgagatgatgcatgacactaattcttttacttgattaagtaaatatgcaatgttaaagcaagtgctgagtttggatgattaatgcttatatttatacttattggattgttattcctcaaattgcttattgtttattccaaatgtcacaggagaataaaaagttgcttatgatgagagaaaaaaaatgaatacagaatccttggaaacagtattgacgataaagccgtatttacagtaaggaaaataatgggtaccaaatccttagaacattcttaacgacacggacgtactcgaaataaattgagatattttattatcaatgtcaaaatgagcacaaaaagctctaatacttgtggaaaattctcttggttatttttgtgaagaagttattttgagaaagagtgatgatgcaataggtatatatatatatatagggattttttttcaacctatgtacttgtgaatatgttgcattataaatcgtttgaaatcattatctttattattgactagaaaaaatgcccgtgtgttgcaacgggtgaagattattttaatcttattatattatatcgagttaagatgaaattcactgtgtcaaattcgcttggatatatattgtgttagaaaatcatgagctgtaattaggtgtccgaacgtctcaagttagtagtatgtgagtttttaaagagatttcttatacgatttcttctgtatttccaaaagcgaacgaacttaaaaactgactcaaatacggatttgtatttccaaaatcaaacggacttaaaaaccgactcatacgcggatgacgtactaaaatactgacgaaaacatctacaatttttataatagtagagatagaaatataatttaagaggtaaagatatatgtgcgcagtagcttgattgaatatttctctgattaggttttcgtatttctcttggcaaccgtcatcgatcggctgctgttgctgatcgtcttgctgcacgcgtggattttcgatatgtgggtagtaatagatctcggctttgatatcgatcctgatcttttctttaatctttttggaacacgtatacacagtagacaatattggattgagtttctgatgaacacagtaggaattcttctcgatacggtgtgtgcgtgtagagaataatcaacaatggtacgtcgtgctgcttgcctcggcgcacggcaacacacctgactgctgctggttggtgttgatataggtgcacgacagcaggtcccaaaccgtgttgccgaacagaccgtatcagcaagatgacaacctcgcggtggtggttggttcgtgacaatgcacaggatgaaacgcaatcggccaaaggcactgatccgaacaagcaaattttcttatggaaaatctaatgtttaaagctcatacatgtggggcacataaataattaaattggcagtaattatgtgcgaggctaattcggacatgacgacttaccaagccaccggcaaaaacatcttcaatttttataatagtagagatttgagcttaattgtaatacctttgattcatgtttatactctaatgcatgcttgttaactagttgatgaatttatctcatttgtcttgcaacatatgaccatgaattgcattgctttaggtacacttcaaagctctcaaaaaaatttcagaaaattaaaataaaaattaaaaaagaagtgattattacatgtcacaatcatgaaatcatgacatttgtgctttattggttatattctcttttaaaattcttgatgaaattattatcaaatggggagagaaatatacaaaatacatgcttcttgaaaaggggagaaaataattcgattttaaaaatagttgattttgcaaatatgggacttgaatattttcatatcaatgtagtatataaagccactctggaattgcaacgttttgcagcatattcggttcgcaacactagatctgacagtaaactagtagctagctagcaatgcgaaactccaaatgcttggctgaactggttaatgttgggaacgcgaaataaatataagtctggtggagatggctatagatagctcaccttgtttgaacgagcgtgatcaccgtgagactccagaagtccttgttggatagcatggagacgaatccaccgaggaggatgacggtggaccacgtgagcaccaggaaccccgtcccggtgacaaccatcgacaggtaccccatgaacaccgcatagtcattgatcaacaagacctctggccaatccgaatcaatgtgtaatccaaggcgatgaccacggctctgtccggcgccggacatcgatccttcctccgctaaacacctgatcaagtcgagtttgatatatacatggtaaaatatttcaggtccagccgtcttagatgatactggctctcactgcatttgcatgctcagtgtgcgccaggcaccaagaaaccggtaggtaataaactctaaactgtactaaacactaaaatcacatcaactcccaggtggtatccaagtaaagttccacgccagtttaaccccaaaatccacaaactacgagcattaaggcctatgtatcgactcccagagtcacaaccaagggtgtgtttagttcacgctaaaattagaagtttgattgaaattggaacgatgtgacggaaaattaagttgaaagtttgtgtgtgtagaaaagttttgatgtgatggaaaagttgaaagtttgaagaaaaaattaggaattaaacctggcccaagacaagaaagacgaaattttaagggatgatcacaagcagtatctgcagtcccttaattacctgcttagccgcttgccgaacccggccggccagccagccgccgcctggccatgctgatacctcgctgcggcgcacgtgcgccctccggactccgctgacccgctgcttgctggagtgctactagttggcagctcgtctactgaggcaagcaagggagcgcttagctggggacgactggggtggtggtgggtgggctgtacgtttcaatattaaaccatcggagagctagaaccatcctctttctgctgaagtgtactgttagttgatagtcatatgctccacaagttctctgctgaccatctagcaatcactactagcaaaagagtttttcgctggtggcactgtcagccgcccgcaaacaaatggcaagtgaaaataacaatcttcactagcgaaactttaaagcttgttttcacaagcggttaagttacgttgaccgccagcgaaaaagatattcgagcgaaaaaaagaaaattgaaaatccgtttcccgaccaccaagaaaaattgattttggagaaaaaaaaacatgccggatcgatacccgagctccgccgccggatgcgtcggccacgccccaccaccccgagccactggatatgagagaggggaggagagtggaggagccgcccagagcctatccatcgttgcagcagccgctgctgtcgtcgtccttgaactggttgacgagaaccaccgccatcggatccgtcctctccaccatcactgctaccgatctcgccgccgccgccgccgtagcctccaccgctccccgcgcaccagatctgagagagggagaggggtgggtggtggcggtggaggaaggggaggaggaggatcgggggagagagagctgggactaggaggcggcggatccaccgccggatggagtcgccgctgctcctcccataccaaatcgtgccctccccgccgggctcaaccgagccgctgtcttcccgctgccaccaccggtgggaagggaggcggtggtggctggagaagatgaggtctagagatgaagatgaggatgaggaggagggaaagcagtggtggcaaggtggcacggtaggtggtggtttttattgtgttcaattattttttagtgcgatgatgatttttttttcttttttttttctggtggacctcttagcagccgacatcgaaaattggtttttgctcacggcctcttaagaagtccgcttgtaaacaatggattttcgctggtagcttcttaagaggttcgcttataaaaatattactatttgctggcttattaagaggccgttcgctggaggttcgtgactttgaatctttccattcaattttacaagcggtgttttgtcatggccgccggtaaaaataaaagggtgatgtcataaaaaatcattttttacagtgaattaaccattctatggagaggccacaaaagcgatgcaggcaagtggggatgtgatcatcaggaaaaaacatctggtgtatacggaactggtgtatacggaacaggatgcaaaccccagtccacacggttcacgaatcacgatcccgacaccattgctctagagtggtatctacggataaatcttgtctaactttttttacaaaactagaaaggtggtagcccgcgcatatgcgcaggcatctttttatttgatgttgcttgaaattttattttggatgttttatatgtgggttactttttcttgaaattctttgactctcttctaaatttgtttttgtcaataattagtttggggttgctttgaacattgtaagtatattggttatgatactctttgatctacccttgcaacatatgaattctaaactaatattacttggaaccatgcaatcttaaatttatgagaaaatattgtgtcgcaataatagagttgattactattagactatcattttgtactatgtgtatatcttttttgaatattagcatatcttattttttaaaaactttcggtcacaaaatttcttttatactatagatgtatttatagattttaggatatatttaaatatatattctacttacatttacttctgcgcctttctttttttcacatcacatctcttttttgaaaaaaaaaagagatctgaaataagtaggtgtggatcatttgtaaatggtccgtcaccacggactaattaaagtataattttgtttggttaattcttatttttatatcgtatattttcattgcatgaattctgatatataagcttagtatgatttgtattccctaattaaccaaacttagtatgaaacacccatatcacaaattttacaaaatttgtgtggcatggttcaaattgtccctttttaataggaattaaagagaaaaaaatcgcatgccctatactccgaatacttttggttattcccatactatcctaaccgctgaataaaatggaccccaaattttatgcatcttcaaatgatgatataatccatatcactaatttttcatgatttttaataattctcgatttccatgcaaagcgccaatatgacttgttatttttgggcattgtagatttaatttaatggtgcatacctatgaaccaataatggatatatagtgatatactatattactgttatcttattcaaaattctcaataacgtttgtaacatacctgcatacatttacgtatagatcccgggtggagatgggtttgcgaggtaatggttgtaaataatagatccattttacttttatcattgtagagttaatttaattattgtgaagttatatgtaagatgataaaatctatatcattatttgtttataatctttataacagtttaaatactatgcaaaagtcagaaaatataataaaaaatggcatatttcttttccaagtgaatatggatatttaacactaaatttaaaaagttacatgtatgatttagatgttatagttgtttaattttgtaacacaaattttctaacttaatatagcttgaaaatagaagaaaaagatgatgaagggattgagggagaggggagtacgcacattacgtatgtacatccatccacgtacaaggactcgaatttgctatatatttgtcgacaaattttcctccaaaaatttatcagatgtaattacagtataatcatagtgtaattacactgtaacttgcatgtaattacactgtaactataatgtaacttgtacgtaactttcaagaatctctcggtaacatgttatttcagtaaaatagaggtcgtgggaacaaatccttttacatatgtgtgtgctgtgatttttttcttcttcaccagaacaaattttgtaatagatctaacgattcaaaattacgtgaaacttaaatacaagttacaccgtagttacatgcaagttacagtgtaattacatacaagttacagtgtaattacactatgattgtattataattatatatgtcaaatttttagtagaaaatttgtcgacaaatgtataggtagtcccacaaggacttagtggagcctggttttagcggtggatttttctcgaagatagatataatagttttaaataatgagtccaccggatttgatgaattttgtattaactagaatgctatgtggcggcttagaagcgtccgtagaaggacacatgccggcttaagagcgtttttaggaagtttaatggacttttagtatgtaatagattagggtttttttttcacttgaaaaaagtgccatttgtgttttcaaccaggtacagtttccaccgggataataaaccttgcagtccttgcagcccgaaaaggttagggttaagtctattttgcttccctcaattcatgctatgtgatgttgatgtgtcattaaataaaaataaaaaactaaataggacccacatgtaagtgagaaaataataaaaataaataacgggtccacatgtcaggcacccctttctcccctttacccattctctatctttacccttttctctctccctggtctccgtttcttctccacatgtgacaggttgacagaggctcgcgagggagcgccggtgcagcgactggtagtggacggtagcagcggcaggacggagctcggatgagcagtcccaaaaccggaatcaatcagagaccgtggagatgacgcatgagcaggagcctatttttccatatgaagagtcaacagagatgatggggtgatggaatgcgtcggtccatggtt

SEQ ID NO: 22769 - DNA, 5560 bp, Oryza sativa
tgtcacactccgattttctttcatggattaaaatcaattaataattcatttctagaatatgtactattatattataaaatttgaacatgttttaatggtacgtcattcgtatttaagatggtttttatgttcgttctcttttggaaatacagatccatgtttgagtcggtttttaagttctttcgcttttaaaaatacagcaagatttgtataagaaatctctttaaaaaaactcgcatgctaacttaagacgataggacttctaattgcagctcctgattttgtaaaaaaaatatccaagcgaattctgacagtgaattttatcatagctaaaccgtataacaataataatattaaaatagccttcacccgctgtatcacacgagcgttttttcttatatattaaaatataaggatttatgaagtgaattaatgtgggaaataaagtttcctttaaaaaatcatggctaaggaatatttttataatattctccataccctaaaatactatctggaatgttcttgaatttctagagctcaatatctgattttaataatagaaagttcatttcatcaacaacttacatacaaaaaccaattcaaagtctactctttgtccttggaccgtttccaaaccaactgtggtttccctccccctcctttccacgtgcggtctcggcccgcttctccatttttctctctgtctagcccagccttctccgcaagtccgttttacctccccatccaccggcccacctcgccccactctcccctctctccactggtggagaaaccatctttgctcggtcggccaaaatccataatagtcccggttgcaataaaaaccgggactaaagatagtttagagctgctttttaatctttagtcccggtagtcccggttggtgtatttctagtcccggttggtaacaccaaccggaaaaaaagatgcctactatctttagtcccggttcgtgttaccaatcaagactaaagatctatttttagttccggttggtaataccaaccggaacaaaagatcgtggcggagagtacgaggcatatgccatctgcgagattgagaaggaggaggagatgggcagccttatctcttcacctcttcctccactgaccttatctcttcatcccatctcttcctcttcctcctcctctcctctaactcctctccttccctcccccttcatcccttcctcttcctcctctctaacttctctcctctaactcctctccttccctccccatcatccccactgatagatcgggcggctggctgcctcgcggcggcgcgccggcgggcggaggccagggcggcctcgcggcgggacggaggcctgggcggaggcctcgcggcctcgcggcggcaaggcggcagaccacgggacctcgtggcagacggcgcggcgagcggcgcgccggtgggcggcgcggcagcggctgcggcagcctgtgtttttatttcttttttctttaagaatttgtgattcggatctgtgtatttgatttgtgtgtgatgtccgtgaatatgtgatgtatttgtgatgaatttgtagaagttgtgatgtaattttgttttaagattttgtgatctatttgactatggccgatttggggatttgaggatttggggataatttatttgggattttgggatggggatggagtgaaatcaatatattaaaaacacaatgaagaaaagaaaaaaataatagagcaaccggatctagctaggctagctgtatctttagtcccggttggtgacatcaaccaggactaaaaatggatttttactcccggttatttcacccgggacaaaagatagtgatctttagtcccggattcatagtcccggttggatagccgggactaagggggactacgaaccgggatgaaagatgctttctccaccagtggccctctcctctctcccctacaactgggaccaagaggccgacatctcataatcatctcctttcctctgaccaaatgagttagcaaccgttccccccatgacgacatcgttcccgtgcctctcctttcccgctcttacattcaaactcaagagggcgttgtcgccacctgcgtcctccacctctttcccaactctcccctgcaaatcgcacggcgtaaagccgcatctcgctccacgatgccccctcctcctccaccggctaccgcctttccccagccttgaatctgcctcccgagcctgtaaatggcacccccgtgccttttcctctccttttcccctcctgtagagctcaattggaccccaaactgttagaatttgttattgtttccttcttgtatttactttggtgtcctcctattctcccaactttggttctataagtcggttcgagacatagaaggcctagcaacctatatatgtactcgtgctatctggcaactgattattgcattgagtttattcatgcttacatagtatcagattaatctcgctttcgcgaaattctctaaaccggtgtgatggtcgctatagaccaatttcgaccatcaatataactaaaataaaggagaactagatatgcttgcaatgcatatttgttttagaataatataattccacttgtacttggagtattatttgtttgctgatattagcacataaatagaaaataaatgaggaaaactcactcctaagcaagcttaagcataagaaaggcccacatgtcaggtttaacctccgatcttggaaaccgccataactgtcacaactgtcataaggaccaacctgtcagtgaccctgccaaatctggaggcctgctaagccggctaggttcagcctggtggcgtcggattaggctagccttacacgtggatgctccagatcgcttgctgatggcggttacagagcattttggacaattcgcatcagttacaaccatcataccggcctatttaaggaggagctcatttcactcaacttaagcaagacttgatatctctctctcaactttagtttagtgctctaatgctatgtgcagtagaatagaatagttttcgcagtcctcaagtcttcagaggagtttgggtatggctctagtagttttcctttcctctttagtaagacgttcggaattaacagaatattcttctttatatactttcgatacttaactttgtttgagtatcagttttactttatatctatgtcgttataattgtgtggctagcttaccagagaagtgtagtgttggtatttcttaacgacattactagaaatagtcattccagcaatggcgccagaaatggtcctggtatatttatggttacagaattaatccgcaagcgcatagatataccattgtagtatttcacccgaaagtattccaaggtatcacatttttaatcccaagggaagagaataagagtgaactttactaatgcactttatacatatattacttataattgtcagagcctaagcaggggttaaatataatgtaatggtagagtgacacgaagcaaagctatccaatcctcgtaacaaaataattctaactaagtggaagaagaaatagaaagcactcaattcctatacttctagtatacactcaaattctaatttacatctgctaatgtacaatcgtgtggccaataccccctaacagtgtcctcctagtacttcgagagatcaccttgggttgccgagtttcttacgacaacttgtcatggccgtccaaccggggctaaatacggaggagtaccctccccaagaatttgtcttaggaatatatactaacgtggaggaatacccgtactgagctgtcaccatcagcggcccacctctattatcccgcagcatatatgcccaattaatgatacttaataatctaagcaccacgcttacattactaaatactactctatacccgcatgcttgacatagagtaacggataaatcagaccttaaacccgcaccattacacctctctgttaggctacccacacaattaacacaatgcagatataaagtaagaccaatactcaaactaagtaaagtaccaaagatatataaagaagagtaattcattaattaggaaagtattacaaaagagattacaagagctgctagagccataccgaaaactcttccgaagactccgaggacttccaaacactattctattctactccacttagcactatactactaatactaaagtatgaagaggaatttagcttgcttgagtgtgttgagagagtgaatgagctcctccttttatagggctggtatgacggttgtagctatgcgtaatgtccattttaccctcacaaccgtcattgagagtgcatcctggacgtccacgtggagggccagccggagctgaagccaccagggttcggccgaacccctggttaggccgaacctgggctggcccagcaggcctccagccacggcaggtcctgacaagtggggtcccttaggcggttgtggcagttaaaagtcagtttctgatggttgcttctgacatgtgggcccatcttatccatttgcttgcttaggagtgagttttctccactttctctttattttatttgataaattcctgcaacatgttattctccaagtacaagtggaaatatattatttgaaaataaacatgcattgtaagcatagctagttctccattattttagttatattaacggtcgaaatttgtcggtaacgaccgtcaacatgcagtagtgtgggtttaatgtccgagtattcggttactctatgtcatccatggggatatagagtagtatttaataatgtcggtgtggtacttagattattaaatatcattatctgggcatatatgttgcgggacagtagaggtggactgctgatggtgatagctcagtacgggtattcctctacgttagtatatattcctaagataatttcctaggaagggtactccttcgtttttagcgctagttggatggcaatgacaggttgtcataagaaactcggtaacccggggtggtctctcaaaacacgaggagggcatagggggtattggccgcacagttgtatattagcagatgtaaattaactagaattgagtgtatattagtagtataggaattgattgcttttctacttcttccacatagctctaggattaattaatgagagaatcaaagttcttctgctttgtatcactctacccatacacttgaattaacccctgcttagactttgattatacaagtgatgtatataaattgttagcatggttctctcttataaatcttcccttgggattaaataaatacgataccttagaatacttccgggtgaaatgctacaatggtatatccatgcacttgcggattacttctataaccataaatatacaaggattatttctgtgtcattattgggaatttatatttccagtaatgtcgttaagaaataccaacaaccagcgcctctcacatgcgcccctcggcgcttctctcgtgccaccatcaccatgacagtgccctcactctcgttgacctcggccgacgctctcgacgctacg

SEQ ID NO: 22770 - DNA, 16061 bp, Oryza sativa
gtcagactgcaagccatggatgactctagtcgacacttctaccaagttgtcctctaccaatggtgtcgtgattgctgatcctattgactttcgcagtctagcgggtgctctacaatctcttacattaactcggccagatatcgcatacgatgtctagcaggtctgtctccacatgcatgaccctcgcgaaccacacctttctgctcataagaggattctccgtcatgttcgaggcacactagactatgggcattgcatccaacattattctttcgctgaccagattgcctactctgatgcagactgggccggctgtccaaacaccataagtcaacctctagctatgctgtctttcttggcaacaaccttatctcttggtcctctaagcatcagaacaccgtgttccgttccagtgctgaggtagaatataggatggttgttggtatttattaacgccatagatagaatccacaagcgcacgaatataccgatgtagcacttcacctgggagtattccaaggtatcgattccacgaggaatgtgtgtgctaagctcttctccaggttcatccaagaacataaagcaatgataggcaaaagggtagagaggatttcctagtgagaaacagtgtctacagaaagcttaatttaatcctatagcaatacttcaggcattggcttgctcacttctaacagaacgcgctctactccgtacccagacagagaggactgcagtgctcttgagtgttgtcactacctctacaccaacctttaacgaattgtgggatacacaacaatcactggaaattaactacctagacactaaagtaattaattactactttagcgttagataaacattaaagtaatcattatctattaatgaacaatagtgaacaatgatccagtatgctaataggaactaactaagatataattctcacaaagtaaatcttaattactcggaaagatatttctattaaattagagtaattaacaaggtacaaaaagtaagaggagattaccgacaactccgaaattcctccgatttcttctaccttacaataaagtagaatagagcctcatgtaattcagctcatgcttcgtgtgttatgaatgagggaggagagggatatttataggccaagtgccttgggagtgtggagatgctcaaggcatccaatgagcatattcccccttgcttcacttccttgtgccaagtgtcctatgacggtttcttcaggttgaaattgtcacaactgccttgggatgtcgataactaccggcgtgtgaagtttctaggccagatgggctagccctggtttggccgaaccctggttagcctccctggcctaggcctttctcctggtcactgacacatgggtcccctttagtatttctctggagttacccatttaattatgatcttattgggtttgtaggctaagactccattgacttggatatggaagtattatttccctccttcatgtatatttcctctcaactttagtagtttgtcatctgcatccaaatacacatcaacacttgtggaaagtgttagaaataaaccctatcactatgttggatattttatactctcagttttatgcagatattgacggcgtaaatttggtatttagcagtcgtcaacagcggtcgcaaatgctgttgctgaaaccagtcggcttcgtcaactaagtcaactctgttctccccctactaaggctactctggtttactatgataatgtcaacgcgatctatctctcaattaatctggttcggcatcaacaaactaagcatgtcaagactaatctccacttcgttcgtgagcgggtggcagttggtgcagactgtgttctgcatgtccccacatcgtcacatatgccgatatcttcaccaaggcctaccttcgtccgtctttacaaagtttttaatgcttcaatccacaatttaattgacagagtagaatgacctagcatactgagaacaatgtgaggtgcaggtgtgccctgtgtgcacacctgcacagagcggcggacggagactcgatctggattagagtttggagatggaataatggatgggaggaaggggaagcgatacttttctgtttgactagtaatcgtgcacgtgcaatgcacgttctttccatcataacttgctttcatgcaactttacaattatatcatcatgatcccttaaaaatattggtggtctatcttgagaagataaagtagcacttcaatgtgtaaataaaccgaccgtaatacattgaaatccatgtagctaagaaataaatctataaagaggaatgatacaagcttcgtttccatttccatacaaacagaaagaacaaacaaccagtacgtgcacaaagtaatccacgtagaaatacacacacttacaatggagtctaatttgaagatggtgtatattataaatccgtacacatttcttatatctccaaactgaagttgaatcatccaccatgaacacctagaatcgataaataagttcacacccttcaattagcaaaatctatgctctggtgggcaacaattgttaacattcattctacaaagcttgataattgaatcaaaatccaatccaagagaacgcaaccatttcgtgatatgtcttatagatttaacagataacagataaatggaatgattatatgttcagttaatacaataacaagaagcacccatgatggtgaacactgcagagaacggcaccattttatcatagtactgaattacagtatagacaaatgtgtagcatttggcagcagcagggtccttgtgtagccatgatctttgacaaccaaattgacttccatacaattagtgcagacaactaaggcactgccatgttattgaactgcttgcgaagcattgcttaaaatattattgtggccccaattttccatactaaataaaaattagtgcatatgaggaacaaaacagaaaaagatgaaggtacaaagtggctgttagtaataatgtgagaatacacataagaaaagatatatgatgcccaagtgtggtgcttaattatgtaagaacttgatagccccaggaaataacaataattggaccacatcggaagcacctcagcaaatccacaatggaatcagtcctgccgaatcagtcatccaaaacaaattcctaatacatgaataaaggaaaggtcacaagattcagccgagaaaaatagtacatattcgataatacaaataacaagtcatatcatctacaatcagaccagcaaacctgtaaaggcacattaactctcatgctcacatatttgcttcccatttggcaatgaaactgatcatctgcatagtcaagagaaagagaacatatcaatagttagtgtgcgcatgcaaggcacatgtcatgtatatcgatgggagaaaatactcttattttcataaatactaaaatctgtttcacatgccaattgatattgaaatctgtttcttttttctctgcagtgtgccccttgtgccagtatgaagtatgagcacctgcacctatacagctccagcaaacatgtggcctcgtttttattgacggaagagtagaaaagaaatataataccattgaagattgatttatcgcaaggagcaaggtaatctggagatggcagatcacaacaaaaaataattaatcttaccagctgtgaccaaagtacagttctagactacctttacttagtagtagcaatcatagagatcgagattagagagagatagagagagatgcggccctacctttaccaggagcgtgatgccctccacgcccacatccgcggcacagatcgtcccctcctgctccacggtcactggcatgcgcctcaggttcgtgatgccgcacatcatcatcatcagtaagaacgctgaaaagttttttccagattagactacactatctgaaataaagaggagactttttttaaggtcaagaggagatggtttgaaagcaaaaaaaaaaaattcccatattttttttccaaaatctcggtgcccttaccttagtcaaatccttttaaaatgaaaaaagattggagcagtgataaaaacaactggagcctggttgatatcttgacaattggataaatgaatgctcacaagaagaatataattctgcaatataatcataaagaaaacaatatgctgaaagtacatgtggcgaaccgtcaagataaattaatgactgaacacgtaccgatcggtgaaaaaggactgaaaacacttaataacagtaccaatagcaccttttcgcccacaaattcttcttcagttcaatttgtcatcaactcagtcctaacaagcaaacaacaaaccaataagataaccggggagcctagggaagaaaacaagattagatatattcaaaatctgaggcaattgcaagattacatagaaagcatatcaattaggtacgggaagggaaaagaaccgcatctgcctccattaccgagtcaaatcttcattgtcatctgacattactgcacctgtgctagcattgcgaacagttgagagttcaactcatgattaattcttgaaagctttgttaattaaactgaattgggtaaaatggctagagttttatagggtaattaaacataccacaaaagcaaaaaagagatatggaatcaagatatagttctgtctcatggtaagttttataggggagtttatagcgctgaacagatgacaatgaaggattctcaattcacacacaatcatctcctagtagttgtaaacaaaatcacaattgttaggcaatcatccaggtcttgaagagcctcatcaatagtctttgttcaaccaaaagatagtttgctgaataatgctagagagtatgtacccatataaaataagctttgtgaatatgtgaattggtgactgatttaatagcgtctggaacaacctccttgatcttctctgtatgaaaaccaaccaacatgtatcaacaccaactggataaactatgtacaatattttcttaagtcctccactgtaaggagattaaatgaacaaagcctaaggagatagataaacccatgaacaatcaaatatgaggcaacggttaggaataaatagaaacagtattggttgagtggtattcagtcgaacacttctggggcaaaacggttatttatgcaaccaaaaaagaactccacgataatctgaaacaaatagactgcagtgattcataaagaggatcgaatgcaattggttggtacttggtacctgcatgagattgcagaatccgtctgatgaacagagcatcaagggtcgttgtggtcgtggcgggtaaagttggaggtgctgtactgggagaagccgcggtggaggacaacgtcggagctggtggcgacggaaagtccgctccggccgcggcggcggacctcggcagcggcggcggcggatggggccgaggtcggaaccggacacggcggctctggcggcggggaagaagcagcggctccggcggcggggatgcagcggcagtccacgcggggaagaagcaccggctccggcggcggcgaagaatcagaggctccggcggcggcagtccacgcggggaggatgaagtcttcacccgtggagcgatgtcttcgcgggtagaggaagaggagtgaagtattcggcgtggatggatggatcaaacgagcgaggagcaacgaagtctgcgcgaggaggaggagcgaagtctacgcggggatggagagtagtattcgcggcagtactcaatcgtgtggtggtgagatcgtgcgcgcggatggacggcaaagattactccgaatgatttcaccagtacgattggaggggggcaacttctcctttttatattagtatagatttctctcgattgatttttctattgacgatgcatggtgactaatgtacttgggccatcatgggactttctctatcggccatggttgtcctacgaatttatctctgtgtaagctcgttaagacttgcaagcagctcgtaaacccgcttgaactggctcgttatgcctaacgagctgaaacgacgtctcggctcgtttcaaaacataatgagccgagctggtcacaagcctcgagcttttcgtccagccctagttgcgtcgttctgctactccgttctactgaggttcattaggcatgggtaacaatcccatattgctggagatataaggcaaatggactagaaatttgcccaagtggagcaagcttccctagtattcatcaccacgatttgatctcacgagtttaagtttagcattatgctgattttccactttggccttaaatttctcaagagatttagaacaaccattaatgggataaatatagccaaaacgggaataatcatttgtgaatgtaatgaatgagtcaaagccatccagaaatgtcattgggaacagtccacaaatattgatctgaattatttctagtggcccctttcttaattgtcttagtgaaatttcccttaatgcaatctacgtaatgatctacttcagaaaaatctgaaggaaggagtatttattctttaatgagacattcaattctttctctagaaatgtggcccaaacgatagtgccataattttgatgacatctcagctttatcattatatgcatttataacattcatcacaaaatcatccaaagagagcaaatagagtttgtctcgcacgaaggcaagacccacaactttattattaaacttaaacatgttccttttgtaaaatgacagtcataacctgtctctactaagactcttaaccgaaataagatttctcttaatagatggagcaaataagacattatttaaaattaaattacagccgctagggagtctatgtgtgaggtctccaacagccctcacttcaatctcggctctatcaactactctaggctatgaacttttcacctatttcacaaagttttgatgtgttttatgttgactatttgttacaccaaattgagaggcgttatataaacaaaagtgttttagattcttgataactggagtaatttaattttaaattatttggagctagaatatattatatgaaatttatgacttatagtttgtaatttagtagtacttactctacaatgttaaagtttagagatgatctttatattaaaggttccatattttattttaaaacgtgaaacaatacgcttctgtgaatctagcaggacttggttcactctattttgagctaagatgagtttcctatgaattttagaagttggattatgtgtgtgttgattattttgctattcatatttttagtgatgtttcaggtacagccgtacaggaggtgcaaaattttatcttactaaattaaagtccacatcttgctgaacctacagaaatttggttcatctcaaaacaatttatatttgattttatacggattttacaatttaacatattttctaattcaataggaaaacttgttaatatttccattttatttaaaagatttcaaactggcgactttgcatgaagaaccctagtttttatggaaaccaacacgcagtcctgtgactgttcaatggtgtgggatatttacagataggatcctagattttatctaatttccagagaaagtccctgtgttcctcccagagcagggcagcatggccgacggccatgcctggtctcggcggcggcgaacggtggggattcgagctacgcgaccaaaagaagaaatgtataggggtcctctgcgaactcgaagatgatccaatcacgggctatggtgaccggatttgatagcagtggcggcgcgagcggcggcaacactcgggtgatggtgcatgtggagctagagctcgtttatggctaaaagggcacatgaatgtgtgtttacaggggtcttggagactcattcgatgtcccgcgtggcccagcgaagcttggatgacggcggcagcggcttcggactccggaaaatgctcgatccagccatcaatctgccatgcgtgcatgcgcagggtgttagataggtgctagggatgctccatgcgcgaggaatcggactgggactgaccagagtggacgaatttggagacggtggtcataggccggagttggagaagaaaagctcgatccctctactcggtgcacgaatcttcaggaatatggagggtttttggagaggacctctaggggaagcctatggcgcggtggctcgccccggcttgctccagatcgacggcgacggacatgatgtcttggcggcggctctcagagcgtgctccaggacgaccgagagcgcggcggtgttcccagcgattggctgcacaaattggaccgcggttaaaaggaatggaatcggcatggaagtgggatgacggaacgcataagacatggagaccgccgtcatctttgcggccgacggcgggaagggtgtggtcgacggcgatctggggctgctctctcggtttcttctactccatgggatgggagggaagaggacggagagtacatgcaaaaaggcgaggtttttgctcggtggaggagacctggggctcggccggccgtcgcccgtcgacgcgtggggacgcgcgtgtcgcgcgttcctgaatgtggggtgacctggcacattctgtgacacttacaggtgggtcccacatagacctggggcccactggcagcgagagaggaggacatctcttggaaaaacttcaactctattagctgcagtactgttccaactttgactcgaacttttcttgtattggtgtggtttaaatggtggtggcctactgggaagtggtacagggatgtttgttgcagaggttggacaaggtttcaggccaaattgaattatggttaaattttaagagagttgcaaagtaggttaactgaaatctgtaatttccagattttgctgctttagatgatttattatttgaggtatcaaagtgagtgataaaaaataagtaaaaattacatttgtcgatgtttgaggtcgcgattccggtatttgcatagtatgaggatcgttggtactaggatatatgcgagattgtagtaaaaaagatggggacgaagatttttatacaggttcgggcccctgaattgtcaggtaataaccctactcctgttggccaaagccggtagttgctcttattcaccataaccacaccagtacaatatttggggtagcctatctatctgttgtcgacatggcgatttgaagtgctgacacgtagttgacaacagagtagtcttcctcctcaaatccgcatccggcgagatcaaagacagcgctatgtctctcctgacagtatccgtagacaccgtagggactagccatgcttatctctgaagtcgatatccggcgtcttgtcttggcgcatgttggcttgtatgttgatcttgtatcttgatctattgttccgtgtcccctcttctcctaggggccttgtatttatacccataggtgttctcttgtccaagtagaactaggaaaaccaatatggatataatccgagtagtccttatcgtatccatatagaactctatttatctttccttatccagaactcttatccggaactccttctatatacccgaaggttgtttccgtataaaacatggtatgtggtgggtcctgctaagatttagtcaactactgttaggtatgtagtatccataaccttgacaacattgggttttacttattggatagtacttttggtgaaatttttcatgattttatattgctccgattagatttagaaatgcaccaaggctatcttgtttatgtgttactattatagaaatgcagctaagtgtttataaaaattgtatttggattattctctaactgatgtgatattgttaggcttgattttcattccaccgtccacaatctcatgtgatatttgtaaatttatttatttatatatttggaattaagttaagtgaagactatggtgagagtttaatataagggtgctaatatatacttattaacttttgtgaccatgacctatgttcagatgagagacaaaactaacttaatgaagtttgtcattggtaatgttgtaatattttggttgtaggaattttagggaatgcttcccattcttgacattaggtgttccttaacttagttattgctcctagatttgagtgatgcacatcagacctattatgaagtgcatttaaaattcaaaaacacaaaaaagactcaagtcacactaaaacattatgcacatgcaattatacactatgtttcatttttatttccggttagtaagggaaaagttttaaattgttacaaaattctcatatgtgcactagttaaattagccttgtctaggtgagtcaaaattttaagatttttatttatgaaaagaattttcaccaattttagatgcataatttggaattcaaatattttgggtatattacatatataaatgcatcattaggaaaatttgtatcattcacaagtagtccaaaacttatttggagatggacagaaagaatgtggacccaatttacttggagatgaagcattgccacattctatgtacgtatatatttttgttcttagggggacccttcccacgcagagtagtcaagagatacaacactcgttgggattttcatcgttagaacgcatagcgttctccggcggatagtacggcggctgcctctgcattgcttcttggatgaggtcactgaaggtcttgagaggctccgctgccaggtcgcacatacgggccgtaatgtcttcaaaccgatcggccaaatctgcatctgtgttgaccattctattatacacggtcgcacaaagggatgccaatgcttcctgcaatctcccgtcattgtcttgggtagctgcaaggcctgaacctgccggtgcagtataacttggcactctttgtatatgtgtttctgtcaatccccaaccaagtacttctcttagtacctgcgacattaactaagaagttagcaatacttttagacactctgtttggcataaaaaagatcagaagttgtatggtgtttgcattctaaaaatagtaaaaatccaactatatatccacaatgaaaggtacaatgtaaaatcaatagttatagtatatttcattatcataaaaaagatgtttattgatataggtagtaaatgtcagagattgcataccttgggcaacaaatcaatcatggcctccttcagattctgaaaatgttcatcatcgatggaatagttaccatataggtgtttcaggacatctgctgcaattttcctgtggatgctgttgtacaagcctgaatcagttttaccgatacaatcaatcatattaggaccatatttctccaatatgatggtggcacagcttccaaatccgaaagatagctgcgccagctcttcacctgccagattttcaaactgggagcccttactcttgtgaagaaacatgtcgatcagggagccaatgaatctttctttgttctggtcacccataaccgaagatgtatcccagcatatttgtgcgagaacccttatagcttgtttcttgacctcttcgtcacatttgtcacagtcgataatactctccaaggagctgattgcttccaagcttgtcgatatttcgcgccatagaatgttgtttgatcttgtagtcgcagacatgaaccgttttataagtttcaccccagggtctactatatcgcgggaccatttgtcatgtttccggaggtgtagttctttgtcgtttataagtgctactatcttccagaccagatcatccgtgttgctcatgatcctcaggttgttctcgtcgtcggagagctttagaaggatttgaatgcctctaacctgcatctgtccctcttcaccgacagaaatacggtggccatactcctcaagtggctcatctggctgatgaaatggcttgagatcaagcaacgaagatatgcactggatcccttgcaggatcttgtccaagcggatgtcgattacaaagtgttccacaatcctcgcggcgcgcaacctgatctcttcgtcatatgggcttttggaatccagcatctgtaccaagttgtggagtatggagccggaggacgctgatccaattgtattggatatcagcatactttgtcctggaaatccgctcccaattgcacccgagttaaatcggatgagtgtatcaagaatccttactccagataggtacctataagataatagggagattttataaagagtaattttacgatccctgaaaggtaaaaaaagaaatgcaaattttgatatcaccttgtaaaagaggtactaaattttacattaaaaatttgatatctctcggaaactcctaaaggaccgtaaaattacttttttataaagagtattgctatgcacataaagtttcagtcatctaaaattatacattcctaagcctaaaattgtagagatatagaatgcgcaatttcacttctttttaacttgttatatattgtttttaccctgtttttatcttagtttggataattttgcatggaattttataaacagtcaatttatttaattcctttcatataaggaacaaagggagaggtacgagaaccactggatcagcatctaagggatgaaaaaaaagtgactgaaatttatggaaaggtacctgttaggtgatgtggactccatcagctgtgcggcgtacgtgatcatgttccgaccaccggcaaaggacgggtccttctcgcatcccaccttgatctcgtgcaagtaatccaagaccgatccacgtgacgcctcgtcgaacccgtatgcatcggccacatttcttaccagcttgttttcctcgtaagcagagatggtcctgtaatagaagagcacaccctgaaacaaagccagggaatagagaaccaccagcgccggccgcaggttcgccttgctactatctccggagtccggccgtctcaccgtaatcctgaaagattagacgccacagcgaaatccagggagaaacgaacagcccaaacatgtatagcaggaacagtgggcatagcacgatggtgaacaccagcacccgaacggcacccctgaacccgagctctgtgcgggtatggggcaacgcgatgaagactgaagcctcccatagccgcttgaatgaatacccaataaggcgtatatttccattcagaaaaacatcgaatatcctgtggtatacactataagtttcagttttttttatttgaaaggataaatgttgcatttaaaaagattgagagaggagatagtggaaatagtattgtttgttgtcaacaattcgtaaaccaacaatgcttttagtataaatggagcctaacattctgacgtgttagccctagataagtcactaccacaagatttttggagagactagccaacggatcctgtcgaaggatgggatcaccatccattcttaccagttttctcttctttcgtatctcgcgctccatcctcctcccatctatcgacctccacctccacctcccactctatctctctctctgtgtgtgactgctcccttcattcctaccggaacaggggtgggcactgggcacacgccccttggtgagcaccagcacctgtgccgctgtgcgtggtacgccttggctttgaaggctcaaggcatttcttctggcggttgagttgtctgcgacaagccacttcgagaaggatgaggtggtatccgtgatctctatgttgcgtgttgcgctaccggtggtggctattgggctctcacacgcaggggcgggcctaccataattcataggtattcagtggaatacccaagattttggacaaaaaaattcatatatgtaatatatatttcatatgtatgtggaaaagtatgcaaaatagacttgttccttaaaagaaagcccgacttagcaccatcccacctccctcctctactcggcccattggcacaataacccaaatcagcccaaaatggatgtaaccctaacctctccagctctccttcccgatctcctccatggcatggctacctagccccctccccaaccccgacgcgacggcgcatcgcctcctacccacccccgagtcctcaacggcggcagcgcccagctagctgcggcgcagcagcggctgccaatctcacgccgcgcgtccgtgcccccaggccggccgccgcgaaggccgccattgcccacgcgccgccgcccctgccctgtggcgcccgggcggcgagccaggcagtgcccgcactccgccgcccgcacctctaccctccaccagtccacctccagtccctggagctgcctcagacttagacggctagacgcccagacccaaacaaaggtggaaggttagaaacattttggtaatttggttggattaggattttagtatttaggtcatagttgaatccaggatggttcatttgatttaggatttaggatttagtttatttgaattgttgaatctaggaattgttcatggttgaacattttttatttaggatttgaatccagtcattcaggaatggttcatgatcgaacaatcgaactttgaaacttgtgattcacttatttgtgaagctctgtagcagagttagtacttataaattgcataagtgcacatattcagcagacttagtatggttagtacttaaattggaagaccatattgttgttctataggtttgaaacatgaagaggaaaaatgctcccacggttaatttaaaggcttttttagaagcagctgttgcaaagaagagaactcaaaaacaagttaagaagcaagatggaataagaatatttgaatgattgtttggttacattcattgaaagggatctattctttcaagttaaggataaagacatcattactcattttcatcaaaatatcaagaaacggaaagttcttctctaaattataagatttcttattattttttcattttctatgctctataaatttaatatgttttgtcaattaatactttagtatgcttaacacattcaatttataatcaattctataaatctacggctttttaaaatcatgtttataccgttatatattatacaaatattagactttaggttgaaaaaaaaattctcttccagtttcaaatacccaagttgaaaatcctgggcatgcccctgctcacatgccaggggaacgggaagacttgcaatgagtgaagtgagctgaggtgtgtgtcatgttgccacaggtggtacctgtactcgctgttgcacttgcacacatgttgaggatctaacggtggtgctccagatcgaggatggcagcaagaaggaatggtctccctcaacctcccagaaaggtacctatctcatctccgtgcttgccctgcctcctttcccttatcctctttggctctcgttagcatgaagggttggtctgagtagctgatagtattactcccttcgtccctaaataaaagggattttggttggatataacatatcctagtacaacgttgttaaactaggatacgttacatccaatcaaaatcccttatatttagggacggaggaagtacgtacttaggccctgtttagttccaaagtttttttccaaacttccaacttttcatcacatcaaacattttatacacatataatttttctatcacattgtaccaatttcaaccaaacttctaaacttcagtgtgaactaaacacagctttagtatctagattgatggacctggtacatgtaggtatcagactgcagcatctaaacagttgaagtggggcgtttctagtggggagatcaatgtggactgacgagtggttagatggtctgacaattaatcatgctcattaactatcccgtccttggaacgggcccatagcatagccgtagtcaaagcttttatacaggttcgagacgtcattagggtaataaccatatgccatgttggttgtaggcaacatatcctatgcacacaggccctcacgtgtatacacgtgcacaccaactaaaaaatgtcaccaaaaaatctagaaaaaatcatacacatactttcaa

SEQ ID NO: 22771 - DNA, 24414 bp, Oryza sativa
ttttcagctattagattagatcatattaaagtaattaatccttctttcctaatctcatgtgtacttgcaagagagaaaaataaatatatactatttgcccagaaaaaaatatacgtacatatatattcatgtacaagagactattatttgaaaaaaaaacatacatatgtacgtacatcagaaaagaactattaaccatgtcctcctaacccttaagtagaaagtttttacttgatcagtctacccctatgctgtactcctttctctccagtttatttcctagcgttgttgttgactaagctatatcgtatatctataatactcttatatataatacaataaaaaactattacattctatcatatgttatctatttttttaataaaaaagactgtatatttcttctgacataaaactaacgctataacaatcagatttcacaatacaattaaaaggagatcactaaggttccgaccaaatagaatgcagcacaatttattaatattgttgtcgaaatgacaaccgcatacgtcgaaagacgtggttactcaacagtggtaggaagaaaacgaagtgtattaaattttaagtttcccttcttttctctccccccattacatggccctaggggactattttatagccccattacaggttcttactactagggtttaggttatacaggagaatttacatgattaccctgatgaaaggacatttacaggggtacatgatgatataggggctcatgggcccctgatgggccgtctggcgatcgccggccctattgcccctaggcttgatgggccggaaaggcttcttcggccctcgcgggggtgaacttgccaaggcgaagtcgtcttccttcggcagatagtcttcgccttgcacccttcgcctgagatgcctctggcctggcaaggcactcgcacgactcttcgcctcatgccgttcttgctccatagtcttcgccatgggtttcggcagatttggtcgaagggcctcatgccatccgccaacaaatatgatgatgcaaaattaaagaaaattaacttggtgaaaaatacaaaatagtaattaaattttgaaaaagaactaatgattaaaaattacactccagtataaaatacaccttaatcatatcctatcttactataaagttataacccattaattctaaagctcaacatgcaaacatgtcacaagaatatatccatcatttttataatccttaacatatattcaccatataatcaaagtatgggatatcatatttcatctactaaatgtatttctctctaaacatagtttgacaaccaattttatttttttaataactaatataaattttacttttacctcgattaattaaaaaaattaaaagttatttaggaatttccgcagcaaagcgcggggaatcacctagtatatctataaagttcatccttactaagtgtagttaatactaattctctctctcataaagccacatcatcttaattgtttttagccttaggatgatacataaagggtgtaaattgcatctctttacatcacctcaattgtttttagtctttagaagatttatcaaaggtgtaaattgtatctctaccccaaaaggcacaccatataacccaatcatttataacctatggataattgataaaggcacagacatatataaacacatgaaaaaaaattgtataataggtaagaaagaaaattttataactcatatctactatataatcacacaattctcccacaacaacgcgcggggtacccatctagttataatgtagttacactataattataaatataaatgcaagtgaagtgtaattacgcagtaaaaacattcagattatgctaattgtgacttctctctctttctgccatttgccagtcgcgtggatggcatctgacctttctactggtcgtgtactggtagtagtagaggtttagagtagtagcaatggctcagctaagaagccagttagtgtcagcttagtaaatgctatagcacagatctcaacattagaagtaaatttcactttaaggcactatattattatggatattttgctttttacaatgtttttactttgcaccgggtatttttacctttgtgacttttttgaccaccctcaacttttttatccatctatatcatatataaaaaaatatggtcttacatataactgtgacacttaattcattattatgagccaacctacccaagatcgttgacatgcttacctagtccaaaataaaaatattgaaaatactggtgaaagggtagtataaaataaaacattcgaaaaaaaatatagcccaaagtgaaatttatgacctatatatagcatttcggattaaaaagttatcacatggaaaaatattctagcccctttttatgactttccgatgcaaataatcttgacaattacttcatgctttttaataactggtagtggatattttattcatttgcaacccacttttttctgtagaaaatttataaatatgttaactatcttttgaattaaaaaatattacatgaaccacattctatcacttttcatgatattataaatagtcttaacaattggcacaaataaacttgaaaacatatattattgtatcatatattagcccacggacatgcatagacgaattagatcaataatacaaagaaacaaaaatatcaaaaactcatatcacctcatatattcgtgaacaattactactcaagcaaataattttttcacgtggttctcaccactgaagctattagattatttgaagtaatgttgaatgatcaattctgcttatttttagaagagaaaattacttttgtaccactaaaatttagtagaccaattaacgccataaacaagtgctaactctattttataaatggactcaaaacttttaaaaaaatatttatatcactttcatcttatctatgtgtcattccctaaagggcgccaagcatagataacatagcatgctaagctaacttacgtatagcggggtcatgcatatgactgagttgaggtgaccccagtgacaggtacagtactcacaataaagttcaactggcctacttaaaattgtgctccacactgatcttgaggagcacagctatttataaatagaggcaattgcaaatttaccactactttgaattcttattgcaagactgccactaaaaaattacaaaaatgccactagtactgtcattcgagtggcatccttgcaaaattgaaaaaaaccagtagcaaatttgcaaatgtcctaaggtaagttgctcgtgcatctgtgcgggttttcttcctagttattttaaagagtaaaatgcactagcggtccttaaacttgtcaggagatttcacttaggtccacgaacttgcaaaatacacatcgagttccctaaacttggtttattgtatcatcccagtccaaagtcgtgtttgaccgtggtcttgcttacgtggcacgccacgtggacgatgacatgaaattttttctcttctcccttttttttgacccgctgtggccacaaaacatcatctccttttctctctctctgcctgccgctcgtctcctcctcgccaactcggttgccgcccccgtctctccgcaccacgccgcaccaccgtagctgctaatgacaagctagccatggcggcgacggcagatccgcgaagccgcctgccacgacgtcgacgcaccacctcgagctgtgggagcagctgccgccgccgctgctgccaactcccttaaacggtgggatcgaggagctccgcgtgccccagcctagcccctcacccataccgccgccgccgctgacaacgaagcctgagagcctacctgcggagatggacttcgagcccgagctcaaggcgctgcctccgcctccacttctcgccctgtcacagccgcaagtggatggtgcagtgaggccgtggaacctgcgacagctgacgtggcggcgcccagccatctccttgtcgtgggcggcggcggtgcccatgccgtcctcattccgacgccggaagcatgcgccatttttggtggcactcaccgcggaggagatcgaggaggacatctatgcgccactgcccccctccctcctgtcagcgccgctgtcctccctcccatcgcgcgcttgcctccggcatggcagctcagtggctcggcgagtggaccagaggctgatggagaaggagatggaggcgcggctgtggagctcgcggtgcagcggctgccggagagaaaaaaaaggaagaagggagaaaaaaaaaggagaagaagggagagaaaaagaaggaagaagggagaaaaaataaaaaaatttcatgtcatcgtccacgtggtgtgccacgtaggcaagaccacggttaaatgagactttgtactaggatgatacaataaaccaagtttagagagctcgatgtgcgttttataagttcgtggacctaagtgaaacctcacgacaagtctaaggaccaccggtgtattttactaaattttaaatgagcgatgagactgtcagacgagggagcttggcacaatacgattggcagattggtctttagaaatctcgttggcttgctctgctatgttgatgattcgatcgtgtggacctgtatttttaatggactcatacggatatttttttaggaggtgttttagatcatgggtgtaaagttttggcgtgtcacgtcggatattatatagggtatcgcatgagatgttcgggcactaataaaaaaaactaattacagaacccatcaataaaccatgagacgattttattaagtctaattaattcatcattagcaccacattgttaaatcattgaacaattaaggtgtaaaatttttgtggggatctaaacagggccttaatcgtcctatgcagccatggttggagtctgatatccctggttatagggagttgttatcatgtatggaatgatatattattgctccgttggtgtattcatgcacctgtatggtatcccatatttaggacacactgacaatagcaactagccgttgactacctagcctccatatttaggagtaaactctattcaagaaaggaccatcaatcttacatcatctgagccgatcaagcagtagccattgactacctagcctccaaacattcccaactgccaacggcagctccaaccagccacatctcctcgcggggccaaactccaacctactccctccgctaaaaaaaaatccatttctagcatcctagtatcgaattagtggagagtgaaaaaaatagtaagagtaagggtattgaagaaataaaacttctcgttttacgtgttgagggtagatagaatgatagaagttggttttttttacaaaatttaaactctagagagtacaacacatcccctggccaaacgtgcaccgatgcctatgccagagccacatccatcgtcgggcactccaagtggtcgcctcgtcgcccggcgcgctcctagatcgacatcacctgctggcgcgcgccacacccaccaccaacctctcctggcgctgccgtcctctgctcgagcgccccaccagctgctcctacgcaaactccacacccgagggatggcagtgggccccgttcccggttcctgtagggaattctcccactagggaatggggcatggatacaagtgattctccacggggaatcaaatggaggaaaattgtccccgtcaggtatagcggggcggggatgatcctctatcctctgtccccattccccacggaaacctgattattgtatataggggtctaaatccaatgtgaatgttacatgtctaaaggactaacagccatgataagtggataatcaacaatattttgttcttgtcatgtgactaatagatactccctctgtcctaaaatgtaagcatttttagctataaatctggataactgtgtgtccagattcatagccaaaagttgttacattttaggacggaggtagtatatgctaatatattgctatatgttatggacattatttattaattacatatgtgatttaaggtgtaaaagatttttttaaacgtcaacggaggatccgcggggattaattccccgcgctgaggcagggatgggagaggatgggggcagagaaatttcctactcacaggggcggggatggggacgttgccgtgcctacacccgatgcttgatccggccagagggacgctagatctggcattgaggttgctagacccagtcgtactagccgccacaactgtacacatccgacacagctaactagacagtctgcccaccatgtaggccacaatctcttgctcacaacaccaccatgcccctgaccatcaacttgctcgtgcatgcgcattagatccgctacgcccaccgctcgctagatccagctcaggagggaagagaacggtcctgttgccgccatccttgctgccacacggtctctggcggccggctcctttgacggcgagctcctttaacggcgagtgcgaagggaggaagacggagaggtggcgcagtgagcagactcaccacactatccactctgtggggagtgacacagggaccttctgaatgaagaaaaccctgaaatgctgcagaagtttgagcagcacaaaaaggttgtcttgtgttgttcattcctctagtgtttctaacatttgaattttagtattgcaactcccaaaacacatattgcgcagtctgttcggtgatgtgtctattttgcttgcaacatccccctacgcaaaatgctaaacatacttttgataattggttgagggagtgcctagatccattaaaaaaatgatttcttttttaaactattgccttgttacttggtcaatctgcgttgtcaaaatgatgtaatattatactaccagtagaaatgatctaaaccatttattattaagggtaaatcggtgatttactaatatagtaattaggggtaactttgtcctttatgtttttttcctggctaaatcgatatgtagtcatccattgccctggtatcgctcatattccatccaaaaagccaaaaaaatgaaaaaagaagtttagtcagtactaaatgacgattataccctttaacgcagtttttttaaaataatgccacttcacgtttctactgccgccaactagggtggtggtataagtagatatgaactcttcaattaaatgagttcaatggttcatattgatttctactactagtagagagagtactgtagtggggctctaacccttcatgtcttttagatggctccattattagtccttatgcttttataggagaaggacattataagtaatggagctacactattgatagccaagatcttttattttactttggatggcacaattcctatagaacatcatcatagaacccacgtgttttctattcgagatttcagtcggatatcatcaggaagggatggggatttaaatcccataaccttgagaattttgtttaacttgactcattggccatttggctatgtccgttggcagaggccggagatataagcaattttcattataaaataaaacacatgtgtatgtgtatctgagtgttgtttgagatcgatttgaatattttactgtgtaatatgaaatctcaacgtttcacaattctgaagagaattcaaattaaagctatatctaaccataaactagcaagctgaaactccaaatgctcggcttaagggtcactacaatagaaatgcacaaaggtgtcggcactatagataccggaagtgttaaaacctagaaccggcgccttcgaacaaattatatgtgccgattctaaagaaaaaccgacaccaatattattggtgctgatttttttaaaaaaagaatcggcatctagaatattaataggtactggcacctgtaaaactgacctgagccaaaccggtgggtgttttacctcccgtccttatcctctctctctctctctccgcccaacccacccacccacccaccattatctctctctttctcgcgcgcgccctcccaacccagcggtggcagcggcgatgatgggaggagaggcggtggcaagggtgagattcttgtgttcttgatgttcttgtgttcttggtgttcttgtatgttcttgggttaaatgttcattctatgaattaaatgttctatggaatttggttctagtgaaggtgagctgctcgatgcatcggctcgaacatcaagctggggttcttcgtggaaccttaaaggtgtcgatttctaaaccggcacttatttcccttccacatcaatgccgcctattaggtgtcggttggtaaatccagtacctttgtgaggttctcaaccggcaccgattaaggtttgtgtagtagtgggtgcacttgatcagtaatgacaatcagatctaatttcaggaattgtggagtaattctaattgtttcccttgtttagtaaaaccatatgagatgctagtgatcaggaataaaggattacggtgtaaccaatattccgggaatatgtggcattggagtttcttttaaaaacatgtgtctatcctgggttatccttacccttatgaaaacttatcgaactacagaattccctactatttgatcccgatggataggactatgggggtaatattccacaatttcctatagccaaacgcacgtataattggttaggtctacggaggtaataatattaagataacgattcgctataactaaacgcgaagtcttaattaattaacctggaacaccaaaatttgattgagatgacaagctgacctcgtttgaacgaacctaatgaccgtgagactccagaagtccttcgttgatagcgtggaaacgaatccaccgaggaggacgacggtggaccaagtgagcaccaggaagcccgtcccggtgacagccattgacaggtaccccatgaacatcgcgtagtcgttgatcagcttcacctctggccagttcccatcgatgtgcccaaggcgatgagcacggctctgtccaccggacattctgttcacctgcagagacggtaaatatttacttgtacacaaaactacacaaaatttacttgtacgaacaggctctaccgttctaattccgtttacgaggaaaaaggaaatggtaggaagctatctttgcatttttcccgaccgttttagtccttagccgaagctaccatcggctggaattaaaccaaaccctagaaattacaagcaaggacatctagatcccaagttccagggaacaggcaattaaaaacacaccacaccattatagggaagatgacaaagtaatctctagtcacagaatctaaagatgtcacctgttttgccaaaacctggcctgcgccgcgacacgtttgcctcagccagtcagcctgctcgatcctcctggtagcgaactgacaattgcttggcgtcgccgcaagttaggttcggtttgcgtgggaatgtagaaagcagaacgaaggaatcggggaagaagaacaagaggaagagtgaggctggggaattcgatcaggatttatttactacttcttggatgccttgcccattcagcaagtaggtgatttaggctgtgtttagttccacgtcaaaattgaaagtttaaagagattggaacgatgtgactgaaaagttgaaagtttgatgtgacggaaaagttgaaaatttgaagaaaaacgttggaatctaaaacagagccttacacaattccacgcacggcccacactgccatcataaccgttgcatattttactaatccgcttgttggcctgttctcagagaacttaaagctcccaaacaatttaattttttgtctagattataataaactcgaataaaaaaataggagcaaccggttagggtttgcaagaatctaagaaagctatgtttccgcttctagcttcctagttaattttttaagattctatagctacgatttcttagaaaaaatatatattgtttgagaatgctaaaggttctgagagaagctgcagcttttagactccccgaaacatgaaactatatagatgcaacaaaagcaatgcagcatgtaagtggcacataaccattaccattatatgaaaaaaaaaaaacattccgcctgtcaaactatcttcaaggccgtacctaagaatccttcattatagttttttttttttggcaaattttgctacaggacatcgcaattatgtggttttagctcaggacactgcgaaagtgaagttttgggggaagacatcccacaatcatgaatatttgccgatggataccgcgccgtctaaaggatacttgccgtgctgacgtggcgggcgagaggcccttttttgacacggtatgacgtaaatacccctgctgacgaaggagggagtagtaggtcccacattgaagcggttgtgttggttaagaggaggattaaatagaaatttactccgttggggaccagttgctgttgagacattggaagggacgaggagggaataaatattgcacaagagataataaggttatgtggggcccacttgacagtgtcccactcctcttctttttcttctctctcgatttcttctcctctcgatctctcctcacctctctccatctcgtttccctttctccccacgcgcgcgcgcacccgagcgggatgcggccagccgcgccgtcgcggccggcaaccggccgcgcaactcgggccgaggtgacagcggcggcctgaaggcagcctggcccggtggcgtcgggtggatgggaagatgatggtgacgatggcaggttgttggctcacctgcggcccgtggaggaggcgcggatgagcggccaaggcgagagaaggacttaactggcggcaagcacgagaggggagcaaccgctgcttcgtggcaagttgggggcgcaacgagaaggggaggtaggcagccgctcgcatggggaagacgaggccagacgagaggcagtcaacgaacgaggcctctcacttcgcctcgtctgtctatcacggtgttgcctctcgcgcggccggcgaccggctgcggcggcacgggccgaggcgatggcggcggcctaaaggcggtccggcggcgttgggtggatggggagaaaaggccggcacagcgaggaggtgccggggcagcgccgggcagaggaggcggaggtggaggcgttgggtggtcggcggaggcggcgcccgtgcgggccggcttggccgcgcgcgggggcagcgctcgtagcatggtggtggccccgagcaagacgaagacggcgggtggtggcaaagcggcagtggcgcacgggtggtgctcgtacgggacatgtggccacacgcgcagcagcggccgagcgtggcgatggcttggcgcggcggcggagaggggaaagaagtagctggcgacggtggggagtggcctgacgggaggcccttttttttgctgacgtggggctagggtttttgcgtccgaccgcatcaaaaaagggcctcccatctgccacgtcagcacggcgagtatcctttagacggcatggtgtccatcggcaaatatccacaattatgggatgtcttccccttaaattttactttcgcggtgtccctgagctaaaaccataaaatttcgatgtcctgtaacaaaatttgccttttttctcaaaaaaaaaaggggggatgcagccgtcgatcagtggtcacccagagattcttgggttatagtggttatcaggtacgatacgttggatatcacgatagcacgggctaactaggttagcaatatcacataggagaaaccactgtgtaaactaccggtgaggtgaattgagccagtttttatagttgagggatactctatgtctagttttacagttgagagatgaaagtaaaacgcaggttataattgagagatgtacataggagcaacttgtagcggaaaaggaagtcacacctctccatgtcatccacgtgcaggccacatgaggagaaaccctagctaccgatcgcaccaattcccgtgagagcaggaagctgggccgtcgtcgggaagtcgggcggtggtgtggccaataccaaacgatggtctccttcttcggcaagggggagaaggagcgcaactggcagatccaacgccaacaccaccaaattccccctccccctctcggcgactggatctgatgccccttcaccagatctggcaggggtcgtagtcaatatggcaggggtaaaggtcagcctgtgagagggttgtcatggttggcagcgacagacgaccggaacaggcggagcgaaggtcgtgcatggccgccggcgagaggtcaatgcggcgtggagtggtgtggccggcgatgacgtgaggccgcctggccaggggaaacaggaggcccgcgctgcgtgtcacaccctaaaaatcttaaatatataaattattgtttaattggaatttttagaaattattttaaaagcctacaagctaaaccctaattttctaggaaaattttcaacataaaaataagctagataaaattttattaaatactatgcttgctcctctattttctagatttttctgggaattatttgagcaagggaagtatttttaataattgaaacatcatttcacaaattgttttattcaaaaaagttcaaaaatctttctctttggtcattgggccgaattcggcccaatactctctctttctctctctccccgcgcgcggcccacgccggcccaagccgctgccgcccgcgcccctctccccagccactgacatgtggggcccacatgtcagggccgtcttccacctccggccggccgccgccgagcccgaaccctagcgccgttttgcgccatcgattccgcccaaatccgagcccaattccttcgattgattgaggggttttgttcctctcgttctcctctttcttttccccccagaatcaaaacaaatcgttgcggtttggatccgaatcgaattcgtttgtttttatccctaaaaaccgagtccgagatcttcccgactcgattcctttcgtttgcggcttgatctcttcaatccgagctcatataaaggttcccctcgtcgtcctctctcgtttgccccctctctcgagctctcccgtgccccctagcgccgccgcgacgcgtcgcaagtccgccgccgccgccggccgtcttcggcaacgtcgccgcgccgtctccgccgtcgccaccgctcgccgccaccaccgttaggtgcgccgtcgtgcgaggaagctcggccgcccctccattttcgccgccgaccaccggagcaccctcgtcgccgttgagccgaaccgccgccgccttccttctcgtcgccggccgccgtcgtacatcctttgactacgtggtgagtaccaacgggttcgtctcgttgtcctctacgcgtaggtggtctccgtttccgccgccgatgtccctagcgccggcgagctcgtcgtcccgagccggccgtcgtgctgacgtcagcatgacgtcaaccctagggctgacgtcatcagggccagggctgacgtcatatctctctctttttcctttttctcggttttcaaatagattaaaacttcggaaaatcataactaaataaccgtagatccgttttaggtggttcaagtttctaaatttttctaaaatcaagatctacatgttaaaaatatccacatgtactgtttatgcttgtttttgtactgttttgttgattttgtttatttgctttagtttccgacgttccggaggagagcgtttccgttgaggaaggttctgaagtgtttgtggaagcccaaggcaagtcacacagatcccaaacaaccctttgagcatgttgattccgtttaaagctatcattttatttcaactatgcattgttttcgaatgtcatcgggtggtgaacctttcccagttaattaatggccgaagatgactttattttcctatgggttataacttgattagcatgaaccttatatattggattggttcagctaaatgctttatatataggtttgcttagccatgcttagaaacattagctaattaaaaggggttaaatatgaattatattataattgttattaattatggttttatttattggtagctcacgatgattgatcgtgtgatgttaattaattgataattaaaacctggctaaggtgggttgtgagcatatggttttgatggttgtgctcatgacaattaaggaccggttcgcgagctactgttgtgaaacatttatcgtgccaaccacaagccagcgtgggcaacagctttatcttttgtatagcgtgattcattatagtgcgccagactgagaagtggcgagaagtccatgggggtcgctggggagtccatgccttgtttataagggggtgattatgatccaggtacggtgcactgtggtgaattgtgttatgcgaggggtattgtcacgactcctttccgaggtatcgtggtggtactgaggcacatggtaacatgatgtggggttgtgtcttgtgggtacagtggtacacctctgatcggagtttaaactattcgaatagccgtacccgcggtaatgggtgagttgagcaatgtttttcgtgattagtctcacactactcgttaatggtaataatgtggtaattaatttagttcctggtttggaatggataattcctggtttggaggtttaatttgttcaactggggttggttgttcaaatgtggttgggcctatgcaacatgggtgtgttgtatagtgtttatttaatattgattaattatacaactgtttttactattctcttaaatatttattaaatgctgttttctgcaaatgagctataatatgccatcctttgttatcctgtgcacttgcatatttgctgtgtggcttgttgagtatgttatatgctcattcttgcaatattcattcatcagaagaggagtacttcagtgaaggtgatgatttggaggattaggcttgttcttggttaagttgcctgtggagtggagttgccatcgctgttccgtagtttgttttagttttgttttccgctgcgtagaatgttattgctttgagaggaactatctacctctgtaatattttattatttgcgaatattcgatagttaattatttgtactctattatcgatattgtcattgtgtgcctcggttgattcctagacgagggtttaacacacatgtaagcgtttggaattttggatagaaattccgggcgtgacactgcgcctggggcacaagcaggaaggtcggcgttgtgcaagcagcgatggccagatgccagcgtgatgacggcggacatacaactagagcggggtggcgaggacaacgagaagccacgaccaacgacaagtcgacaagatgagcaaacacggcatgggtaggagactggatggtgctccgagtcgagatccagcggcagcaagggcaacagggctagtgacgcgactcgagacggggatgatgcaggtagtccggccaaggtggcggtgatggtagccccgtgaggtgggcattctagacctatggcgagctttgatgcagatgctagtcctcttgcggcgacggcgcattgccgccacaagatgaccacgttggcgggctaaagtagggaagaagggggccatttttctctctcaccctctccctctctaagccaactgcgtggatgaaattggagcacgccgaatgtcgggatcctacttgatggccaaccgatgacgaggcgttgacgcggtggctgctgttttcggcaagcggtctcgacacgagaggggaaaaagattacgaacataaccccagcctgttcgggccagcaattgcaacacttgcgggtgccacatttcccttgttgcatgatctttcttgccctctcgatggatttcttcggtcgaaaaccatgtcccgatcgactttccaagtgaaaatccttgtagagatgtcgctttcctgctttacttgtagactcgtggtgtgaatatcttttacttctcatccctttcatgtttcctggctaaaatctcccagagctatagacatgtaatctctttagtgctctatcaatgtaaagaggatttttactgtccttgagagtggccagtaccaaatcgtggtcgttcaatgagcaagatcgaacggtcgagcatgagcggtaccgctactttgcgagaaaattgggattatactatcgcaaaagagtagtttcgctgaaatgctatcgctttaaactgattcattaaaatgctattctaaactgaaggtgttcaccaaaatactattttcgctcttttaggtaaatataaatgtttttacctaatttcaacttttttcggaccaaaatacccttgacgcgggccccacctgtcataccctctccactctctctttctcctcttcctctctcgaggatgccgttgggagcgcgaggtggccggcgggtgggcatggcgagggtggagcggggcatggcgacgcggggctagtgagggtggggcaggtgtggcggcgcgggaccaacctcatcaccgacgacgacgaagccactgccgacgctcgccgacgctcgacggccagcttcgtcgaggagcccgtcgaccagtggctcttcatcgtcgcatccggtgcggcttccgcctcctgctcctcggtggcgacgatgcggcggtgatgcggtggaggaggcgcgaagaaggcggcggaggcatgaagaaggcggcggcggcggcgcgaagaaaagcatctagagcgccttggtgcgggggatctccgcggctcccaccaccgcctgaagcgctggcgacacgaccagggctacgtcagccctgtagacgccgtcttcttcggggccacggccgccggggagttggacgccgcggcggccgcgtgcatggctacggtggcggcagcacgcagtagcggagcgaaggaggcggccaggaggggcgggcggagggcggcgagcggggagggggagagggacagcaacgcggcgtcggccactactcgccttccggccaccggtgctctcgcccgtcgccaccctcttcttcggggtcgcggtcgccagggagttggacgcagtggcggccgcgtgcacggctacggtggcggcgacgcaccgcggtgatgcgaaggaggcggccgcggagcgagggaggaaagccactagcggagcgaaggaggcgagccagcggcgctccctcgagagaggaagaaggagaaagagagtgtggagagagtatgacaggtgggcccgcattaggggtattttggtccggaaaaaagttaaaattgaggaaaaacatttctattcacctaaaagagcgaaaatagtattttggtgaacacctctcagtttaggatagcattttagtgaatcaatttgaaaggatagtatttcagcgaaaccactcttttgcgatagtataatcccaattttctcctactttgcatgggggtaccgctcctccttcggtgtgcgggagtagagtgaaagggtaaatatgtactttcgcgtttatcctcttccatgatgctctcgcctctcatttttgcatcgtcaaagccccaggcggcgcggcgccgtcaggagatcggcgatgccccaggcggcggcattaggaggtccagccaggctctcgacagtggtgcttatatcagggtgatgctcttgccagcggcagttaggatcttaatgaaatctcaagaggcaaatatcaggggtccggcgaagctctcggcggtggtggtcacaagctcggtgatgcccccccccccccccccggctacgctcatgggctactgggctagaagatgctgccagttgcatggctgacttcccgtcctttaatttcagcgaagctcagtagctcacccacctatttctttcgtggcacaaatatactggtgttgatttttggtggaaaaaaacttcgttgttactcttgcttactatggttattggatcgattaattactgttatattccattaagcaataagcatctagccaatagccggctcgggacggcggcaggcacagcggcctcgatgagagggcggtgggctggatgcggcggcgcctggagcggcctcgatgcgccggcggccgcggcagcctcgttgtggcggcagccgcgccagggtcgatgcgatggcgccgcggcgagagaacaggcttgatacggaggcgccggggaagcttcaatgcaacagcgaggaacggatcattagcacgggcacctcattttcattagacggtcctacccctattaaaccgatggttagattagattggtacctcatacctcatggtacctctttaaggatgggaaagatgctccaatgtaaatgttgcactatcttgtgcagtttgtttaaaaaataaatgtaatctttttagggatgtgtaatgaatttttagggatgtaaatgtaaatgtaaatgtttagggatgaatttttaggggtgtaatgagtcttttaaaaaataaatgtaaatgttagggatgtgttatgaatttttttgtcctcttttaggatttgggccatggaacatgggccatgggccgtttgagcgagacaggtttcccatatggaaaaagtacaccgaaagcccctcaacttgtcatcgagttacaaaatcatctcccaaccgcaaaaccagatatatgacatccctcaactttaaaaaccgtttactttagatccttcggtggttttgatcccgattttatccgacgtggcggctaagttagcgtgggacccacatatcaggatgccacatcagcacactctctcttccccctcctctcccttctctctgtctctctagtctagtacttcatatgcttagtattgttaaaattgccagttcctgaaactgcacacaaatttattccacctacctattcagctatcccttacattttgagggtttctttggaacgcagggtaggatgtcacgtgtcctacgaagaaaaagttcacctgaaattacagaacatcttgtttgataaccccatatgaaaaacatagacactagcaagatctcatgttatttttcctccataattcctatgaaatggcaccttccatacgaattttaaggaatttcttacatatattcctttgtttcaaaagatcacatagacccccccccccccccccacttcaattcttcaaaattcttccaagtttcatttgttccaaaggagccatgaaaggttatatggtattttaggacatttagcttgcccaccccgcttgcattccttgcattcctactgctagttacagcggctcaaaaaagggcaaaggaatagcgaaagttaaggcggaagtaccaaacatcatgtttatcagaaaaacaccttatcacaaaagcatcgcatatgagcttctagacaatttaacagggcctgaatataaacggcacgctgacagtagcatatttccaaacgtacacaacaatgtcaatcaactagaaataaatatataaatatatattattatatctctctctcacacacacacacacccctgtttagaagaaatataaatggtgcagatgtagagttaaggtaaatttcacaggatgttaaaagccagctactcatgttttaaaggaactggcaatgagacctgactgttatatttacatgataatcatatatacaaagtttctaaaccgaaccaatcatatgaacaacagactgtttaattgatggtaactattttcacaaggattagctgcagagcaggatgaggctgatgaacagccaacaagctaaagggcgcgcaatgcaatcaatttgaaagttaacgttagaagagtgcatctggagagaaaaggagatgaagtggcgttgcaatttggacctaactgaggtcaatttcaacacgctccggtgtccccctctcgctttcctgcgcgacgagttcggtacctagctgccctttgtcccctgcaccaaacgcatagagttttcctgaatctgtcagtgcaaatgtatgtgcattccagtaaatggagttagtgaggctgatctgagcaaccctttcatttgttcttttcaaagaagtcaccaactccgggctaaggacattagtgtgcctattattaccctggaaaaagaaaaaaatatacatcaagttcagaagcagagagtaaagaaaaggtttattatactgattctaattcgcagagagaaatgcaaagttataaaaggtatatgagcaaatgtgtttatcttttcactgaagattatcattgtgagtaaggatgagcagataggtgaagagctaaaagaaaatgaaattcacagtagagggttaatagaccctcaatcttttgacaaaacggaagacagacattactgaccaatactcttagaaaataacaatagtagattgaaatacatactgtgtgatttaattggtaaattgcatttagtgtagcatttaacaaaaattatggaactgtgtagagaatcatagagcattgagctttgacagcctattgtgaatatgcagacagaatgaaaatataactccatgtttttgttaaataacttcaagtattcaaaacatgaaaactagtgcctaacctcagttatagtgttgtggccaagacttgatgattcaccacatccaaacgagtaaacatcacctttatcagatacaacaaatgtggtgtaatctccagttgctacatggacagccctcacattgactaaggactcaacaaccttaggaacagactcacattcctcattaccgtgacccaagcagccataccgcccccatccccaagtgcaaacacgcccatccttgcctacaacagcagcatgccaagcaccagcagcaaccactactggttgtatattcaaagcttggaactgctcgattaacctagggtatttctcatcggttcgagaaccatggccaagtttcccacctaacccacaaccaacagaataaacagacctgcaacaaaaataggacaaaagcattttaatagttttatcatatctataacagctggtgtataggtaaaaatattcaaaacttgcatactggttcacctgtctatcaaagcaaaagacaaattcattgaaaatgttaaaacaatttttcatatgttataacggaataagagacattagttttttttattattttatctgatcatacaaaacattaaaataatacagtagctatactacatgcaaatgtaatacttacttgacattagttcacctattagctaattgttgtcaaattaaccaaggctgaatagtgaagagtgaggctaaatgcaaataacgtgtggtttgtttattaaaaaaaatagtatatcactaagccatacttcacagcattgacaaaaagttgcatgtttgggtgaaaaatcttacatgccacttggttggcatgccagagccaggagatagcagtagcctgcggcaatctgcacaactggaatgttctcaagagggcctgctagaagatgaggctgaacatcatttggctctgtctgatgaccaagtttcatgtcattcccccaagaaaatgtatacacatgaccttcccgagataaaactgcagtaaagaagttcccgattgctgcctggacaatgtatatgtccttcaatgattccaccagctgtggtgtggtgacaaccctagaaccttgggctgcatattccacttctccaaatgaatcctttccaaatgcatagaccctaccagcatcactaacaagcattgtgcgtcctgctcctgctgccgcttgaataattctaataccctgcaatgatctatacgagcaccaacagacatttagcactcttttaatctacatttgtgtcatgactaaagttatgataactgtatattctagaagcacctgataatccgtggcctccactcctcttctaaactaccatggccaagttgaccagagctgttggacccaaaagtatacactgcaccgcttgttgtcacagcgatgctgtgaccaggtccagcgattgcctgagatttttccctccggcaacatgcttcacctgccattataaacctaagaaccagcttccaactcccgccgcaacgttgcttaaacatttctctttcttgttgagtcataggtttaaatatcgcccgtttctggcacatatccaacgctgcgagttctgacattgacaactgaaaatcgggagggaaattggcaggcttccggaaaaacgagcatgttgcctatcgcaagcacaaatttcatcagtggcaatatcaattctacattggagaggaagaacaaaacactacttgcctccaagtgagcgaggtcatcaggttccagattgcatgatgtgaggacatggaggacaattgatgggtttgcagccaaggggaattctccaggagcagagccaccaaagcaatggcgctgtgacctctgaaacgactgctgcaacggagaaacagggcaagagcatcatctatgataaggtggaggggtagagaggaggaagctccactgctcgtcgtggcgtccatctgccacggctgcgacttgcactgccttatgcttttatctcaaacttgtggtgttcctggctctccagaagtccagagtgaattaagtacaggaccattctgtaatgtgcaatgcattaatgtaatcaagacatgtaactacaatcattaattgttaagtaacttctctaacaagctcatcagcacaccttagtttaacacaattaaacaataatatgttatattattcatccgaatcagaaaagtggatgagaaagaatccatccaacacttgtaaacaaacaatcagagcatatcaataattgaaagcattcccaaagtcaatgcaatcaacagagcatatcaccctgaccaaacatatagagatgccatattcttctggatggcaaacagacactaaatcagatgcaaaacaacctccaaaaatcaaggaaacaaaggaagaaaacaactgaaatctcaaaacagtgcccccaaacccagtcaagaacaccattagacggttgtgaggcttgcaccaagaaatgattgatgcagaacaggaacatgtaaaatggtaaaggacaaagagccacttccaccccctcacaaaacaaagcatattcctcccaactccaccccccacaaaagtctacctttcttatcctatccaacaattatcaacaatatccacagttaaccagtacacacacaaacaagcaagattccaactgcatcatcggcggcaaaagatcacacccactaacatcctaccagtaaagaaagaccccaattcgagtaaacaacgaaggatccacgctaatcgccccgattctgatgaaaggatcaccaaaaccgagaacatcatctttaagcagagaacaccaatccgaacagacgatcatcaggaccgcgatcatcgccatgatcggctccaatcatccaacctgacatctaattgatcggcacaccacccacaagaaaccaagaaatcctcacccgctaattccccccttggttcttggaccaagaacacaaaagaatcaaaccccctcctcctcaccagaggcaaaaaaaggatcaacgaacacgcaccaacgggcgggtcggccagtcaatcaatcgatcgggaattcttggggttgggggaggaggttggagaggcgtgaatctaaccgagaaacgggggaggagagagagagggagaggatgagagcaggcgagcgacggacagggacgagcctcccaataatgatgatgtgcgtgcgtggagaagggagagagagagagagagagagagcagaggagagagagaaaagcaaagctgcaaaaatacgcatagaaacagcaacctctctctctctctctctaccgtcgtcggctggttcttggggaggagatgaggtgtcgacgaagagggaggaggcgacgtcgaggaggagcaaatcgcagcggccaccgaggaatcatgcggtcggaattacgggaatgccatcgatgtcgctgacaggtgggttatggagggggtggggcccacgtgtcggtgggctgcggtgggacgggtttggtgagtttatcgtcgtgctgttggggttgggggtcaattacttgcgagccggatttgttcgatggcgtcaagcaaacgtccgctgcaaggagtatttttgtcactgatggtcatactattgtttattttctgtagggtaagtgtgttttactcataaaactatttttttcactactggttataggtcctggttagatttcaacttttttctttaaatttttaacttttccataacatcgaattttactacacacaaacttctaac

SEQ ID NO: 22772 - DNA, 8369 bp, Oryza sativa
cattttgaccgtagcacaggtaaaacaaaaacaacgggttggttgaaaatttatgtcaaatttacccttggcaatgatttggaaatagagaagaatacaataataggaaaacatacgaataaaatgccatgttggttggatttgtatgggatttcatgacacaaagaaagtttcaacaccgtagtttgattggcacataagaaaaatgcagaattacatgacactggaagaagaaaacatgaggtggaacctcgtacttattttttctctaaaatttctctacaatagaaatttcaaaagaattggtagggatgtttttcataggattatttctcatagaattcttgtttttttttcctttgtttcaaaggggctgagaaaataaagtgaatatggggaaaggcttgaatccacaatacaagtatctagagtaggggtaaactactaatgaatggtgttgacgtattttaaaacaaatgatttgattgaaattgacaattattctaaatggagggagtattttcttctctcaaaacatagtttctaacatattttcctaattagtgggaagaagatgcgtacgcatactacactcacacctgagaatgcactctctaagagacgaacagcatgtgtgtaaatttttagtgatagcgtaaccgcgtgtgcgtaatattcctgagcatcgggatttaaacctaggggataaaaccttacaccatggattcgctaccacaccgtgtaatgctttcccttgagcccctgcatcttgattcacattgaaaataagaaactgccgtttaatccaaacagttgagttgtcaagtactccctccaatttcttttttaactaaaaacaaagggagtacaaaattttggtgggtgcatcattcataattttcttgaggaaatgtggacagtccattgaaaagaagagaaaacgggtaggcagtcacaagcaggaagctgatcagaactgttgcaagagcttattcttgcacatttgcaatcttcttgtttaaatttcagtacttctatattattcaaaaatcctagtcaatcagaactctcgagcctgaaaactcaaggtagtgcagtagtggaaagacctgctgctcctgatcgatacggttaattgatcaaatttaatttgtgctactgggacctgctggattttcagcataaatttctctttcaagaaccctagttgcatcttttgaaaaccggacttttctcgtaactcatttgagaatataaatgtttgcataaaaatcacgtgaagttccttcagatttcccagttccaattggtgttaagctcatttcacttcaggaaaaaaaaggcggttaagtgactatgatgcacaatgaagatatcacatttataatcaaatacaaaattgaacattattcatatgcaaagtgggtatatttgaaggagattaatgcaaacaattggaggcatttcaaataagcaaaatgggaaaaacaattctaagtccatgaggcaatctccttctactttctactccgtataaagcaaataacaaattcactactgtataatgattgaatgtttacaaattacaagttaggcaacttacaaacaaatatcagtgtgttctcaatgttggagacttggagtgagtttgaagtgttcagaaaaaagagggggccgaatgctacatgatccacctttccgttctgtatctatataaactagatgttccagtgctaccaaaatgttttgtgctgctgggaagatccccaacataataactactcgaaaacttgttctctatcctgatgggttccactttcttaacaggccgaggacccaaagaatttagatctatgagggaaccataatcttggcatgcctccattacagtgtcgtatgattttgcaggaagctcaagcccttggttgcaagccctcatgtacatctcataggcaagcctgggtttaccatcttgtacaagagcttcaatcaacatctgatatgtaatttcatttggctcaatgttctgcactttcatcctatggaaccattcaaaagcagagccacccttattgtttctcacgcatgcgctgattatcgcattgaacgtaacaacagttggttctatctttgctgacagcataccacgaagaacagaatctaccatagcatggttccccttgccaatgtaaattgatactaagattgtatatgcatgtaggttcggcttaacgcctaccttgcacatgtgttcccaaactcggagtgcctcatcatacagctttcccttctcaagcgcactcagcagcgctccgtaagaaactacatccggtgtcaacccttgatctatcattctcttaaatatatccactgcagcagatgtttcagctgctctagaacacgcaagaaggacggcattccactctctgcttccaggcttcaagcccttctgttgcatcttatcaagcagccttacaccccacctccaaatgccccttctctttgcagcattgagtagaatattgaaatgtgacatgatgagctcatacgacaagttattcggtttggggcctttgtccaacaaatcctcataaatctcaagagctgcccaccacttcttagccttgcccatcagccaaatcagatgattgcacacagataagctgatcacgccatcaccacgctcacggatcctttggtacagctccttggcaatggtgtaatgctcctcacctgtacatgcccacacaagccgctcgtaatctctcctgtctggcttcaccccagcttcatccatgccaagaagaactttcagcacctcacctactggattctcaccacccacaagagaccgccgcatcgccatatagcagacacggacagtcagcttctcaaacttgacaaattctcggtcccaatcttcatgattcaccgccaattcacccttgttgtacatctcccttagcttggtgatgaacttgagtgccgcgaatgcatcgccagccttcttgtaggccgacatcactgtcgagtatgtcgccgcggtgggcaccaggccactgccctcgatggtgtcaaacaccctgaagacctcatcaatcttgccttgttcgacatagattgacatcagagtgttgaatgtcacaatgtttgggggaaccccctgtgcctccatgtctgcaagcacatcgtggatcctcccaaattccccactgttcttgaccgcgcccagcaggcagttgtagacgaactggttgacgccgccgccgccgccgccactcccgcttcccctcttgaggtgctccacgacggcgaacgcggcgtcgaggcgcctctccttgcccagcccccggatcaccgaggtatacacctggagcggcaggtgctcctcgccgccgccaccgtcgtccaggaagcccttcaccagggtctccacttcgtcggccgtcctggcgtcccgcagcgccgcgccgaccgcggcgacatcgacgtcaccgcctcccctcgccctcctcccgccgccgccgccggtgccaccgtcagcaccgccgaccgcgaactgcggggtcctagaacggaacgcgtcacactcggaaagccgctcgtccatttcacggaggatacgagggttgagtacaggggttcgggagtacctcggcagcgaacctgcggcggggcgacgaaggctggtggtggagcgggaggtggaggtgcaggtgcggcgggcgcggggggtggtgacggcgagcggcggcggcggcggtggcggaggcggggtggaagacggcgaggggggaagccattggggcgctggtgtggccgctggaagagaaggtgggagggggaagggaggctatctgctgctgcggtggccacaagtttccgccgacttggcgtgcgcgctcctgcagtagacgacaaacgttggcttgtgttttgtggggtcaagttggatgtgcgtcaatgttggatggctatcggcacgcaccgtacgtggtgcgtctttgagcacagtcgtaatgtggaatttttgtccattttctatgttttattttatgagagcctggtatttgctctaggaaaatgcttgtttcttgttactcatatttttagcttctattttttgagttgtgaaaaggttgatttctcaagtataaaaatttggagtagataatactagtgcctatgtattatggaggggaacataaaatacagggcatgtttactttgacgccattttcaaccttactaaattttggcattgccaaaattttagcatagttttcaaaattttggcaacttaccaaaattttggcatgatttcttatatagttacaaaaatttagcggcaaactaaatgtagccacttttttttgacaactttaccaaaatttggtaaggttgaaaatggcattaaagtgaacaggcccacaatagactcgtataaattctgacaatcaacatccaccgcaaattagatccgtgcatgtaaaatctcttaatgacaagaagagctaacttcccacttgaatcacacattgatattacaagaaacatgacaaagggatgacttctaatagtttgataagttgagggataggtttttacaagttcaaaaatagagataaggtaatcaaactatgtcaagagttaacatataagaataggcattatcctttgaaataaaatcatcataaaactattatggaatttgtgcgcttagtagagatttgccgtatatccacaattgtctgcatgcgggattttagcatacagtattttctatccacttttattatattgcatggtaggagcaatttaaatactatttagaaattttaaaaaaaaacatcactttctttcttagatttatttttactggtgtgaagacactgaaaactatgcgagtgatttctaggtcattctcctatgcactccatgatttagggggaaatatcctccaaatttgtccaaagtagtactccctccatttcacattatgacattataagtcatttttgactttttttcttagtcaatttttaaaaatttgaccaaatttatgtaaaaaaattagcaacatctaaaataccaaagttggtttttattaaaactaacatttgatatattttaataatgtatttgttttatgttgaaaatttcgctatatttttctataaacttagtcaaacttcaaaaaattgattagaaaaaaatagtcaaagcgacttataatttggagtataattttaatttaccccaaattaaaaacaataccatgcctaaaatggctacacaaacataatcactcccccctggcccccaattgcacctagtattgacaaactagcactaactcccgccatattaacgttgctgtgcctcactccaattcccctctcctatatcaaaaggagagattaatctatagttgaataaggtcggcatgaaaaaaaaatataaacaagaaataaaagtgctactttgatgaaccctcacatgtgcaaaatctttcctcagcacaatggtttaggagaattgccgaagttgataaatttactaccacatctttcctcgaagcttatattatgcatgaaacattgccagggataacatgatgtttcattcaatcttttatatattttttttgtcaattgtcatatttaatttgctgggtatttcttagagtgggtcaagaagtacccacagatgaggacacaccacctatgtgtgcaaagtacttaaaatgcccaagcaagacaaccttagacggttttattgatgatacgagtataacaatgccaaatgtagccttttgcggattaacttcacgagtaactccatttaagtaataaaaaagagagacttgaaatatcattgaccggagaaggtgtgacttgaaactaatgcatgaattgccatatctagaatatttaaagatatgctattagaccaacaatatgccagatatgcaattttgacaattttcgttcgaaattcacatgttttgagccatgtcaaaacaagatttagcgggacaattttaacaaaattggaaaagttcaaatttcaaatgcgaagtgcaaaaaaaaaatccctatgaagggtatgatgtttgtttttttttaaaaaaatagaatttagatgcgattttggacccctatctattgggaatttcctttagaaaggagaaggattcatgggcaaaaagatgatgaatcttcagcccattgagctcattttagacggaattaataatgtgtgttgatggactttacattatgttgcgataaaatgtggatgttatggacttgaaattgttgtgtacttgtgttgatgaaaatacattgtacattgatctgtcttcaaaattaggttttccaaatgatacaagggtcatgccacagtttttcattaattttttgctatttttgcccatcttccctacatattctaatagttttcaccacttcccaatcaatttctccagtattgcatcttccattcatattctacattcaagcatttgtatatgcgtttgttctatttctagtccaaaacaaattcaatgaatctcgtacaaatggaatggattccaattaattaactttgaatgcattccattctaattttagaagttatacagagttcaaattcaaattttggtttgcgaacttcctttggattttgtttgagccaagatgatgtggtaccactgttcatggtgtgataataacaatttgccatcccaccacgagtcatgccacgatttcttttatcggtatcacaacattgctagaaatatgtttttaagaatttaattaattagagttagtacgattttttttaattttctatacttaccacattttgctgttcacatgaatttcatccaatcaaaaaaaaaacacatttactatagtcacttctttccttccaattcaaatgtgagtgtaatcggagcaaaacttgaaccagagtcactaagcccgtgaccctttttttctctttacaccccacgtgccagaatcttcagtgtcaaacaacccagaaaagctcccttaatccaaatctctaaccccccacgctaaaaaaagcagggaattccccagcaggcaaggcagcctcatcactcaaccgattactatttgatttgataataataaaaaaacaaacagaaaagaagaaaagaaaatcatccgatagcctctcctctccccccttcccctctctttcgataaagcctccggagggcaccggagggcgtcgaccaccaccaccaccaacccccatccatggcgtccctcgccgccttccatccggccgcgccccgcgccggggcgcaccacccgcgccgcccaacccggccaccggcctcctccgcctccgcctccccgcacccccgcgccggagggcccgcgccgccccgcgcctcgcggtctccgcctcctccgcgggcgcgggcgccgcgtcgccctccccggccgcggggtggggccggtccgacgcggcgtcgtcgctggagcggtgcctcgccgcgtccgggtccgccgcgccggcctcggcgcccacccgcgccccgccggcgatgaagggtgggaagcagtacgggtcgttcggcgccgtcacgctcgagcggaaggtcgacctctccaagggacggaagaagatcacgcccgaggtagggtggctaatcatcatcatcatcatcatcctcatccttttcagagataggtttagggggttcgggagataagatagccttcgtgttgttctgaattggatggtagagaggtgaggatatcaatctaaattcgttttgaaactggatggatggactcgaaggccaaaatataatggataaggtttgatgacgcaatggctcatgtgtggggtttgtagaggattattcatgatatgggagcaatttcctgtttgtatctttcagcagaataatatgttcccctgaatttgcttcgaatagagtactaggccaattactatagacttaatgttatacccaaactcatgttatttctctgactgatgttgatctggtggtaggttgggattcgtataactatcgtatgtccaacttcaccgagtgcttcatttctttgctctagaaaaaaaaagtaccgcaccattttgtttttatgaactagatgaaattatcctgtcatgttgagacaagcttgatgagctgttagcttaataagtcagttctgtatgcatatgtatatttttactttgaaggcaaaatatctgttattccatcgtactgccatattaatttgtgagtttgatgactggattgcatatattcatcatatgcctcttcttttaaaatgttgcagctggcaacaggt

SEQ ID NO: 22773 - DNA, 2477 bp, Oryza sativa
atgatgattactttgatgattttgatgatggcgacgaagaagaaggtggcctttttcggagacgaattgtcattcaggaggtgaaatcctaaatatttataatcaaatacatttatttctaaatactggaaaatattgaaacctatgtgctgattatttcttcttccattgtaccagcttttcaatagagagtttgtggatgctgtgatgcaagagtggtgtaaaacgatgagtaatttgcctgctggtctccgccaagcttatgagatggtaagatttcatcttttgtttctcatggcatactttggtaccaaagactgaattgcattgactgatcatgatatatgttatctagggtttggtaagttctgcccagatggtccgatatttggcgatatttgcaaggcctactcattctaggtccttctcacgagctcttcctggatggctttccagaggtcttgttggaaggtaacagctagatgtccacacttagtttcttgtctactacattgtgtatgttttttgcatataatatttttttggcattcattcatatgccttctaaggcataattcatgttgtaacaggcataaattaccttgttgtactatgattagattgctaatattttcttggttgcacattttgctgcaaggaatatacagagagaaaagagataacctcactatttctaggtttattcatataccttttttgttgtaatgccccaaccacccaatttgtgagaagtttcgtttaccagtcaaactacgaaaataatatttttgtatataccaccggaacaatgtttcagcttgctgcttcatgccacactgcaccagctgaacatctggggaattagttaccaaggaccacatgttgaaacattgaccagagtgggaagctctttgaaacaccaaaatggaagtcttttccctctataccatatccgttctattccacagctgtgaccgtaactcatcattgtttcctccaaattccacatcttgcttgccccgtgcaacatgactgctagctatttctcaggtggcaccccttagaagaatgctggcatggatcccatgtatagacatggacttgcctcagcaccatcacctgtgcctatgtgggagagcatagagtatggtttggcacaatcagaacaggactaggggtggttgatctcatttgaagtagggtgcaccttgccatctgcacgtttctgttatccatggcattgtgatgtacttgttgatgctattccacttctagttgcacctttccatagtacaccactgaccattatacagacctcacctctgccatggcgtgcggaagataggtaacatgctgcagattttgcttagtagggaagcattgataggatgtatatctagaattcgttgtggaggtgggataaagctttcattgagtacaggcggcatgaatactattggcaacatgtgcagtgggcaaccttaacattttaactcaaccccgcatggtttatttgcctagctggtggaaagtgccatcaagcagcagttttagtcattccagtggtatatacaaaaatgtgtttagcgactgcatatgcaaaaagcagctaatttctaacagtatgtgcaaaatctgctctcatgaactaatgaatcagagtggaggtttattttagtgtttatacttttaacgtcagtcctgcagtatattgtctgttcctatgtattcctggaagtcttgtgctcatattttgtcgatagtagccacacagtttctgtcttaaatgatatggagtatcattgttcaatattttactgaacaaaaagaatggcaagcaaaaactattgataacaatagatgtaggggtaaaccttgatgtgctcttagctgtatatgctctttattttaaagaaatcttttctcatcatgtaattatttacatcattttaatttactcatgctcattgaatggccttcatagctgaaacaaaagaagcttattttaaataaaagtttggggaagggccaatataacatatttggaatatgaaagataaacaaatatgtagtagcttgggtggcactataacttatttgaagatgataggtgacacctagctctctttgcctcattttgtttgagggaggggtgttttatgctggcagtaggaatggagatttagttatttggacttaaatgcaagccagaaagcaaagttgagatgttcccctcctttattagaaaagcgtgttcatgaatactgtctcaagaagtgctttttcttcttatttggttttatgattgaaatgactgaagttggtaaccataattttggttccatctatataggatatatagatttatcacttagcttgtaggttttctgaatttaaaaccaaactgtaacatatttcttgttttggtaccttaagaagtcttaacttccaactttatatcaagcttagcttgtatt

SEQ ID NO: 22774 - DNA, 18397 bp, Oryza sativa
  unsure (1)..(18397): unsure at all n locations
gtatatggttttaggttatgcctttgaaatttagggattgttaactgtcccctgatatatgtactattcttgtgagaaatgcttgttgaatttctttatttagtgataaatcgtatgctcatgaccttccacagttgggttgtggttagagttcataattatggatatggctgtggctgcataacgactatgtgaacttttcagcagtgctttgtttgtatcttgagttgttgactaaaagttgtatataggagctaattgtgtatgctagataatttgatcttcattatgcccttgtttagatccaaactttttcttcaaacttccaacttttccatcacatcaaaacacataaacttccaacttttccgtcacatcgttccaatttcaaccaaacttccaattttggcgtgaactaaacacaccctatattataattcactttaattttaacagttgcatatttctgtaataattgctttctttaataattccatcggttcacactatttctattgcccgtgttccagtcttccaggagtgttttaattgcattttatgggggccacactcttgtcactaatcctggtgccatttgtattgcagattgacgaatattcagattggtgaatcatcgagacgcacatggcttggggaggaagctgatccacagtactcagatcggctgctgagagcatataaaagaccagtcgaggttgctggagaccaacaagattcaaggtggtttatatcgaaggatgcgattgtatctggccttggtcttctcggcatcaagcaaggtggaacagaagctgcattgtccaagccccgcaggaagagagttgtccgaaagaaagttgcctcaacctgaatttagttggatgttgtctaatgctggaacaattttgctttagttccactacgccgtattgagttctacccagcaaggcgaacgagggaaaccgtagttggcagccagccttgcagtctgtcgtggaaggcatcgaagcggtggtggtggtcataactgggagggttcagaactggaggccctttaccattttgtatcttttttcttctcgctttctgataagaattgacatcccaatttcttgtactgttgtgagccaagtagactcggcatagttgtagtcctggagattgttaaagatacagtcgttaatatgagcaaaaccattccatttttgatttaggtcatgtagttgcccgatgtattgcttgtagcattacaaagttggatgcctctttatcgtcagatccaagtggtgtatcctggaagcattatgggctttatagccgtccgtttaattgatgtttgctgtaaaatgtattactagttgtgtcaacatcatcgacgagcgaactggaaatttaggggatgtttggtcgacgattaacatggtcaaaccttacattaggggatgtttggtcgacgattaacatagtcaaaccttacattaggcaagcttaactaagaaattctgtctttgaaaattagtatggttagccataagcccatagtaatagtaactaaacaacctaagaaattgttatctgcctaaggtttatcttggcaagttgatgcatctaaccaaataatactccattttgatcaaaagtcaagagggagtacacccttaataccccacgtgttatgagctatctaaatgtctaacatagacaaatgtttaagttgtatttaactaaaatttaaaatcttaaatcaataatactattgaaatttgatatgtaaaaataacatgaacatatttgtcacataggttatttccattaatttttattaatctatgttcgaaaaagtagtgataatgtggggacaaaagaatattttaattttcttttgttgttccaatcatgtgcctcatcatataaatttgaaattgagttaaatccgatatatcccccctcaactatgtgaaaattatgatttacccctctttagctacaaaaccagacactttatataaacaaccttgcagactaggcaaatcaccctatcctagtaaagagcggttctcaatcctacacgaaacacttacggcaatatagtttataaactatcaaagaaaacgctcgaaaaagatctagtccactcacatgttagtctaaaacatttcttcaataaatttcaaacttaccagatttcatgtgttttgtgataacactccgtgcatgtggatacaatgagataaatgtaacaacttctaaaagggcctcaattaatataaagaaatgtgtgtactcaaaatctggatgcacacaaaacataggctgaataaaagcttttgcttgctccgcaaaagaagaagaacaaacctcgtcaagaaagtgttagcatgccagtaattagctttattatcttagtggaacagaataaccatgatgtcggtgacacattttctaacaaaagcttagcgatcgacattcgacaagaaggctattggccacaaaagtagtatatgtgtcagacttattcagctgttggacacaattatggctgttggtgaaagctgcagatattgtacaccacgaatcgtttacaaatctgcccaagttcactatacaatcccttcaataaaaaggtttattatataaaatggtcattaactaatatagcttaaggtataaaattgttggaattaatagatgggctaaggcccactcgaagattatttctttggaaaatcataaaagcccccctcatgggatggcgtgcatgaggagtttagtaccactttgcttatcctaagagagggggacctccttaaaagggagaatgccctcctacccacttgaagcatgtgtggtggagagaagaggggaaacacatgcgcactcgcctcgtctggcaggcgcgcgtgcaagacgtacgcgtcatgttacgcatcgaatggtccgtaaaattggctcctcacccttgcgcagatgcagcttccttttacagttttgttttgctgcgggaaatttcgggaaaaatccggtgcgtgaaaatggcgtggagtctggataagttacacgcgacttatgttgttcggttacgcggagtggagatcgtgcgggcgccctaatcaagcgacctatctctatataaaccgagccgccgcctacacgcaacacacgcaaaatcaatctagggtttgcctcctaatctgtgctgcgccgtcgctcgtagactactccatcccgctcgccggcgtgcaccggcgatcgggcgagcaggtctccaaaacctctgccttcgacgtcctgcatcgggagaaggcggtaataaggtttttgggaagcgcttcgtgtgactgctccctgttcgtccgcgacggctcgccttcctcttcgctcgcgtgctgcgcgcctttgtcgacgcctgcaaccgcaagtagttcctgccgagcaactggtctttctgccatctcggtacgtgttcgacatgttacgtatatttgatctgttcatgttttattgcttagtttacatgtgtagatctaatgatgtgttcatgctagtttacatctgcaatgtcatgatttatttatggaataaattaaatcattatgtgcttataatttcaacaaaaattagtacaactacaaaataaatataaattctaaatgttacatgtacaaataaagctaaattataaacattaaatcaacaaatctgatcatgttttctaattaatttctacccatgtatttcatatgtcaagattgtcatggtggaagaacttttgagatccatgttctacttgtgcgtaattaggaaataaagtatttaaaattgaaataagaaggcagtggtgagtaatgagtataaaagtattcagcaaggaaaaataatagaagaatagaaacctagaataaatatgaaagggcaatgaataaaggtggtgtttgaatatctgaacatgaagatggagataatgattaagtgtttcacgtaaaacgagatgataataacgtatgattaattgagttttaatcattacaaacttaaaaaaatggattaatctaatattttagaacttttatatataaagttttcgcacgaaatacactgtttagcagtttgaaaagcgtgccaacttttatccaaaacgggaccaaagtttattttttatgaacattgattttgttaaaaatatatagattggctactgaacgtactttcaattatctgcagaagccagaaccttccacaaacataagtttaaattcagaaaccaaatagtgatgatcacattttctttcatttgtacaggggttctattttacccacgatatgtagcggcagagccaccatcctggctagctcactagtccatgcacaatagaatttttgcttacacgtagttagatttgtctgagctctaaagttttcctgaatataccactacaaacatataatatatcaatacgcccgcttttaggctacttgacaaacatgcttcactcagcctatccaatttttgtactgttcttaatacactgaggtacatagtaaggaagcatgtgaaaatggttattaacctttccttataaaccatatgcacatgattatgctttaactgcacatttggttggatgtagaggctggttttacccatttccctaaaaaaaaaactgatacacgcagccaacgcatcctctaccagccataaaatgtgttcggacattcccttgttcaaactccaagcacaatggctaatttccagcatttgtttaaaaaataagtttcaggcagattattgttataacacctattagctgcaaatcattttctaaaaaataggacatcaacatgatcaaggtatcagtggattcccaattaacatgtaactgattatatttctcccacgatttacaatacatgatatcaaaatccatattaacgttgaaaccagaaatcgtaataaaaccctacctttgctccctccacccttttcttccttttctcctcctcctcttatttccttttcctttttcctcttcttctgatcttctcttttgttccacttcttttccttttctctcctcctggtactagctgttggaattaatagatgggctaaggcccattcgaagattaattctttggaaaatcacataagcccaccttatgggatggcatgcatgtggagtttagtaccaccttacttattctaggagagggggacctccttaaaagggaggatgccctcctaaccacttgaagcatgtgtggtggagagaagagggggaacacgcgctcgcctcgcctcgccgggcagggcaagcggcgcgcttgcatgacgtacgcgtcgaatggtccgcaaaattgggttggcatcccctcacccttgcgcagatgcagcctccttttgcagttttgttttgttgttggaaacattccgaaaaatccggtgcgtgaaaacggcgtggagtccggataagttacgcgcgacttttccggttcggttacgcggagtggagatcgtgcgggcgccctgatcaagcaacctatctctatataaaccgagctgccgccttcacacaacacacgtgaaatcaatctagggtttgcctcctactctgtactgcgccgtcgctcgtagactactccatcccgctcgccggcgtgcactagcgatcgggagagcaggtctccgaaacctctgccttcgatgtcctgcaccgggagaaggcggcaataaggtttttgggaagcgcttcgcgcgactgctccctgttcgtccgcgacggctcgccttcctctccgctcgcgtgcttcgcgccttcgtcgatgctcgtaaccgcgagtagttcctgccgagcaaccggtctttccgccacctcggtacgtgttcgacatgttgtgcatatttgatctgttcatgttttactacttagtttacatgtgtagatctaatgatgcgttaatattagtatacatctgtaatgtcatgatttatttatggaatatattaaattattatatgcctatattctcaacaatccaaaaaccttattataggcgctgtgattttactatggttggttttgccgatgcactgaggccagataaattcaccggtgtgcactttaagagatggcagatcagggtcactctgtggctgacagctatgaaatgcttctgggtgagtactggcaagcctatcggcgttcttaatgctgatcagcagaaagaattcgatgaggccactactctctttgtgggatgcattcttagcgtgcttagcgatcgtctggtcgaggtgtatatgcatatgaccgacgctaaggagttgtgggatgcactgaatactaaattcggtgctactgatgctagcaatgatctgtatatcatggagcagtttcatgactacaagatggctgacaaccgttctgtagtcaaacaggctcatgagatacaaaccatggctaaggaactcgaactccttaagtgtgtcttacccgataaatttgtggccgggtgcattattgcgaaactacctccatcttggagaggtttcggtactgcactcaaacacaagagacaggaatactccgttgaggggttgatagcgtctcttgatgttgaggagaaagctcgggaaaaagacgtcgcgtctaagggcgatggtgggcagtcgagtgccaatgttgtgtacaaggcccagaacaagagcaaggggaaatacaaagctcaatagaccaccaacttcaagaagcagaagaagaacaacaacaatcctaactaggatgagaggacttgctttgtgtgtgggcaacctggtcatatggctaggaagtgtccacagcgcaaggggatgaaggcacctgcagggcagacttctaagtctgctaatgtgaccattggcaacactggagatggaagcgggtatggtaatttacctactgttttttcagttaatcagtctactaattggtgggttgatactgggccaatgtacatgtttgtgctgacatctcattgttttcttcttatcaggtcacacggggttccaccatcctaatggggaatgggtcacatgcttctgttcatggtgttggcacggtagatctgaagtttacttcgggaaagatcgtgtagctgaagaacgtacagcatgtcccttctatcgacaggaatcttgttagtggctcccgtctgactagagacggatttaagttcgtttttgagtctaataaagtagtcgtgtctaaacatggatattttattggtaaaggttatgagtgcggtggcctgttccgcttttccctttctgatttctgcaataagtctgtgaaccatatttgtggcagtgtggatgatgaggctaatgtttggcactcacgtttatgtcatattaattttggcttgatgtctcggcttttcagcatgtgtttaattcctaagttttccattgtcaaaggttctaagtgccatagttatgtgcaatcgaagcaacctcgcaagcctcacaaggctaccgaggagagaaacttggcaccactagaactcctacattcagatctttgtgaaatgaatggggtgttgacgaagggttgaaaacgatatttcatgacgttgattgatgatgctactagattttgctatgtgtacttgttgaaaacgaaagatgaggctctagactattttaaaatttataaggtagaagttgaaaatcaacttgacagaaagataaaaagacttaggtctgatcgtggtggagagtttttctcaaacgagtttgacttattctgtgaggaacatgtcattatacatgagaggacgcctccctattctcccgagtctaatgggattgctgaaaggaagaaccgcacactgaccgacttggtgaatgccatgttggacaccgtgggactacctaaggcatggtgggggacgcattgttgacctcgaatcatgtgttaaatagagttcctaacagaaataaggacaaaacagcatatgagatatggattgggagaaaaccatcactttcttacttgcgcacatgggggtgcttggtgaaagtcaatgtaccaataacgaagaagcgcaaacttggacctaagactgtggactgtgtctttctaggatatgctcaccatagcattgcatatagatttttaatagttaaatctgaggtatctgacatgcatgttggtataattatggagtctcgtgatgctaccttctttgagagctttttcccaatgaaggatacacatagtagttctagccaaccctctgaaataattcccaattcaatcacaccaccagaacaaactgaacatacacatgaacatgtcactgaggaggatgacagtgaagctcctcgaaggagcaagagacaaaggacggctaagtcttttggtgatgattttactgtgtatctcatggatgacactcctaagtcaatttcagaagcatacgcatctcctgatgcagactactggaaggaggctgtccgtagtgaaatggattccattatcgctaacgggacttgggaggtgacagagcgaccctatgggtgtaaacctgtggggtgcaagtgggtgttcaagaagaagctcaggcctgacggtactattgaaaagtacaaggctcggctggttgctaagggctatactcagaaagaaggcgaagatttctttgacacttactcacctgttgctagattgaccacaattcatgtgctactttccctagcagcctcacatggtcttctcgttcatcaaatggacgttaagacagcttttcttaatggagagctggatgaggagatctatatggatcaacctgatgggtttgtagttgaaggtcaagaaggcaaagtgtgcaaattgttgaagtctttgtatggtctgaaacaagctcctaagcaatggcatgagaaatttgacaaaacattgacatctgcaggctttgcagtcaatgaggcagataaatgtgtgtactatcgccatggtgggggtgagggagttattctgtgcttgtatgttgatgacatactgatatttgggataaatcttgaggtgataaataaggttaaatcattcttgtctcaaaattttgatatgaaggatttgggagtagctgatgttattttaaacattaagctaattagaggtgagaataggattatactcttgtagtcccattatgtggagaagatcttgaatcgctttggctacattgatagtaagccttctccaacaccttatgatcctagcttgttgcttcgcaagaacaagagaattgctaggaatcaactgcaatactcccaaatcattggctcgctgatgtacctggctagtgcaactaggcctgatatctcctttgctgtgagcaagttgagccggtttacctctaatccgggagatgatcactggcatgcgcttgagcgaataatgcgctatctgaaaggtactatagaattggggcttcactattctgggtatcctgcggtactggggggatattgtgattctaatcggatctctgatgtggatgagatcaaagccactagtggatatgtcttcacactgggtggtggtgctgtttcgtggaggtcttgcaaacagaccattttgacgaggtcaaccatggaagcagaactgatggcactggatactgctactattgaggcagaatggctgcgtgatctattaatggatctgcttattgttgaaaaaccggtgccggctatccttatgaactgtgacaatcaaacggtaattgtcaaagtgaatagttctaaggataatatgaaatcgtctagacatgtgaaaagacaattgaagtctgtcaggaaattgagaaactccggagttataacgttggattacatccaaacagctagaaacctggcagatcccttcacaaagggactatcacgaaatgtgatagacaatgcatcgaaggagatgggtttgagacccatgtgagttatactatggaggtaacccagtctatgtgatcggagatcccgtgaattagaacctgggaagaacaaaccattagtaaactagaggagagtaccaatctataccctctctaagtgaagatgcatgtactcttgtgagctgcaaggcaggttggctatgccttaatgagttctgttggctttaattagcgaagatgctgttcagcagagcattcttgaaagaactcacctttgtaagcttgactgttggtcgcagtctatgaagattttaggtgaatcttctaggaagcttactaaagacctagcagtatgacttatacgctccacccgaggggtagtatatagacggtctagtaataaataagactctgagtaaaacttgcttgcacaagacttgcaattcaaggcgtagtccattgttcaagttgtgagtaagtgtagcttggagttctaggtggatgttcaaccttaatcggtctccatcgtaccgctggtatataaacagtacattggaaaaggcaaatctcagtgggattttgagatttggtgggggattgttggaattaatagatgggctaaggcccattcgaagattaattctttagaaaatcacaaaagcccacctcatggattgcatgcatgtggagtttagtaccaccttgcttattctaggagagggggacctccttaaaagggacgatgccctcctaaccacttgaagcatgtgtggtggagagaagagggggaacacatgcgcgcgctcgcctcgccttgcctcgcctggcagggcagggccggcggcacgcgtgcacgacgtacgcgttgaatggtccgcaaaattgactcctcacccttgcgcagatgtagcctccttatgctgttttgtattgctgcaggaaaattcggatttgttctgttgttggaaacattccgaaaaatccggtgcgtgaaaacagcgtggagtccggataagttacgcgcgacttatccggttcggttacgcggagtggagatcatgcgggcgccctgatcaagcgacctatctttatataaactgagccaccggcttcacgcaacacacgtgaaatcaatctagggtttgcctccctactctgtactgcgccgtcgctcatagactactccatcccgctcgccggcgtgcaccggcgatcgggagagcaggtctccggaacctttgccttcgacgtgctgcaccgggagaaggcggcaataaggtttttgggaagcgcttcacgcgactgcttcctattcgtccgcgacggctcgttttcctctccgcacgtgtgcttcgcgccttcgtcgacgctcgcaaccgcgagtagttcctgccgagcaaccggtctttccgccacctcggtacgtgttcgacatgttgcgcatatttgatctattcatgttttactgcttagtttacatgtgtagatctaatgatgcgttaatgttagtatacatctgtaattacatgatttatttatggaatatattaaatcattatatgcctatgttctcaacactagctgcacatgctcctccctattgccctcctcgccccttctttcttcttatgcttgggcatgcaatttttatccgctattaggtatgcattgttccacatatatttgactagaagtgcatctcctctcctgtactagtttgtgcaggatagaaaaatgtagcgcacatttggttctctaccttaccaatttataggtagtaccaacatctagacaaattttggcactatcaatcttttggtaggacaatgttaactaatattttcgaaaatagttcaaatcgtttggtaggataatgttagctaaatttttatagctcaactagttagctaaacattatttttggaaataggcctttgaatccaagtgagaaagtttcaccataaagaatctaactagttgagctatgctcattacgcataagctaatattcccaacagtaaaaataaaatcataagaatcaagggtttgagatttattttgtactcgtaggaaagacgaaagagaaagagaaaaagaaaaaggaaaatatgaaagaaaaaaacattagaggaaaatggaaaaggaggaaaaggaaaaggaaaagggaaaagagaaaacaagaagaaacaagaaaaacgatattaatagaaacaaaatttgtgggaaatcgtcagaaaaaatgataacaaagttttgaataatcaattagtcaaactaaaactattgttttgagatttttgttaagctagaagtaaatgaaacgaacaatatttttataatgttgcaaagctgaaacttagaaaaccaggatacgatggacaatacctttagaaaaaaacaaaccataatatgatggacggtacctttagaaaaaaaatatggtatcgactgtggccctaaaggatgtagggtaaaagtattaatacatactttactcccttcatcccaaaatgtactagattggacacaatctgacagtccatattctatgtttagacggagggagtaacacttttttgcactcaagtagtatgagtacttccagtggtgaactagaatgaaaatgaccaggggtccttttagtattgttttctacacacagggtaatatatatacaatacgatactacctatatcttaaaatatataaggaattatacctatatatctggacaaaaaaaatttaagacatagttagtatatagtaataacaatatatagtatttaacttaagagtcataaaggtgcagtaacttagcgccttagcttatgccttagcttattgaaatagcgatcgatcttacataaatgcacaagaaaggggaaacagattctaatcccttgagtgatgtcccttgacacctttttcttccaaattcaatgaaaggttatttttttaaaaaaaatattaataatatatagttagcaacgcctatcactccaaaaaacaagtttaaattcgacctacacattaaaaaaagataatctagatagaatagtaccactattatttatatggtgaatttatctttttaatatattctgagttgtgtttgtactaactttgtgaggtggtatatatatgttgtacgaatgtcgccaagtattttagaatattttaaacaaacgggaaattttcaccacaagttagtccgttaccccactatgcaattaggttcatccagattttgctttgttgtctatttgtcctctcatccaccagcgagtaagtcggtggggatgtgaaacaaaggccctgtttgtttcagtttaagattgttgtaatccagattattaaatcagattactctaaagttgaattataataagctacgagttatttatttctcaagattattggaggcatttaagggtagtgggtctttagccactcaataatctggaaaaagctcctccagaggagattattagattatactaatctggcttatagattatacttcctccgtttcatattataagactttctagcattgtccatattcatatagatgttaatgaatctagacatatatacgtatccagattcattaacatctatacgaatgtgagcaatactagaaagtcttataatatggaaaggagggagtaataatcaatcataataatctacttgtttgtttcaacttactcctaataatccagattataataatcctaaattgaatcaaacagggccttagagtatccatggatgctggatgggttggagaagaaggctttatcaaatttaattgcaattttcttttatggtatggtcagatataagatgccctaggcgactttgttaaaaaaagaaggtcagttaccccactaaaaaatatgacaagattacaaatgacagtgcagagactaatgaactttggaatatgcttttttcctctttgccgtggcccaaaagagactgagagccaatgtttttattctggggcattttactatttgccactctttgatgtggcatttaactctttgccactcatatatttatgacatgtgcacgtcaatgtatctatgacatatgggttcagctagaaaattattaaacaccatatctaaagtagcaaatagttaaatatctacttcctctatcccaaaatataagcatatttagctatgatttatagccaaaagttattacattttgagacggaggtagtatttatcttttcttgagaaaaggtattacatggagctttgaacgaaaccataacaggatgacaggcccaaatgttggcagacccttgtttgagcaactatataagaagtctgcccctcggattgcacttgaatccatccaaacaccccaccttaattcacgtcatccaacattggaaatggcgaaccgagaggagccttattctaccactggcggcactgctgcaaaagctcctccggtggcgatggacgccaaactgctgatggcggaatgccctgaagatcgcaaacttctcaaggagcttgtgcacaaggaagacgcttcgaagatgatggtggttttggcgtcaaccaccaaccagcctgctgcagagaagcctgcggcagcccgtgcagtaatgaatccgctgctgctagcagcagcatcctttggtgcttgcgaggttttctactttcttttctgcagagaagacgcacgagagccgctgccgacaatgacggctcgtgcatttcacgccatgcttgctggggacgcctccggcgccgatgggcggtggccgtcgacccatcagcaagctctcgacgaagtagaagaaggcggcgccggtgccgccgttgccgttggtcatcagtccactcgacggctaccaccacctgacgcgccgctcctggagggcatcaccgttgaaggtgacaccgcgctgcacgtggtggccacccatggtaacgccgccaacttcttggagtgcgctgaaatcatctgcaacagagccagacgcctactgttggcgactaacgacaagggtgacacggccctgcattgcgctgccagggccaggaggttggagatggcctctcgtctcattgctctagccaaagctagggaagaccacgaagtcgaacgtggccaagcagcatcgtttggcaaggtactcctgagaactgaaaatgagcgcaatgaaacagccttgcatgatgcagttcgcgccggagatggtgacatggtccggcggctaatggacgaggacccagatttggctttgtttccagtacagggcacttcacccttgtacctggctatctctctacggaatggcactattgctgagatactacatgagaagagcaatgggaatatatcctactccggaccacatggacaaaatgcactacatgctgctgttcttcttcgacatacaggtatactcgcttcacaattaattccatgttccttttggaccttatactttctagaaaaagtgttttcatctctcgagagaatatctccacacatgaaagcaaaatttaactcatacaagttgtaacaaaaataacaaatataactacaagtgtacgataactattttcgatttaatttgttctttttgttgtaacatgcagaaatttaattcggtcttgaatatttgtggagtgatatatttcatattaatctatgtagttattttttaattaattttttaataactatttagatgacatgcaagcaacgaggggacatcccctcaagggataaaaatccacatcattactttctcagggatgaaaatccacatcattactttctcgctcattggttgttaatttctctgcaaatgaagttgtgtgtcgcttgctgtccccatatatatatttccacaacccttgaaaaaaagctctcttgtgtctatgttttttttttttagtttcctaacaagtttttcctgtcgtaattctacagaagttgccaacttcaaagcagaaattagtttttcttttacctaatcttgtgattacttagtgtctaaaatgttcttccatttacagcggtgttagaactactattgaaatggaacagccaccttacaaaacaaggagacgaaaatgggagtacacctgttcattttgccgcatcttttcctctatggcatcgaaaattccattggagacatccttggattattcgtgttccccatagtctctcgatgttgttaaacactggtgaggtagatccattctatcaatccgacaagaatggaatgtttcccgtacacgtcgctgctgccgtgggggcagaacttaccgtcgcttttttgctcgacaagttcccaacagcgcgggtttgcgtgatgccaagggaaggcattcctctatgtcgcagttgagaaacagagtttagctgttgttaggttcgcttgccggactacgtcgttacagtggattttgaacatgcaagacaaggatggcaacactgcactgcaccttgctatccaggccaatcaccatcgattgttttgtgctcttttagggaatcctcaagtcaatttagatttaacaaatcatagtgggcatactcctctcgatttgtccagaaggatgcttcccagagggatgaaatatacggcggtacgtacgtatagcatgcatgaaatttcctttattatttcaaacctttgccattcgaagcaaatttacaaatgataacacatggtaatatacaaactcaacattcctctttttcatatagaacactgaggagctcatatatttgacactcaaacaagttggctctgaacactatcacgatcgccgggatcacatcgaagaaatctatagccgtcgtgtggtatcaaaagaggatctggccgaagaattagacaagatgcaagaatcgacacaaacactaggcattggttcggttctaattgtgactgtgacgtttggtgcaatgtttgctcttcctggaggatatagagctgatgatcacccttatggaggcacaccaacattttctgggaggtatgcttttcatgcattcatgatggctaatacgttagcattcatttgctcgtcaatagctaccatcggtctcatgtactcaggatcttctatggttaacttgcggacaaggcaatataactttgggataaccgcatttctcatgaccaattcagtcacaagcttgacaattgcctttgcacttgttgcttatatggtgctagctcccgttgatcataaaactgcagttgtaatctgtgtcttgagtcctcttgttgtaatatatatcaacatcgattcttggataaaattggctgttattgaacaatcgctaggcagtagaatggggttacgttcgacaccgccaagggtcatacggatgatgctatgtaatcttttatttcaattttggccattcatagtcatctttagttttagttggattgtatataaaaggacagccacacacctttgatgtgaccaagcatcaaaatgtttatagggataggatttgcgtacgtgcattcataggggtgagtgtgtgtgttgtgagtgtctgtgttatactgtgtaattctgaaaataggtggtagtcccacaagaaatggagtcatcattgttttcttttatggcgacaatgttttcactcaaccatactgaagatccgaatacagtcatcaaactatgtccattcacaaatattttttaattatggcgtatgttgcatttgttgaagataaaacctacgtaaactagtggatccatttgtacattttgattactttcaaccttgaagtcttaattattattgcccacatatatctctattattataaaaattaaatatgtttttgccggtattttggtacgtcatccgtatatgagtcggtttttaagttcgtttgcttttagaaatacatatccgtatttgagttggtttttaatatgtttcacttttggtaatacaaaaggaaccatataagaaatctgtttaaaaaaactcgcatgctaacttgacacgatcggattcctagttgcagctcatgattttctaaaaaaaaatatatatatatccaagcgaactcacggagtgaatttcatcttaattaaaccatataacaataataagattaaaatagacttcacccgttacaatgcacgggtattttttcatatatatatatatatatatatatgtatatatatatatgtatatatatatatatgtatatgtatatgtatatatgtacacacacacatatatatatatatatatatatatgtatatgtatatatgtgtgtgtatgtatatgtatatgtatgtatatatatatgtatatatatatatacacacatatatatatgtatatatacgtatacatatctatatgtatatgtatatatatgtatatgtatagctgnatatatatatatatacacacatatatatatgt

SEQ ID NO: 22775 - DNA, 2975 bp, Oryza sativa
agaggacactaaacacagttctagatattgtcctccaggcatacactgcaaaatgctaactggataatccaaagcagcacaacaatatttaggtctcatcctgtaataccaaagttttggcttggtgataaggcaagcaactgtgcccaatatggaatctactttcgaaatttaagtgtgctaattacgaagtgtcttcccatacttctgctattactagacagttgtgcatgaaacctaacatcatagtttgaggtggaagatcatgtctaggaggtatcgtgtttgtagagatactgtgttgggcatggaaaatagctccgaaacaccactaacacctgtttgacgtatggtagtgctttcatgttcagatacagttaattttattgttgcaaattttaaggtggctttgtccctcttcgatgcaaggagttgaagagagatttttataagagaaagtaagaatcaaagagatgatacttaaaaaacaagcagtcaagcagtcatgtgtcgagccaaagtcatcgtattggttctgcttgattcagaatggttacaatgatctttttgaaactacggttctgtggtgcaccaatgaatgattacagttctgtaaaacattattattgaatttatttctaatatttcgtttatattccacatcaatgtcaatctttttggtaacgtgtacctcaacttactacctgtcaacattcatattagggatctataatctgttctgaagctaaaccatcaatattttgttgtataggcagcttgaacaaaatactcaaaaacaaactgtacgatactgaggtaaaaatattcagcatagatggaagccaggcattacattatcatcaataccatcatgaaggtaatggtagtactcataggaaccatcaatcaatgatataattcctccagatactgcagtaaataagaaatgaaaactcattatctccctaaaaaatatccataggatttctaattatgtttaaattaaaatatagagaaattacgaaccaccgctagatggaatctctctgtggacatcccgaagcaatgatgaacctgaactcgatggtggatcacaatgaaaaaaagaaaattattttcaaaatagaagtgtcaagaaacggaaatcaataagcagccattagacagcaccaaattaatttcattaaatccaacattcagcattattgtcatattatacttttttgaagttggaaatgttgatatgtttttctataaacttggtcacacttgaagtcgtttaacttagggcaaaacaaaaacatcgtacattctaaaatggagggagtataacattctaacaacatatacatatcaccataccactttttgatgctttcttatctgtccctcctatggaaaaatttagtgcatttgaaattcgtaataaaggacgatctaagggaagttgtagccgtaagtgcagatttcttctcagttcacctgcaaattaggtaaagttcatgaaatagattatctcgatgcacgctatgctcactggaagtaattacgaattctcaaaaaaatattagcatataaagaaaattgcatactttgcttttcctcaatctccccatatcttgtgtcatatatagttgttactgggattaacagtccaggaggaacaaaatggtacggagaaagctgaaaacaagggcaataaccatttgataaaaaaatattcagaaaaaaacactttgcacctgcaatcaatttaatataaaataccagcgaaatcatattaaatgatgcaaataaattaaaacaaaagatacatgcacggcaacatcctatataccatgcaacctttatcttttacttgttcatttggtattaaaagtccatgttccaaaaaaaccttgataataaaaggaatacatgtgattacataatgtcacacttgtggcatgccttgtacgctttgttcatgacaagtcaaaatcactagatgacgcgaatgttatgataacttccagattgattgtgtttgcagtcattacatagctgacacgagatataagatgtcaaacattcagaacacgactaccatcttttagcacctgagaattatattcaaactagaaacaaattaaacacggcctagaattttacaagttatccttgctacaactcttgttaggtgaattggtggagtcaaaggaacaatgctgctgctgctgcaccatctttaagcattcacactactgctagagcatctccaatgcagtcaacatggttcatcaaaagaagcatatgcgtaacactgtgcacccatctaagagctcaatcttactaaggaagcacaggtggttattccctaatgtccgcacaaactcacaagagtgacttcatgcaggcacggctaaattaaatatgctcctagaatcacatgaagccatgttttgttttgtacactgcacttagattgtaacatgtaaactagcaaatagttgtgcaaaaatgtaatcacgtgcactgcatggaaaaaatatgtgcaattttgtaatatcgctttatttcttttgcacagtgcatgtgatcatattagtgcaaaaaaaaaatcatgtgcacatattctacatttatgatctattttagaacatcctgaaatgcaccaaaaaatttggaagagctgggtgcccttgcggtgaaaagttcttgtggttcgcattccataactgctgctggacagctaattgccttgccaagcgtgggctaacttattatgtacctggggttgttgagttgtgagctctgatacaatagccttcttcataatgctcagctgatcagctaatcctggaataacaagctcagacacagcagcagctacagggaaatctactgaagtgtagcaaagtatatctagcttcaagttgattgctctcaggctagccaatgcaggtgctggcaaaaagaacaagagcatatttact

SEQ ID NO: 22776 - DNA, 5284 bp, Oryza sativa
cctgcgccccagaaaggtgctcacagaatggtacaagaagtctgcatcatcctactatagaatgcaccaaatatgatatatattactaggcattttcaaaacaatataacttcatgtacttcacatttctatacatgtcagtcaggcaatttgaaacataaactttcattgccagatattgaagctaggtatacttaaaatttgatgccttcatgaacaggcgaaaggtaagtgaaccaagctgacaatgtccatactccacattcctcattcgagctccaggaaacatattctcacaagctcaccaagaaataaatttgtatcaaattggaactaacaaccaatcacaacatggaagtattaagttaagtatcaacttatatggcaggtttagttgagtctaagcttacctctcttgtcaatgagaggctcctctttgctgggaagaattttgaacaagatacaatatttgcatcatactcctctgtgcttccatttcgagataaatggggaacagaattcagatcattgccatgcaagataatagaataatgtgattcaccaggagttgttcgtgggccttcgattaggtaagaaacatgaggatctctgagcttagaagctgttgattcaatgagtgaataaaaccttgcttcaatgcctgcaaaaagtgacacaatacataataaacaatttggaaacatttgaataaacatttgccagaatcaaaaccatacaggtgaagtaggcacatctccaactttgacaacacatgaagcaatttggtccttgcattgctaatagtttacttaggtccttctattcatatcatccaatggaagtattccatctgttttattaaatgtaatgtcttcaagtaaactatcatggtgatatttgtgttgtacaaaccatgtgaatattgatcataacaaatacctgcctactgaaatttacccttaacacttcacaatccccacatcccctactccctattaaaaaaaccattcatgcagcttattataccattttgctatgtgaaagataatcataccaaacacaatttgcttgatgacatcaagatatttacagcatgatcgtgctgtacctaagtcttaagatatttacaacatgatcgtgcattcgtgctacatatttcaaataatgcatgcaaagtaagaaccatcatgcttgcactgcaactatcaaaaaggatttcagtctctgaagctcaaggagaggatcgaacaattaccagacgtatcatccgaaggaacatagagcgggagcttcagcagcagctcgcagcggagaaggcatcccttctcccacagcaacctcccgggatcatcctcccacacaacctccgtcacttccaccgcctccaccccgtccccctcagaaacaacaaaccgaatctccccggtgcccaattccacgcagcccccgaccatgccatggctcgccctctccccgtacagcctctccctcaccgcccgggccagctccagcgccccgccggcatccgcgctcccgacgtgcaccgcccccacgatgtcgaaccccctgacgagcaatcccctgatctcctctgcacggaaccacgagattgtcaagcgagagagcgcactggatagatagaggaaggtggcgagtgaggcgagagggttttacctgcttctcgctggagatcgggggaggaggcgccgtcggggagggagcggagggcggcggcgacggtgagaggggggaggaagcgcggggagccgaggagccagcggagggaaggggtgggtggggagacgagggacttcttcgggcagaggaggcggaggagggttggacggcggcgtgatccgccggcggtggcttccatcggcggcacagtcaatacgctgcctcacttcccaactcccaaggctcccaccgtttgctcgccagttgcgtttcggcttgggctttttttggcctacgggcggcacagctatgggcttcttgggactgtctatccatttgttgaatgatcccaaattttttatacccttagatttatatccaacggactataaaagaatggggatatttcgtttctatccttactttgatgtctaatattgattttacccctactttttagggttttcgtttttaccctcacttttttgaactgaatgcttgttttgcccctactttggatggtgaagttaacggtgttaagtaattgataaaatgatatttataccctcttatgtatgtacattaaatatgttttttacccattttatacatgtagatttggaactttatttttgggagtatatttaaaattagatgacacacattgactaatataacaatttggacaaattatgaatttgatggaattttgacaaaatttcagcattttgatagaacttaaacaaaattttgacaacattttgtaaaatgtaattatctgttccctttaaatattagtcaatgtgcttcatttaattttaaatatactcaaaaaataaagttctaaagctatatgcataaaatggggacaaaaacacaattaatgaacatatatgagagggtataaatattattttgtcaattacttaacaccgttaacttcactatccaaagtaggggcaaaacaagcgttcagtttaaaaaagtgagggtaaaaataaaaaccctaaaaagtaggggtaaaatcaatattagatatcaaagtaggggcagaaacaaaattatccctaaaagaatatagagtaaatttcacaaaactacatgtttcatggttcaagttgcagaaaagcacacacattctgacacttgtcacttaagtacatatattttggtagtttagtttcacaaaaccacactatcgatggatggattcacccctgagatgacgtggttattccatctaggatgaggacgtggcatcatattaatttcatgcgatggctggttataggatgccatatcctcgtcctaggtgaaacagtcacatcatcttgcgggtgaatctatacatcgatagtgtagttttgtgaaactacacaaccaaaatatatgtactcaagtgccaagtgtcaaagtgtgtgtggttttctgcaacttgaaccacaaaacgtgtagttttgtgaaatttactcaagaatataactaatacatatttacttacacattatttttatcaaaattacagtgcacttacatgtcatatcaactgaatttacaaatataattttagttatatagtactgtaattttatattttaaagaaaataacaaatatatatttaattccacaatatttttatcaaaattagaatttgcaaatgtaatttcagttatataggactataattttatattttaaagaaaataacaaatatatatttagttacacaatattttaatcaaaattaaagagcacttacatgtcatatcaactgaatttacaaatgtaattttagttatataggactgtaattttatattttaaagaaaataacaaatatatattgtatttacttacacattatttttatcaaaattacagtgcaattacatatcatatcaactgaaattacaaatataattttagttatataggactataactttatatttcacgacgatgacaacgagaggggtggcgtcactcgctcgctaaacagcgttggtcgtactgccggtggccagctcgatcagaggccaccttggcaccgtgcttctccatcatcgcgcgcgcgggctagctaggtgacataggtcgacgtgccagccgaccggcgggctgcatgcaacgtttgaccttgcaaattgccactcgcatcgcaagacccaaaaaaagtgtcaaatgccagcaaaaaaatcacacgagagatggatagcaaaaatcgttcatggtttagctcttggacatgaaaaaaatgaatcttccagagaagatgctactcactcaatttcaggttacaaatagttttgactttgttcaaaattaaactgttacaagtttaactaagtttataaacaaatatagtaacattcacaatactaaattagtttcatcaaatcaataattgaatatatttttataataaatttatcttggttcgaaaatattactactgttttctacaaacttggtcaaacttaaagtagtttgactttgacaaaagtcaaaacgacttataacctgaaacggagggaaaatattcattgcagttgagtaagagaaaaaaattaaacaacgtgaaatgtcaaaaatacccttaggcccacttatcatatctttcttcttcctcccctttgtcctcacaaacctctttgagatatgatgactacacaaggtcggtgcatcgactcctaaatgacaagagctcttcaacaagtataggctataagcccctctttgtttaggtttatatgtcataagtctaaagctaaacgaacaagcagcttttgatttgtttttttaaaccataagccactttaacactattaagacaaaagctatgtttgaagattttttatttcttatgtgagatagaggtatggttccaacaccaaacttaagatattaaatctactaacttataaatcattataagccaataagctaaccctaacactactggagtctccaagtctggagagggagaagctccctagtgccaaaaaggcaaaaacccatggaagcatcacctaattcgtctatggagccatgtgagatgagcatcacccatggaagcacatgagaaatacggaaaaaatacggaaagaactctgtctggccattgatttccgctaatcattctggaaagagaattaaaggatgcattgcaaatccatgcagatctaagtattatgcaactcatgtgttacatgtgtagtccataggggttgcataatattctacaagagtgaagacataagatatgtggaggggatcattctcattcattcttttatcggtacaatagtgagcctcctctcctttatataggaaaaagtacaccataggtccctcaacttgtcttcgagttacaaaatcatccttgaaccacaaaaccggatatgacatatcccctatgtcgaggagtgaccctctctagcgggaggacgtgagacccccctttgtgagttcggccaaggaattgggcgcgatgatcgggagcgcgatgtttacttggcgaatcggattcgcctagggttaggctagcgaggtgaatagtgatcgagacagagacaaggtattatccaggttcgggccgctgtggag

SEQ ID NO: 22777 - DNA, 3687 bp, Oryza sativa
ttggagacttcgtgggctcacgccgtggggcgcaccgacctgcatgtcgatcccctgctgctgatgagataggacatacctgcccccacgccgcctgacacaaggtaggacgtgggtgcgctgctgcctgtcccgtccgtctgtcaccggtcgcagaccggtcaaggttgcctggcgcacgtctctcattgggcggcacatgaccagccacatcgcattaaatgcaatagggggcggttggggtgccgcccatgaatacgcctggcagcgcccgcgtctccgcccgctcaatccctcacgtggcggccgagcgagggcctcggggtgacgccgcctctcgggcccgaggggtacgacgagatcccccgagcctcctggggagacatgggcaccccttggctattcactatccgtgcatccgatcccccgatgggggatccgggccacgcggccacgtggtagaagggaaaggaccccttcccctcagcgtaggtatccccgggcctatattaccgacaccctaacttacaaaaccagtgcaaactaggtccctcagcaattttaactccggttttatcctatgtggcagctgactcagcgtgggacctatgtgggccccacgcatcagcctcttcttccctcccctctccacctctcttcctctctcctcccttctccaatctccacgggcggcgcgtgggggagcagctgcactggcggcagccagcggggcaggagctgggcggcggtgcacgagctccttgccggacgaacgctagaccggctccgccgcgcccgccgcgaggaggtggcgcgccttgtcggctcgctcagccggagtgccgccgatggcgtttacgcaaatgacctgagaatttgagatcattgccatccacatgttctccttcaagccctatcaacaagattgacacgattaagctctggatcgagatatgatcgatcgcgcagcaccgacgaactagccgctgatcatcgagtcaaatgctcacatctcataagctccaatccacgtggacgaatcaatccattaaacttatatacgcatgcacatcacgcatgaacaccacaagaggacatgaagcttcacctgcaaatctctctataaatacatggcaaaaccatcaacctagctagcacataacaacttacacatgggcctcatgcacgcactcctccccttagcagcagcagcattgctgctccttgccgcgccgccgccggcgacggccgacgaccaggggcggatcccatgtgattcatggttattcacgtgaatgcccatagaattttaccaaaaaaatatatatatatataggtatgttatgcatatatacgtaaaaagttagaggaaagtgcagcatgtatagcccaaatgaaaaaaagcccacttattagcagcagcccgtaaattcctccccaccttgccccagcgaataagcccactgctactggcccaaaaagagactaaaccctagtcccaagtccacactccacccaaatcctaatccatgcctccactccccgccgacgggcgacggcgcattgagggtcggcgctcggcagttcggcgacggcgcgtcgccactggcctaatctccctggttctgggctccctgtcccggtgtccccagtctagttctcactcctcccaatccacgcctccactccgcaacgacgggcgacgtcgcgacggccgatggcacatcgagggctcagcgctcggcagcttagcgcgtcaccaccggcctcatctccctgactccctgtccctgattcgacgcagcatcgccatcaccgaagcccagctgccgaggccttccgctgccgccgccgcgccgccgagcggccgaggcgtcgtccggtcgtcgcctcacacctgaggcctcgacggcgactgccgacgctgagcagctgagggatcaagatattggtaatgcaattgaactaattaatacaaagatgcaattgcagctattgcgtgaggatgatgaagatgaatggtaatcttttctgaaagatatgccacttctttttgtgtgaagcatggcatcaaagttgttgatatggatggcttctacaagccggttggaagatctaaaagattattcaaaaaggtcaagaatttccctcgcttccatgttgacatgttttatgtttataagcatcattgatagacaacttcgagagtttaatgatagatttgatgaggtaaacacaaagttgcttctttgcatggcgtccttcaatcctattgattcatttgctgcttatgacaaggaaaacttggttaagcttgcacaattttatccaaaggatttcacaaaattagatacaaaggatttgcacaatttatttcatttgtgatgtaattcattcaaaccatttataatttagatatctttacttttgtgctactgtttgtacctttaaacatgtcattgccactatgttgttatgctattatttatactttaaattttgccagtccaattttttgagttctgtaagattttttttcaactttgaataccctttgctgaaatcctggctccgccactgccgacgacccgggccttgccgtctactagggccgccacaaggaagaaggctccctgagagaggcctgcgacaccggccactacaccaccgtcatcatcaccttctacaacgtcttccgctacggccgatactcgtcgacatctccggccacctgctcaccgccgttggcgctgacatcaagcactgccagtccaggggcatcaccgtgctcctctccatcggcagccagggcggcggctactccctccacatcaacgcctccgttgccgacatcgccgacaacctctggaacgcctacctcagcagccaccgcgctggcgtgcaccgccccttcggcaacgacgcggcggtggacggcatcgacttcttcatcgatcagggcggcgccgaccactacgacaacctcacccagctgctcaatggctacaaacagtattacatcgatagggcttgaaaacgccgatgtagtcctgcaggttgaacgtgctggggtgagctccgccgtctcggcgaccacgctctgcatctcctccgtgtcgttgtcatcgccggtccaccgccggcccatcagcatgcgagagacaatgtcgctggtgaggcccatcagctcctcccccgccgaccgtcgctcgctcgccgcctgcgcccagcccgcacaccgctccgccacctgtcacccgcgcgcggctcctccccacgccacctgtgcccgccgaccgccgtccgtgcagctactcccccgcgcgccgcccgtggatatgggagaagagaggagagaggaagagaggtggagatgggagggaagaagaggctgacgcatggggcccacgtgggtcccacgctgagtcagctgccacataagacagaaccggagtcaaaaccgccgagggatctagtttgcactggttttgtaagttaggggatgcgtcattgtcacgccctgaagttcccctcccttgctttaaaatttgtaaaataaattgccggaagaaattgtttaattaacctagagctaaatccctaattaataaatgcaaataataatcagaatcggcatgtggaatttttcttggttccccatgctctaatatattaacatgagtttta

SEQ ID NO: 22778 - DNA, 3094 bp, Oryza sativa
tttttccttttgtcgccgcactctcccgagcctctattgccgccgcgccgctctctcctagcgccgagccgcgccgccgcccttcgcgccgtgcgccgcagccttccgcgctgtccgccgccacctcccatgccgccggtcaccgccagtgacagtgagcgccgccgccgctagccatggctggccggccggcttggagccgagccgcgcccagcagccacctctctctccttgagcctctgaccggtgggacccgcatgccggcccctctccttccccttgtgccgctgacatgcgatgcccgcttgccggcgcccaccccttgctgatgtcatccacctaggtttattgcgcaataaatcaattaaggccttttctttttctagtaaaaatagagataatcttctaaaaatcatatctaattcatccgagctctgtttaagtccattcaagtctcagtaaattcaaaaaaaatgcaaagaatccattaaaaatggttttgtttcttatttcagtagtcttatatcatgttttgcttgtgtgctttgtttgtcgcgtagatttcggccgtttcgtcgatccgcgggctctcgaaggcgttgctgaggtctcatcagcgcgagaacaaggcaagtcatgcattacaattgatcatattgtactcaatttacaaatatgtcgcattttctattaaatgttgcattattttacaatatcatgtgggatgggtcctattctcagccatatgttgttcacctcatgccattgataacttcggtattaaaatgactagatgttggcttaggagatgcttagccatgcttagttcaactagcacacaatggaggaaatacattaatgcatagacttcaggttctagtattgatgttggattagtgccaccgcaatggtgttaattaattaaaatacactacatggtgggttgtgggtgcatggtttttctagtcgtgcccatggcgattaaggaccatttcgcgggatgccctggaagaacttatcttatttaccacaagccagcgtgggcaatggctgggattgtagtgtagtgtagctttcctctagccgatgtacccaggcaagggtgggtgtgatggagttgggtcggccggggtgttcggttgatcggctttcggattcaccatggtacgagaggggggccgcccgttgcctgctggggacgggggtgaaccctgaggtgtggtgcgatctgttagagggggttatgcgaagggtcctgtcacgggctctttccggtatgtcgtggtgcatgtcggagcacgaaaacgtgttgtggggccgtgtcttgtgggttataagttcatgtgccttaatttggttttggtgattaatgacaaatctagttatatgagactaacatttttatgagcttttctttgactagtctcatttggatatgaaagtaaaaatgattagaggtatgtattaaacttcacatattctaacttggtctctcttgtggatccaaaatatagtgtgagctccctcattgatcttgattgattatgtgcatatgtgttcctttatatccatatgtatgcacatcttgagggggagcttattctatattttgtttattataagatttctatcttgatttgaaatcatctttcatctcatctctctatattgtttatatcggattattatctatcacaaaagagtgaaaagattgaaagatcttggattaaacaatttgtgtaattgttgctttggtgatagatgataaaccgatgtttatgggattaacctctcttttacataagttttcaacaaggttatttcccgataatgagatgtggtagatatgcattctttggtgatggaccttaatcatgacaaggatgaaattcatggagataaagtgatatgtatcacttcttatctcctactttttgataggttcatatatatgatttccatgttattgttatataagtgtgggactaatgtttacttgagccttatcttatttagtctcctttacattgagaatatggagatcatgaaggtatgtgtttttttggtttatctttgtcattgctacatgccttctccatgtgtataggataaacccattagttcttcataacttatgcatacacttgcctctcttgtatatttatttgtatgcatatttttagggggagcaaatcctatacatttattgtgcatgttttagatccacgttgttcacctattatttatattggatctttgcatttgagcttgcatacaagtatatgacacttgcgatgttaatgaatactcaacaaacatatccacatctttcatatgcaaccggttggtcaccaagtggaggatgacaaccgatttgttggtactaatgttcttctttgagatgtgcaaaggaataggtctaattgtgatgaagctaatggatgacaccatgggttgatggtcaccaagccaagggcatcgccgtgtcgacaagaatgaaatcaagcttgtgatgagaagaaagtcttgacaaatgatggtaaataccttggtataaacatggttgaatcaaatggtcacaagtgttgatctcgactcaagcttgaccccaagatggatggcgcaaggcaaaggtataatgtagctaagaatgttttcttagtcttttcccggtcttggtgtttggtgtagaccagatctgctagataggcgccgtactatcaagaggggtctatgaagcgagcttgtggatgatcttgtgccatattagttcatatgcatgtaggtgcatttggtgggcttgtctagccaagtgtgatgagttttctcaagtcctaaacaagagagaagtgggcatgtccaataggagtgaatgacattttgtggatatgtacggtggatatcctttggagtgtgagccctttatccttgacttaagttgtgtttcttggatagtttttcatgggttggatggccctttgaataagctttccatagagtccaagaacgccaaattccgagacccgagtcaagagatatcgctgttttaccaacggtcggttgagcagaaaagtgacctgcggtctgaccgtgg

SEQ ID NO: 22779 - DNA, 1699 bp, Oryza sativa
tcctagacggcttgtggaggagttgcccggtgacctctccgagaagattgtggaggaggccggcgccgtttgtgagtggtttggagttcaccaccttcggagtgaaggaagaactaccctagtgatcgaggcttgggtagtcctctccgtgggccggctcccatcttgcccaccccttgacgaagggggcgtgcggtggcttcatggttgagcggtggagttaggctcgcctcaacggggattaggaaaccgatgagtttccgaacctcggtaaaaaattccttgtctcttgtctcatttatttgttgcatttacatttgtgctatttacattcatagagacatatttgagcctatatcacttaggtttgtaaaacttaacttagttgcttagttaaccttacacctcaccttgcctagcaacttaggttagttttgtttaagtgccattaagttttaaaactgcctattcacccccctctagtcggcctccttatcctacatgggtacagttgtacacatctgatcagagtaaaactattcgatagccgtgcccacagttatgggtggtcgaccagatttaccgtaattagtctcatccctagtttagcttaatgaactggtgtagtttaggtggttggttgggcctgttgcaacgtggtgtagcgttggacagtgattggttaatattgcttaatctactatagctgttttaccgctttcaactactgcttttaaatgctagctttatgcaaatgaacctttagcctcctttggatatatcttgcatcatacctcctcttccggtatgacttgctgagtacagtgggtagaactcagtcttgctctctcttccccacaccagagttgaagttcttcccagttggagccgtctcgaagaagttggttttgtcgctgccgtcaaggatgcctgtggaatggagtcacccactgcaggagtcaagtctttaggcttagttcgcttttaccttttccgctgcatttgtaatcttttatatttttgtaagacgtggatctgtatgtcgacaattgtcgtttgtgtaccctggctggtgctggacaggggtttaatgcacattcagcttagaaattctggttcgtgaatttctgggcgtgacaagttggtatcagagccgaattgaacacgtagtctccttagtatctcacctatcaagcagttcgtgaagatatgatggatgctattcttttgacttcacctctcataaagttgtaacaaatattttgtgctctaaacaacaccaataaaaatgtcatcaactaactacttgtagattgcgttgagcattacaactttgatatagagcatctctccatccgaactcaattgcaaacctcaaaaaatattttatcaaaatagaactaagagtgtgcaataaatatttggccaccctaatcaaacttaaatgaaaaaagcattcaactataaagttgtagatctagtcgagaactacaattttttagaaagtttatcatgatcctacttcatatgaatgagttctattttttttcatattttagtggtgctcctatttataagggtggtttttatttgaggctagttttgttgagaatccaccttgtaaaaacattttccccttttttcttaaaaatatctaaactttaaaaatttatagaaaattcatgctaagtccaattga

SEQ ID NO: 22780 - DNA, 9618 bp, Oryza sativa
gaaaaggtaaagaaaagaaaataatgtaaaggaagacaacaaaaatcaaagtatgtaatgagctttagtttcagtacctcttctgcagacaagggcttgtcacgttgacaagatccaccttcattccagtcaccaccttcaaaatgcctaggagattgagtgcggaagagtttcaccccattgggtctcattgctttgttcacaaatattatctgatggacattgtatatccatagaatgaggaagataggttgagtggcataacgacagaaaacaggaagttagtaatgttcaccttggatacatacgaaggctactaaggcccaacaatcaaataaaattcacaaggtggaaatatatatattcaagtaaaacaaaggtggaaaaatattttctatatctatactcctttaaagaaggtagtgatggtggtactgaatctgccaccctatctacttcttaatattttaaaaaataacaaatctaaatggatagccatgcataaaatcaaattaaggtgaatattccctatagtaaaaggatgaatgacacatttatggaaaatatatttgtagttgttgtgggcaatattataaatatgttttcttttatccgtgggaaagtatgagcattcagctagtttaaggaaaaggcaacaagaacaaattgaatttactgcttgatgaagtacaatctctctctctctctctctctctctctctctctctctcatggagacatggctaatatttaagcttatagcccattggtaatataatatttcacaaaaaaaaacacctcattctgtaatcagcaaataatttcgggacaaaattacacaaaaagttcaaaaatacttaatagttatgcattatcaagaaaataaaatgtttttttctcaaaagacaaccgcagatatccataccatgtgtttaagagccaaatccagtcctgcaggtggcaataaaggaggtataactggaatccccttctcaaagaatagcattggtgactgtactggattaaattttgaaggggcccaccacctgtacaaaatacatgagtttgaatcccagcaaagataatatttatgcattttaacaaaataaacgagagtcaggaagtcaggagatagcttagcaaattagcccttatcgtgtagcaagctgcatacatctatagatatatctagcattctagctaagaataaaaacagtttaccaaaacagtttgaatgatattatgcatgctaatgagaagtctggtgctacacctgctaatcaaactcgtattgacatttttcaacatcatatcagaaatattgatcttatatacctgaagtataatggcccagcctacacctagtcaaacaaaagagatggtaaggatctggtccttgaacatcttgtttgttgtttaggaaatgttgaatggtgtgcattttcctaatactactgcctaccatttacctaagctttatagtgatcatactcaaactatttctattttaaatcctaaaaacagaaaacctaaaagaactttcaaatttgacaagtggtggaatttatttttttggggggtggggggtggggggtaagattttcaacaggaagctcaggcagcttggaaaaattcggagcatcttaattaccaaaagagaactactttgcttggagcaaaaggaagaaaccccttcagcaggaagccagaaactatgccaagtagaggaaaaaatcctgaaaaatccagagctctccgaatagagattaactagcccttcaagagagaaacttggctcagcaacaaggattttcacaggcaaagagctaagaaatattgggtccaaataggtggttgaaacacagctttctttcagcaagcagctcaaaaaaggggaaggaaaaacaggataccaattgtcatgcataataatcatctaacaactgatcctgacgaaattgctcaacatttatctcttatttagatcttttccagacttcaaacacagattaaggagtcacatcctctcaagatcagcaagggcaacacacttttgagccaccggaagttccaacagaggagcaaaattttcagatcctcaaacaaatgcgaagagatgcatctccaggactagatgggctaaatgtggcgttttatagagcagcttggcaatggattgagaatgatgtcaccaaaatggtacaggagttctacaatgcagttaaatttgcaaaaaggtatggacgctaccaacattgttttaattccaaaaaatatccagtcctgccactcctgctgattatagacctacaagtcttcgtaacatttcttacaaaaattattgcaaaaacattggccaatcatatccaagagaagcttccagacttaatttctcatacttggaaagtgtttgttaaaggtaggcgtatttccaaattactatatgtcctggcaaaaattagttaataagctagatcaatagcaacacaaatcttgattggtggataatatctagttagatatccgaggtttgagggagaaggcaaatattggaactacagtacaaggaagattaacgtaataaatttctgctgttaactggttactcaaagttttcaaacatgaaataacattcatggatcaggatctacttaattgggcatctaagtgaaaaaaatgttatctggcttatgattgatgttcacataccaatgccctgtgttgaaaataagaacatcatggaagcttggtgcctctgcccatgtttggtcaggaatatcaacgtctactctgtagccttgcttgtatccaagagattctaggggacccccatttggactggctgaccacctacaacatcagcattatacggctttgagtaataacctcagcaatatatgagcaacaacatcatgaaagaaaaactatgacgcagtgaaaaacattaagaaagcggcagagtctactatatttaaaaattaatgaaaatataaagacaaacagtagtcaacagacaagagaaaagtttactactgcctactggtaagcattccaatactactagtaagtaacagctacagtccaaaactgaaagcaaaatagcaaatgcccaaagctgcagaacaaaaatatgtactactgtgcacagaattgtacttatataattaaatcagttgtaacacagaagggaattgcatgatgtggagtacaccatacttccaaagaactataatttggtattactcaaatgacacttcttacctaccatagcgtaccaaaagattagtcctgtggtatgcgagggtgaggttatagcgcaggaatgtgaaaccccggtctgctcctgcaggacgccacttgcgaacctccccactcgcccccctaagcatgcagaccaacgagacaaacatattccggttcaatgaatcacccacaaatcctgcaacaaaccattaaacataaatcatgaacagcaagtcgagacttcttgtccaactaagattctttacatgtatgagagcctcaacaactgaacatgctccgccacataatcaaactacaagattgcaggtaaaaatttacacgtcttctatatatttgacatacaattcacgcatggcaaaatatactaccttgaattgcaaattaatcaggtggaaaccacgttccttccatgctgatctttccaagctaaaagcggcacgcacaatgcacgttgctacactccacaaagatgccttcattggcaatgtcaaatgatcctcgctacagaatgaactgcatctagcttgtaaattgcagcgccacatttaccttgcacataactccctcctcaagttctactattctagtcaccatagaacaagctgcagtggtaaaaaacacacgaaatgggaacgagcacggaccaatgctggtgttcctgtggcactccaggaaacggagcgggtcgagcctggggagctcgcacccgcgtggcctccaccgccatcggagcagctcccggccgttgcgcttcccgttggcgaggcagttccaccccttgaagatctccctgcacgtctggtcgtacctcaggccgccggacaccgcgggatcgtcgtcgtcgggaacccactcgccggacgcgtagtcgcagggcccgcgctgccggggctccccgtcgccggagccgcggagcagcggggagttgggggagcgggcaggcgaggaggtcaggtgcagcagcaggaggaggaggaggaggaggaaagcgagggggaggagcgcgcctcgcctccgcacgccggcggccgggctcctcgccggcggcggcatacgcggtgggggaagcgaggcgtgggggatccggtgacgtggcggcggagtgaggcgaagacgcgagtcgatcgccgtgtgggcctaaaaaggctactgctgggccatcataagtacttttgttggtgggctgggcccaagatcgctaaaattggtaagtactggtatgaacatatcactggtatgaaggaaatgggaagggtgacaaaccgaataatgcaggctttttggttattagaagatgaaggtggagcgaaaacgaacgtttcgtgtccggcgaatcagtcagaagggacacgccaaacatgaggacacatcattttcttccgttttcattttttcccttcttttacgtgattctcttatgtaatccgttgcatcttttacgtgattcttctgtaataggtatttctatttctttccttcacttctgtttatttctcatatttcttttttcgttatacatagtattttttatatattcttaacggaaattttctatacaaacaatttctggggaaacttttctatataaagtgagacttcatatatgtaaactttatatatatggactttgaatatataaactttgtatatgtagactttgtatatgcaaactttatatacaaattaaatctataattaaaaagtttagtgcataaattttactagaaatataaaactaatgccgtttttagttccaaaataattctttaaacttccaacttttctatgatatcaaaactttcctacatacacaaactttcaactttttcgttacatcgtttcaatttcaaccaaacttttaattttggtgtgaactaaacacagcctaaaaatactaatatatttttcaaaaaaaaagtataatccaatctgatcaaacctcctaacagaaaaacgataaaaaggaaaagattatcttttaccatcgcgtgaaaggaaaacgagaaacaggaaaacaattttttttgcgcggctctatttttctttttgtcgttttctgttcgctaggttcgatgctagcgcgcgttcgcgcattagacccaccaaggtggaccatgtctggacaattaaaaattctaatattttagtggtgatttacttaaaagtaatggactaaaagctataattttctctagctacatcctattcctttccttacctccaactaattgtattagtctcttacggtaacgaatgccaaggttaaccttcgcattaatattattcatcatcatcggttaaacaaccaattttcctgatacaacttctccctttacgtgagatcgatatgatataattatgtgtgtaatttttacctagaaatattaatgtaataactcagcatggcttttcttttgccttctgcataatcactcgttatgtggcttcacataggataaccaaccgctccataggtctcataagtcataagattagctcactgaacacaatgggaagttttctaaaaaataaaaggtttctcaaattatagcaaaactttctcatgctcaatatttcgtattggaagtttttccgttgaagttttatttatagttaaagtttgtatccatgttcaaaaatttcttatatgaagtttttctatttccaaatgaaattttttaatcataaaaatactaacgaatatttcaatagaaaaaactagatactatgcatagcgataaaaattgtgtgtgcttacctttttcgtttccattgatatctagagggaggacatgcacatgtaacttgcttgctaggagacatatgactagttacgtatacccatgtaaatattcatgcactagcatcttttgatgatcatttataatatgtctcgtagatctgagtgcttatttgattcatatggtttctaaatcataggaacacgaaaagtaagaattaggattagggtgttacgtactctaatccttaggaattttttcaagagctctcatctcatgtcaaaaatcaaatggtactagattgtaagaatataatctttaagaattagatgtgatctatttctataaaacaaatgatgcatgtaaaaaaatttgaaaggccttatcttttcgcttatgctaatacttatcaaccaaaatataaattcgtaactttaaatttggagctaattttaaggtttttttcattaaacaaaaaacaaagtaattataatcagcctttgagccttctcccgtgagtggcatttggctgctcctattggatcgagtgataagcaaggcaaagcatccccaagaacgaaaccgccgtggaactttccggaacagcccggacatgtgccccactgccccctccctcctcacctcctccccctcttcttcttcttcttcttcttctttcactgcggcgccctcctcttctcagttctcacttctcacacaactcgcaaccctaataaagcgcaaaaaaggaaaaagaaaaatcgccacggaaaaatcctcgctgccccccatcgggcaggagcaaccgccgcatcggcccccgatccggtcgccgccgcctctcgcccggttcatccgccgcttgccaacccctccgctcccagcaaccctagtcccccaccccaacgccgccgccagctcagctcgcctcgcgcggggcgcagccgactctctacttgtggcctcggcggctcgggccctctccggattccacgtatggctcgatcttctgcttttctttttcttctttttttttttttaattattcgggaattgaagcctcatcctattgggggcatacgcgacttggcggagaggacaatggcgacgcatttcagagctaaggggggaagggatatgattttgaggctgtaattgcttgcgaagttctccttttggaagggatcggtcctagccattctgagctgctaaaaattttatttgcggtacggagcgtcttctgataagaggacagaacgattagggtctcccgtaatctgcttttaaatgcttgatggagtcctagaacctaaaattatggaattttctctaatgttaagctaggaatgagggtactggtttcttcgtagatggaaggcgctctacttgttgctgccggaactctgttgagatcttgtgcttaaatgcaggggtttaactggctgtgtaatcttaggcgtggagtgagttgactatgaagaattctgaacatgtctaggaatcataatttcgaattttgtagcttgtggtttatgcagcatctgatactattcagttcctcgttctgtaggatgtctgaagatgcgtctgtcggggccagcagttcaacagtaaaagctggcgatgatccagaggctaccattgagatcaacatcaaaaccctggattcacaagttcataagctccgtgttaagaagaatgtatgcttcgccccaccttgacagtttgctattatgtctctgtgtgtctgttgagtgttgcttgcttgaagagatactagaaatgctatagaatgtcagttccttatagttagaacgacaagatgaattctcccatgtacttgttttgagacaatctaatcactgaaaaatttttaggtacctgttctggtccttaaagagaagatagtagaggcaaccggggttcctgtggaccaacagcggttgatttttagaggaagagtcttaaaggacgatcacctgctatcagaatatcgtatcctttttgttcatgcttcttcttttgaatgcttgaagacaatcaaaccatctagagactcacctcgcttgttgctgttgagaacttgagctatatacactatttacctgcattttgtttcccatctttagttgcttagttataaataggccgggaagatacacaactcttttgggccagtaagggtgatttcgttactgctagaagagtagagtgcctgatgcttttgttgggattagggctgcttgctttggtagtgatttcataatggccttccaatgagacaaaataaagtagtaaaatgtcaaattgaagtatctaagcattaattctttgcaaatatgggcaagaacctcaatcattgtagaccttgatgatatttgttaagttgaggtggttgaacaccagtatttaactgcatcgttggtggtaatgaggggttccttggatcaacgattttcatcaccacatgatgtaatttatcattttcggttttcttgtgatatttcgtttgtaaacacgacagttgtgatagttatatctttgacaacctcaagatttggaagatgggtacacattgcatttggttgctcggcgtgcagctgctgaaggccaacattcttctggtacttctgatgaaaacacccatgctaatggtaagttaagttgggggttgctttgaagagtatactatcaatatagaacgcacctgatatgcctatgacctattagtcctcagagccatgtgctgcacaagttttcgtagtatcgtaaacaatttatgtgcgttttcactcttcaataccatgtttccatgtgtctgttctatatattaattgtgtcaagctcatactggataaaatattattgccctttgaagggcagaaaaatagttattgctagttattgtaaaaaatagctaggtaagcatttcaggctaagtagatgaaggcttgaacagtccttcgctttatttttcatttaatttgtgaactaaaaacaccattatttaactgtatttatgtaagcattactgtgtttctagttattacaatatatagatagagcataacaaatcaacttgggttatattgactggcactaccttttgtggtaccagagtgtatttcctctgtacctgattttaggtatattacagcaatatgctgggtatgggtctgataatctttttacgtgcagttaatgttgctggaaatggactgttaggagatatctccagggtatgcttctaacatcgctttgtctcgtatacttaaaatttccaatctgcttaactcttagcaacaactacaggttaactttaattttctttgaattctttttcattaactctcttctaggaaattatagaggctatgcattctgaggggatgatagatgacctggctagggtatatgctttgttctagtgttatatgtacctgtctaaatggggaccagaacctttatatgtttattgatgtgatttcctcccacctgttatctgcagagtgttcgggatatccttggctccctaggtcttgcgacgcctggtggcatgacaaacactacattttcggtaataaggtgttacttctttaggtctagtaacctg

SEQ ID NO: 22781 - DNA, 5194 bp, Oryza sativa
acaaccagggttttcaattctgaatcatcaaatccaagtatcacaactacaaccagcaggctctattcctcgcaacatggttagtaaactgtacttttttcattggtgttttcccatgtataatcatcattataacttttagcaccattgacaggttattcctgattctctcacaactcttttggagtatatcaaccgcatggatcaagtactacagaataacggtatcgtttgttgcaatttgttagtttgatgtgtgtcataaaatactgtcatgttcatctttatgttgcaaattcaggcacaccatctgttgatacaaatacccagcagccaccaagatcggatgatgcttatctaaatcaaagatttccaagtcctgaggttctggtgtcagtcattgaaagagcccaacaacttcttggtggcagtgctgcttctgctctttcagtatgttatcctctctggtacttatattaagttctttttagcttcagtggttcagcctttatagtgatatcttgtcgacgtatagtttatccttctttgtaagtactatattttgtaatgattttgccttctttctaatcagcaaaataattctctttgaacatcaatatgttgccaatgtactacttttcagttctcttatttgagacaaaactatggagatttaaaccaaaataaatccattgtcccattccgtgaccataatcctgctcacagttatctctaatggaccatatacatttaatggctgatactacttgttacaatatagatgattaggctttataacaactactaggaggaacttttagccacttcgtggtacaaaaataacactctagtgttgtgttttgaatataatttttgttttgccttgggtactaggtctgccttagtgccgtgtaacactgctctatattatccctgaatattatatgaggattcaaatggtatttgtaaacgttttgtaccaccactctgcattatccctgaatattatatgagaattcaaatggtatttataaacaccagatgttatttgtttgagagactgatgatctgtttttcattcttttctgcactatccctgctaacattttcctttgggtgccgtacacttgatctgtttttcattcttctctagcattgattgacatgtgaaaggtctaagtggacctctcaaaggtatcaatgggacattagtcttcctagttcggttcttttctctttttttattatgatacccacatttcatacttctcaacgcttattgattcaaaggggtcatatgtacgcagcttcaagactgagtacagtgaaatagcttacctttgaattcacagacgcatgcttctatttggaattttgatgaccttctgtttacctgatatttgtttcagcatctcgcacaacgaatccagagagattctggcaccagtgatgcatctatacgtagccagatccagaatgaatcagctcagctgggagtagcaatgcagcatttgggtgcaatgtttttggagcttggtcgaacaatgatgatgcttcggatggggccatcccctgtatgcttaatttaaattctctattatagtatttaactgatttctgcatgtgttaatttcataacgcttcttattttggtaggctgatgcttttgtcaatgctggatcttctgtttatataaactctgcaggaccgaatccaatcatggttcaggtgacatacattgagatgctttctcatgttgactttaattgttgtgccactttaatgacaacacacattctattgctctgcagccatcttttcaaaatactcctccttttggagtttcgagcataccagtcctcggtggaatttctggtgcctttggtattgttgatccttctcgtacatctgctgtcaatacccatggtaagatcacatttcaagttctcttcagtggctctgttgagtgtactcagctgagtcatgaagctaccatttcaaatccttaatctctactgagaagttcaaatggttatggttatggcctatgattacaaactattacactaataggttagtaggtaaattatctgttagttatttcccttttttttttcttgaacacgagggagttcttccctatattacctgcttcgtcctgatttacctctaaccagaactgaaagatcataacagttttcatatatttatgggatttttcacagggtttatttacacctggatacaatattggtggcctttaattacgattcttttttcaccatctttgtgttagttttcccacatattaccccctcctcctgatttacccctaaccagaccggaagatcataatagctgtaatatatttatgggattttccacagggtttatttacacctggatactgtcatcttggtggcctttgattacaattcttttgtcacactcttgtctgtcctgagcttccactcagacttgatatgatcctttactaggtacttctacaacaagtgggtcatctgctggtatgaccactgcttctgcaggcgctgtcaatgaaggtcgtcaaaatgtggaaagaactcaaggaggtaacccatctgctacctcaatgcatggattgccagcaaggacagttattgcggctattcctgcacggtccacggctgaggctccaaaccatgtcctgagtgttatcctgcctgttcaagtgaggagtcaagtagcaatgcctaatcaatcaacagtttctcaaggttctcagactgcagtgggcggtggatctcaaccacaagcctctgtaggtggtgttgctagcattccttctatagtggcacaggtaactgcacaagtagccaatgcattgagtgcaaatcaacaaggccaggtttcatcatctgcgcagaacacagtagatcagggatctcgctcggtcacaactaatggagttgacaatgtggattctctggtatcagcaagtacgcaactgcaaaatgagctgtcagattctaacaatggacgcacttcactaaatgcacaatctcttgtagctggagcaggtgcctttacattctttttaatgtatcgaacattttctctaatggaaaatgtactgaattgttcaccattcctgtttgttttaatttctctaatcaggtatttctccttcaaacacatctgatcccaatttagcatcggaagacagcagcactgaaaatgctcccaacatcggcagtattcaacaacatccagagatggaagggatccatgcagataatgtcagaaaaccttctgaggaatcaacaacagccaacttagtggggcagatcacaaccacctgtacagatgatatttctgtgaacagatcagcagaaaattcttcacagaagaacattccattggatggagtatctgcacagtccattaagccatctgcaagtagtaggtctgaaccagtaggtcttggtggaggtttgcagcctaaggtattagttaattattttagtgtttactttttagtaataatgtttcctgtaatttgattgtttagcctgcattttgttatccatatcttagcggggttagaatttgccatggttggcagcagtttagttgattggtttaatcacttcaccatttggtctgaatgaaaatggcagacattttactgttgagaaaacgtagtatgccattcatacatgattatttgtcccaaatatgatatgatccccccttctgaaactgctttgatgcagaggcggagcagaacagcaaagccacctgggagtagcagtgatactggcgaagtcgtcaattcctctcgcatcagcaatagccaaaatgctgtttcaatgggccagcaggttctgcaagcccttgcttctcaaaatactaatgtaaacagaagccatgttacggattctccacttccatccactacttctcagttttctggtggaatgcctccgagaagacagggtggtgaaggacaagttgattttggcagtatgatatccagtgtgctaaacaacccagcttttggcaatctgttgtccaatgtagcagagcaaacaggcatgggttccgcaggtgatttgagaaacatggtggaagagtgtgcacagagccctgcaataatggatactatgagtaatttagtccaaaatgtggatgggtcaggaagaggtcaaggtggcattgacttgtctagaatgatgcagcaaatgatgcctgttgtatcccaagttcttggtggagctggggctcgtcctgctggtacaaatagtggacaatccagattgcagcctcggcgcagtgacatgagagtggatgatgcttcagattatggaaattctcaggtaagtcatccagctgaataggttggaactgcctgtatttgcatttgttcttcttagtattatggcttgtgcttatatggtttatttgtgaagaaaaaaattgtgatgattactaatacaccatatctggacaaatgttcattctaaagggttgagaatgtcatatgcaagactgacaaatggaaaacaatatcttttttttttaactttttgataattcataaactaccatcctgctttttcatgcacagattgatctacaccaagctcgtgaacacattgagcaacatgactcccccagggatatcttcggtgcggtcctcgaaactgctgcacaggcttatggtgaagatgagagtattgaggacatgcttgaagagcttgtcagtgacccagaacttacagatgtatgtttccaaaatccccccatccaaatttagaataagctctaatgattttcataggatgccatatagttgataccgtagggtgagattgtttagaaacatacattaggagattatgttatactaatatgtatacatatataaaaaggcaagagatcattttgtggtaaaataagtggtatatgcttcttatatgatcttttgtcaaaataaataaaaaatctgataggattttgcagtaccttgtttgcctttttttttcttttaaaaaaactttgtttgccttctgattaaccctaaactgctgcaaatatatgctaggactacctgaaacttctgctccaacaagttcgccagaggatacagtcggcatctcaatccgggaaccagtcttgagcaatcatggcaaagaaggtgatccagata

SEQ ID NO: 22782 - DNA, 931 bp, Oryza sativa
acagcgagcaaaaggcctggttacgggagtatagtgagtttcgtgatgggcaaagagtacgatcgccaacaaacagcccagctctgtaacgatcgtagcccgtaacgtttacaccgcgtgtcaacaaacccatgttgcctcatgggccaacgcggatgcttagctactttagaactgtaaactgttggggatgcattggagtgggcaccaggtgttgtagagcaagtttaagggcatatgttcaggggagcttttagctgctgcagtttcttccagaattagaagctcctccaaacagttcagcttttggtccagattctgagaagttgtagaatccagaaaatgaactagaagccaaaagctaggaaaccaagcttttccaaattctcagaagctggctactaatcaactgcttcttataattttaagcttgagaatacgactaaggcaaagagccaggatcacttggttaaagcatggagacgttaactctaaattcttccaaatcaaagcaaatggtagaaagagaaaaaatcacatacagatccttcaaactccagatggctttgctgtaactaaagatcaaaaggaggaagaattgaagcgttacttcacacaaaaattaggagcctttgctctcagaaatcagagattaaacttggctgctctcaatctccctacgcttgatctctcagatctcgatgataacttcactgaagaagaactcaaaaatacaatctctgacttgcctttggaaaaatctcctggaccagatggatttattggagcctttttcaaacaagcatgggacataataaaaacagatctcattcaagctatttccttctttggagatatgggatgtgcaagactgcaagaactcaattcggcacatatctgcctcatccctaaaaaggcggatgcaacaaaa

SEQ ID NO: 22783 - DNA, 9278 bp, Oryza sativa
ctttggctttggacataaatggtgcaactggatttccaacctactgggtactttctcttctgcggttcttcttaatggtatcccaggtcaggaaatagaccatgctagaggtcttcagcagggcgatcccctttcccccatgcttttcatccttgcaatggaaccccggcacaaattattcaagaaagcagaggatcttggccttctctctagtctgcaaagacagcggcgcttcagatgttctctctacgcagatgatgttggtctttttataaagcccattcgagaagaaatgctagtccttcgtggaattctttctgtctttgcagatgccagtggacttcacacaaacatggaaaaaacagagatcttcccgataagctgtaacggagtcaacctagatgactgcctttccatcttcccaggtagaatttcaaacttcccatgtaaatacttgggcctgcctttgcacacaagaaaattggggaaattagagcttcaacctctggtggacaaagtgggatcgagaattcctggttggaaaggtcgcttcttcacttcggcaggtagagaaacactctttcctctaccccaatttatcacctaacaattctccagcaaaataaatggctttacaaaaggatcgatcgccttaggcgagctttcctttggaaaggcggcgatcctgaaaacgttagcgggggcagttgtcttttgaattggacagccgtctgcaagcccaaacctttgggcgggcttggaattctcaatttagagaaattcgctcgggctttaagacttcgatggctctggtacgaatggaaagaggaaaataaaccctggatcaatatggaaattccatgtgatgagatggacagaaatctcttcagagcaagtacacaaatttccctaggaaacggaaagaaatgcaagttttggtcagacaattggctgcaaggatacgctcctaaagacatagcgccgacattattcaaattagcaaagaggaaaacaaactgcgtagcctttgagctgcacaacaatcactggatcacttccttaagaacaatcacttcaataaatgagatcaatgagctggtgcacctaggcagtaagctgcatgagatcagattacaccccaattctttggatagtatcacgtggaagtggactaatcatggtgaatactctgcaaaaagcgcttatgaaatgcagtttgtaggatcagttgccaacacaaattttatgccactttggaaagctgaagcggaacctaagcatcggttctttggctggttaattttacatcaaagaactctcacagctgaaaacctccttttaagacattggccatgcgattggatttgcagcttatgtacagatgcttttgaggacgcaaaccatttggcaaaggagtgcagtttcactaacacggtttggtcccaagtttgtagctggctggacatcatgcagaccccaaatcaactacaggatgcaaacattttagaatggtggacctcaatcatacattcaacttatggaaggagaagaagaaaactgataggggcactttttataacttggtggcaggtgtggcttgagcgcaatcgaagaattttccatcaaaagcaactaagtgccacccaagtagctttcttagtaaaggaaaatatagatgccattcagattttgcgccatacataaaggcttgtgcttagctctagttgatagcatcatgtatgtaaatctctgaaaatgtcacctagtggtctgctctttcttgacctctctaactgcttctccttctaatatatccggcagagctcctgccgtcttttgcttcaaaaaaaaataattttaaactcccccaacgggccctaaggctgtgttcttacctcaggtttcctagctcatctccctctttttcgcacgcacgctttttaaactgctaaacggtgcgtatttttttacaaagtttctatacgaaagttgcttaaaaaatcatattgatccatttttgaaaaaaaaaaattagctaatacttaattaatcacgcgctaatggactgttacgttttccgtgtgcactgttctagttgggaactccctccagcgaacacagcctaatggtatagccaactattatctccaaatcatctatagtcaatttaatagccaattcatataatagttacctataaacatatattacactattaatatttagttcatctgtcatacacaaattgtatcttggagtccgtgttgtccgctactcttctctttcctctgtatccccgctactcttctctctcatccgttatacctgctcttatatccatttgcaaacctttgtggacagcagcaagagcacctaatttggaatcctgtgttcgcacaaaacaccggattccgatgtactccacagttgtatactccctccttcccaaattgatcatcatgtaataaaatccaaaatttctcaaattgatcatcatataactgcatgatatggatttcatcagaatacaattaatgcagtatgggagaatgtgtgcatgctatggtgtaattggcatggggttttaatggatgcatacattgtgggagaatatgtgcatggtgtcttgtttgatgtgatttaaattatccttagtcttggtgcataaacttagggcaagtgctatgctagaggtgcctaccacctctaattttatatattttattcactcataaactaagagtcaacccatacaatgtatcacctctagtacacaaataccaatatctctaatactctcacatcctttttaaaatttgtgtggaggttgtatcttgatttaggggtggctcattatctctcttctcacttctctcctccacctcatcactcaattaatatggcactcttagggacaacatatggggtattatagtacttgcccttatatgatgatcaatttgagaagaagggagtaacctagaattggacaagatacattctaatactacaaatataaacattactgttagatttgtaatagtataatgtgtcttcttcggtactaaattattatattttaggatggagattattatattttagagccgagaaagtatcagtcaataaatcaccgtcagagcacaggctgataggtccccgtttccccaataataacacgaagctagccgtacagtactagtgtcaagtgtgattgtgtgtgaagggttagcgagggaagaagagaagaggcgccgccgcaggaccggtgctgcatttgcatcgatcgcataggcatgaagtcatgcaagcgtacacctacgcggtcaagtgaccagctgctgctgctgtgcacacgcagccgcagtggttcgccatgaatgtgtctgcagcatcatcactcatcagcgagcaggaatcgagcaaccgaatgtgccgtctcctttgcgcgtggaaccaatcccggaagatatgccatgccaggccgttttcatcccatctcattcatcggaccctgacctactgacctcatcccaaattattatcaaactgtttctgttcgcgtacgtaggcccctggttcatatggtatacctgtctttaattttttttaaagaattacgcagtatactcacaacacacgcatactcacccctatgaacgcacgtgcgcaaaccctcataatgcacgcacactcaccactgtgagcatcttcgaagatcgggccaacaaatcataaagattgacgaagtcaccgtaggcgcctcgctgtcgacggatacgtcgcctaccactgaaagcacgagaccgttaaatcctagaaaatttgctcccatgaggagtcaccctccgtcacaaaataagtttatctttcaccacacatatcactacaacataaaaaaaagatcacaatatagtcactttcttaaatcctgatttaattatttctctctttatctattcctgatgtatttattttctactttcataagctccaataaaattattatttagaaataaacttgttttaaaacaatctaacggagtaaaaaagtcattttgaaacgaatggagtacatgcttgccaacactaaagcctagctactctgtgagacactgacggtgatgcactattgggtactgtacactgccgcgtgccatgctgcagcgtgcaaaacagctactgtagccggcatgctaatgtcgtagtaccacgctacaaacggaattgctgctcatgtctctagtcacaccatgacaccacgtagggtacttgacacttgctctagtactagtagtactgtagtaggaagtaactgaggcctgtttagttcacacacaaaaattatatcgaacgtttaaacacctgcatgaagtattaaatataggttaataaaataattaattacacagattgcgactaatttacgagacgaatcttttaagcctaattgctacatgatttaacaatgcggtgatacagtaaacattagctaatgatggattaattaggcttaataaattcatctcgcggtttactgacgaattctgtaattagttttcttttattagtatccgaacaccatatacgataccctatatgacacgtcaaaactttacagccccttaaactgaacacccctgagtcgtcactgttgagcctgtgatctgcacgtacccctagcagccaggctgccaagcccaagaccagcattagcgcagctagccactgtagctggtttggccagcatgtccccttcccctccgagtcaaaaaggtcgtcgccgatcgagacgcgacgcgacggccgatcgacccacgtgaccgatcgaccgcgactccgccgtatgatgtcccgtcctggcgagcccggcgcccacccgcacgcgcatttgccaatttgcttgctgccgccaccgcgcgtcgctactcgctgcagcctcgcctcgcagtcgcagcgagcgccgaggggtcgtggcgcggtggccgcgccgcgccgcgtgtggcaacggggccgtggcttgtccggggaaaagaggcaaagagcggccggccgacgccgaaaaggaggtgggaaaaagcgtgtgcgtgcgtgactagctgctatagtgtgcggtgcccggtgacgcgaacagtaaccgaaaccacggccggcagcgcgggccgatccaacaaacaatgaggctgctgctgttacgctgacccaccgccggtttgactcacctgcacccagcaactgcaccgagttactactcctactgaccactgagttcctgacacgcatggatgaatgccagcccgtgactctacaggaccaccccaagccaagccaagccgttgacatatttcacttatgtttacgcgacagacggcgttcgcattggttcctgaccaaaccaaacgagcagctgccagctgacattgaccgctactgaatgcaacgttacgttgcagtttctcagcatcccaggctaacctgaccacctcgctatacatgcatcacccaatcctgcccctcacaaaactggcatattagtattagtaaaacaaaatcaaacactattcatcgatcgtctactaattgatggcagttcctgtgacctgcttgtcctccaaacaaacagtgctcacttaagtactcactttgtcacaaataagttcatttttaagccatcctacatataccaatacaaaatgagaaagaatagaataatctcactttatcaaattgtaatacaactattccctgcattatctactccgatattctctactttgacaaactttgatacaatgattacttaaaattttggacaaacgggagcagaaaaaaataaactcacactgactttctcgagctcacactgaatgtcacagactcacagtcccatctgtcctctgatgtccttgtctcttgcggtgtttcagtcagttgaaccccatggctgcacctgcatttctttcagtggtgtcgtcctacctgcctggactgacttgaatgcctcgcccaacaacatctaatgattctaatctcaacaatatctaatgattctaatctaatcccatgactttgctgcctctctgattgtcaggacaggagcagtgtgtacaaatgtggagtttataaacatcttggtttgaattctccgcagttctgcatgagacgacgctggaacagacaaattccagctgaaaaagcgcattgccatcgccgtgcgccgtgtttttatccgtggtttttttgctcccacttctcaaatctgactttgccttttgtaaaagtagtacttatatatgagtctagtcagagttctgaagatgtgttcttggaaaagaattctgacgatggccacatcaaaaggatttctgaagatgctcttgcaaatatggatttctaaagaagctcttgcatatatcttcagtggtcaaggctaaaatgttatcatactggtcaactcagtgttttgctcgctggcaattctgtttaaactaaagcattcaaatgtgagcatatttttttgtataaacaacattcagacacctgattaatgtgatttacttccgaagaatggaacttgtgagagttgtaaaacacgttatcaaggtgagaaacgaaatgtttgttcagttcttttactactccaggtttccttgtctgacttcgcagcattttattatattctgtacgaatttcaggtggtagcatctgcagttttcgcaattctgtagtccaacattcataccaaaacttgtaatttttgcagtaattcagtgaagtcctcgtctgaaaacattcagcatcaatcatgtgaaaacgcatttgttgtacgcggcgtcggtaatccgagtgcaaaattcttatatctttgtgcatgaagttaatacaaacgacaaagccaacaaggaaaactcgactacatgttacgcttaatctcttcatcagtgagatcttaaaatataatgacatgacctaattttaactctgaatcgagcagttcatacagcaaaagtcgcaattaagcttacaaaggagcagcgattggcattgttttatcgatccaaatcacgcaacaggctgatctgatgttgctacttctgtcctcttttgctacttacgctgcatcttctttgttcggtgtacacttgattctatgtttccatctgaccaagaacaatggatatgaatgaaggtttcaacctattttactttgatcaagagttgtcattgtctggtttggccctggaagaatatttctgatgaagtttgttcaaggatcagatgacgatacgcgtcacaacgtcggcattacctgcttgtttcgatcatagtttacagcgttttttgcttgtgaactctgaattttcagatattgccagcctaatgtcattgttcagcatcctcttgttgatcggcaagacctccttgtcggatcttgaatctaggcaagtgtcaattcggcaaacatgtaaacttcagaatgaggtgacagatcaatcatcaagaccagctatggcaataattccgactactttctaaatgactgtcaatgtgcgtgattattcagagaaaagcacaaactaattcctccggtaattttctccttttttgtcacctcaatacaacaaaccttgtccccaaaagatagaaaagagtaaatcttgttgatttgttatagtcaattttctgttactagctacttaaagcatgatattcctgagggccttttttttggttcaaactggcatattgttctaagaatctttacatgtaccaaactaagtatgctgttaattctttacccagcaaagtgccagtgtgcagtcactgtttgtgtcgccaaagtgtgggcacttgcccatgcttttttgctctcatggccgaacagtaaccatttgatagagacataaacacatctcaatttcccatgtatatatatacatagcccacacactgcttgctggcttatcacaaaagcaagatttcagagaaaaaggggaagccgggcacatcccacatgccacataatgccatgttgaaacaattgctggcttgttattttgctagatatcaaacattccctgttttaataaatattaagatatttattacagattatttacaaagattgaatttcgttgcattccagcatgtcagctcatccaatgttgggcccctttctttttggttgatggggccaggattatttgcgaattattcgtaccatgcttttaatagtatgatttctctagaaactttctgcatcaaagttacttaaatcacttgttttaagttatttgttatgttcataatgtataatgtatagcgtttaattcttctctataaacagatcgatgtgcatcaacctttctccgcattacatatatgttctacatatatagtaaaatttgatgatttaatactctattcattgtcactttgattgtattgaattgtgacaatgctatgtgggacatctgagtacatgacactgggtcaggatgtcaaataatcgaagcggaatttatgaagtgtaaaaaaaaaatcaaatctctccattacatataccatgaaatttaatctcaccatttttcacaccaaccatcattaattactactacaaatttatcctagtatctgaattttaacggcccaatcttttgcagttaacccatcgctgtcaatgccgctgttgaatccatgcaagaacagcaggaatgatccaagctgggtagctcccacgcaaagtacggactagctaagctaaggtaagttagctagctaccttaccagctagcatcaaatcaaccaggaaaacaaaagaaattcagagctaaccagctgctaaaactctcggcaaccatgttccatgcaggaccagatatataaagatcaatcgcatcgaggcaacagtggataaatctccctgaaatcttcagctgaaaaggtttgggtaaagtttgtggcgtggtgttttggttgctgttgacgcatcacatcgaggtatctatagctctgatcagcagcagtgtagtagtacagtgaatgaaaaccacctgaacggatgaaccgtgagtggctaatcatgtcaagctggctagctagcctgggctgcctttctgcctgataggtagccgtagtagttaggatcaattagccggttggtgacacaggctcaagctagcgcagcaaaggatgcggccgtgcacatgatggatggaccggttggataacacaaatttttgacaatttgaccctttgcaaaactaattttacaaatg

SEQ ID NO: 22784 - DNA, 14250 bp, Oryza sativa
attgaaattggaacgatgtgatggaaaagttggaaatttatatgtgtaggaaagttttgatgtaatagaaaaattaaaagtttgaagaaaaagttagaaactgaaccaggcttaaaagtgcatatgtacgcaccaaaaccgagccagccgtccaagccttattacagtcgtaacaggtcaaattgtttttaaagtcgtaccccctctcctaaaaacccaaaggaaaaacgtttgaattatacccttagtctactgagtaagtacgaattataccctatacctaaaaatcagacatatttcattcttaattattacttaacaccagacaaattaccttctaatttaaataggagtggttttaattctacgtgacagtgtagtaaaaaaatataaaaacttagtactcgatcttgtctagattctaacatctaaacaaagaaatatttttgtgtacactgttaatgaaatatctgacatttggaatgtaatccctccgttcaaaaataagtgcagtcatctcgttcaaatttaaactagaggactatatttattttgggacgaagagagtataaacttttgcatgaaaatcaaataaaactccttgctcggtagcttattttcaccttattcatgggatccttaccgctgataatttgctcaaagcttttaacaatatgtttccttaaaaaatcattcttttactgaatagttagattacttgttctaaactagtagcatttgttttgttttcttctaaaaaattaatttatccctcataaacaccttttttttacctactagtattttattttgccaatactcctgtagcctaataaccatatacagctttcccggccagacaaccagtcaaccactacccatctggtctgcttatttgctgctgtacgtgtcaaatttccattttgatcaattgcacaaaaagggttagacatgaaaatgattagtagaaaataggtgcacccaagatgattaattgctgctgtctgtgtgccttcaaacccaattttgttctcacattaactcaaattccttgttcccgcattaactccaattgatgtctgaaaggcagacgtagacaaccaaacacgccgagctccctctcacgcgagccaccacaaatataagatccgctagatcctatagagatagaaaaaatcaaaaagaaaacaaaatcatgtgccatattcttatagtttataaaaatgtgtcattttatgttggtctacaaaatgtaattctgactataatttttattgcagaaatatagggaaaacctgataattatgaaattatttttggaggaaaagctatgtatattatcatacaactaatcaaaatattgaaaaataaatcagttttttaaagtttagcttgaaactaaccaagtctataagtatatatttttcatgactggtgggagtagtacttctattgctcgagtgtagggtggcaacggggcgaggcggggccaggttgggttggaacgcccctgcccccgcccccgtccccggccctagaaaggaagttgggtgacaaacatcacccgtccctacccccacatgggacccgacgggtgaccggggccccacatcacccgatggagttaatactccataaatatattgaaatacactgaataatagtatgctaaaatttcaatagcctcgggcggtgtgggttgattgaagaaaggaaaaggattacggttgaggggaactagggtgttgagcttttatatgccaattttgaatgggattgttggatctatattattgcaatgggcaacttttagagaagtaactcacatctggggctcctcagggtcacccacaggttaatttcgatccccgcccccatctctggaattttgcggggccctgtccccactcacccgcgggtgagaactctctccgcccccaccctcgtagacgggggcggatccagaaccagattgaaggggggactcatctccttctcctttcttcagtccctcattttctttattttctccctcttcttcccctttcatctctcattctatcaatggtgatccagcggggtggggggactcaagtccccctagcacccatgttggatccgcccctacccatagcggcgggtcccggcgctaatggggaaattgctacccctacacgagtgagcaatggaaacttgtttggacttgtaatataaatctgtactacaattaaaagacactagtattggtggctcaccaccatcatatataatcactgccatgtaggccatgaaacaagtactttcttttactctatacgctgtagttctttaacttttctaaggatggcatttttctttttctatttttaaggtgaaaaatcctgcttcaatcaatattttttcaacaaggactattttttctttcaagttttaataattcgttgtaacgcgtggatatttggctagtaatataaacttatttaggtaatgataacaatgatatcgacattaggggatttgcttaccacagctctagagacaactactgaagattccctaagtgcacgcatgcatatatatatatatatatatatatatatatatatataaaagttgcttcatcaggcatatagattgtgtaagacaagatctatcctcgatcacgttgagtcattttcctcacatatatcaaacttattttaaacggttgtttcgcgttcgcgaaaatatttttaaacagctgtttcaccatgcgtatgtgcatacattactattacatctttcttcaattcttctcattgtcataaccatttttcttccatccggcttgtcgatattccaccctgctgtactttcaatgactcccccttttagtatcacctttaacttattggtgagataaaatgaaagttgcatctatcttgagaaagagattgtctagctttaaggttgatgaattaatctttaaaaatttcaaacactccactcatcccttaaataaaaacacaactactttttccctaaaaaaactactgtcgagtttagttccaaactttttcttcaaacttataacttttccatcacagcaaaactttcccacacacacaaacttttaacttttccgtcacatcgttacaatttcaaccaaactttcaattttagcatgaacacaccctacttccgtcgcacccttactctatttaaacgcaatccattttttcttatatggaaagttgaataagaataaatttaatgcacaactgaaagttgaaatataaagtatacaacttacattaaaaaaataagtaaaactacataaattaacaaaaggcagtaaaataaactaaatttccgcacataacaacgtaatcttaagacttaataatggtgtaatttcaggtgattgaagaaaacaaaaaaagggcagttgaaatgtagcaaataccctccagagatatacaaaagctgcgaaatccatgtgaaaatcattttaagtccactcttacattgtgggacagagtacactattccctcatcacaaccttccggatgctcatcttgaatttaaattaaatctacccaaagtaacgaacctggacaaagatcacatcttgtcgaattcactacagtgaacttactacatcgtggggcatagagagtacagcatcttgacaatcacatatgtagctgcatcaggcggccagatgatgagcccccacatcctttttgctgctaagtagggtgatcagtacaaaaccaccatggcccccatctagcgtccaaatcattccagccagtttataccaacaaagttaagcctctgtttggtacagctttggattcaatatttcttaaagctatgtatgcctagcttcacaaatctataaatctgaatatacgattgcattgataacatttggatgaatcatttttttcctattttaaataaaatataaaactttaaaccactaaaatttaaaatacaaacttcaaatccatggttaataagtttctcccaaaatccaaagctccccaaacagttcatttttttatttagattatgtgaagatatagctaacaaatacaaaagatgaacggaaaatcagaagtttgatttattttttttcatttttttctatatttttaaaaactggctaagtggttatcaaccagatgcttcttaaaatctcaaaatatctccaaacatgcccataagatagccatagcagattcgtttcgttctaaaaaactgtgaagatgtagctaccaaatacaaaagatgaacgaaaagttagaagttgtatttattttaatcttttctagatttttaaaaaattggctatcaacaggcttgttagaatcttaaaaatcttcaaacatgcccataagatagccatggcggattcgtttcgttctcaacctatcacccataaaagggacaccaaccactctctttcccacgaactcctctctccctccctcagtccttcctcctctcgtctactcactcccctcaactgccaattcccctctctctcctctgcttcttcttcttcttgagctgatccattccatttcccgagctgctcaccaactccttctagaggccgacgcggccggcgccattgattgcccatgcactgacacgaccacagatgcctccttaactcctccactcccccacgtactgcgcgggaaccgatgcgcccatgcactccacgtagctagctaagacgcgccggagtggtggcgccggcgatgatggcgcggcggcgattcttcccggcgtgggtggtggtagtaatggtggtggtggtggttcttggttcttgctcggcggcggcggcggcgggggatggtgatgcgctgatggatgtgaagaatgcgttcgtggaggatcccggcggcgttctggcgggatggggcggcggtggcggaaactcgtcggcgttctgttcttgggcgggggtggagtgcgacgcggcgggggcgagggtgaccgggctgaacctgtccggcgccgggctggccggggaggtccccggcgcggcgctggcgcggctggaccggctggaggtggtcgacctgtcttcgaacaggctcgccggcccggtgccggcggcgctcggggcgctcgggaggctcacggcgctgctgctctactccaaccgcctcgccggcgagctcccgccgtcgctgggcgcgctcgccgcgctccgggtgctccgcgtcggcgacaacccggcgctgtcgggccccatccccgccgcgctcggcgtgctcgccaacctcaccgtgctcgccgccgcgtcgtgcaacctcaccggcgccatcccgaggagcctcgggaggctcgcggcgctcacggcgctgaacctgcaggagaactccctgtccgggccgataccgccggagctcggcggcatcgccgggctcgaggtgctctcgctcgccgacaaccagctcaccggcgtgatcccgccggagctcgggaggctcgccgcgctccagaagctgaacctggcgaacaacacgctggagggcgccgtgccgccggagctcgggaagctcggcgagctcgcgtacctcaacctcatgaacaaccgcctctccgggcgagtcccgcgcgagctcgccgcgctctcccgcgcgcgcaccatcgacctgtccggcaacctgctcaccggcgaactccccgccgaggtcggccagctgccggagctcagcttcctcgcgctctccggcaaccaccttaccggccgcatccctggcgacctgtgcggcggcggcggcggtggagcagagtccacgagcctcgagcacctaatgctctcgacgaacaacttctccggcgagataccgggggggctctcgcggtgccgggcgctgacgcagctcgacctggcgaacaacagcctcaccggcgtgatcccggcggcgctcggcgagctcggcaacctgacggacctgctgctcaacaacaacaccctctccggcgagctcccgccggagctcttcaacctcaccgagctcaaggtcctcgcattgtatcacaatgggctcaccggccggctgccggacgccgtcggccgcctcgtgaacctcgaggtgctcttcctgtacgagaacgacttctccggcgagataccggagacgatcggggagtgctcgagcttgcagatggttgatttcttcgggaaccggttcaacggcagcttgccggcgtccatcgggaagctctccgagctggcgttcctccatctccggcagaacgagctgtccggccggatcccgccggagctcggcgactgcgtgaacctcgccgtcctcgacctagccgacaacgcgctctccggcgagatcccggcgacgttcgggaggctccggtcgctggagcagctcatgctgtacaacaactcgctcgccggcgacgtccccgacggcatgttcgagtgccggaacatcacccgcgtcaacatcgcgcacaaccggctcgccggcggcctcctgccgctctgcggctcggcgaggctcctgtcgttcgacgccaccaacaactccttctccggcggcatcccggcgcagctcggccggtcgcggtcgctccagcgcgtccgcttcgggagcaacgcgctgtccggcccgatcccggcggcgctcggcaacgccgccgcgctgacgatgctcgacgcgtcggggaacgcgctcaccggcggcatcccggacgcgctcgcgcggtgcgcgcggctcagccacatcgccctcagcggcaaccggctgtccggccccgtgccggcgtgggtcggcgcgctgccggagctcggcgagctggcgctctccggcaacgagctcaccgggccggtgcccgtccagctcagcaactgctccaagctcatcaagctctcgctcgacggcaaccagatcaatggaacagtgccatcggagatcggcagcttggtctcgctcaacgtgctcaacctggccggcaaccagctctccggcgagattccggctaccctcgcgaagctgatcaacctgtacgagctgaacctgtcgcggaatctcttgtccggcccgatccctcccgacattggccagctgcaagagctgcagagcttgctggatttgagcagcaacgatctcagcggcagcatcccggcgtcgctcgggtcgctctccaagctggagagcttgaatctctcccacaacgcgctcgccggagctgtgccgccgcagctcgccgggatgagcagcttggtgcagctggatttgtccagcaaccagctgcaggggaggctggggagcgagttctcgcggtggccgcgtggcgcgttcgccggcaacgcgcggctctgcggccacccgctggtgagctgcggcgtcggcggcggcggccggtcggcgctgcggtcggcgacgatcgcgctggtgtcggcggcggtgacgctgtcggtggtgctgctggtgatcgtgctcgtgctgatcgcggtgcggcggcggcggtccggggaggtgaactgcacggcgttctcgtcgagcctcggcggtggcggcaacaacacgaacgggcggcagctggtggtgaaggggtcggcgcggcgggagttccggtgggaggcgatcatggaggcgacggcgaacctgagcgaccagttcgccatcggctccggcgggtccgggacggtgtaccgggccgagctccccaccggcgagacggtggccgtgaagcggatcgcgcacatggacagcgacatgctcctccacgacaagagcttcgcgagggaggtcaagatcctcggccgcgtccgccaccgccacctcgtcaagctcctcggcttcgtcgccagccacgacgtcggcggcggcggcggcggcggcggcagcatgctcgtctacgagtacatggagaacggcagcctgtacgactggctacacggcatcgccgccggtggcggcggcggcggcgacggcgagcgcaagaagcgcgtgctgagctgggacgcgcggctgaaggtcgccgccgggctggcgcagggcgtcgagtacctccaccacgactgcgtcccccgcgtcgtccaccgcgacattaagtccagcaacgtcctcctcgacggcgacatggaggcgcacctcggcgacttcggcctcgccaagtccgtcgccgacaaccgcaaggacttcaccgactccgcctcctgcttcgccggctcctacggctacatggccccaggtaaaaaccaaacttccgttgtgtcaattgctcgccaccatgtccatgtcgcggacgccattgatgggcatcttggatcttgcgcgcagagtgcggatacagcttgaagacgacggagaagagcgacgtgtacagcatggggatcgtgatgatggagctggtgaccgggctgacgccgacggacaaggcgttcggcggcgacgtggacatggtgcggtgggtgcagtcgagggtggaggcgccgtcgccggggcgggagcaggtgttcgacccggcgctgaagccgctggcgccgcgggaggagtcgtcgatgacggaggtgctggaggtggcgctccggtgcacgaggacggcgccgggggagaggcccacggcgaggcaggtgtccgacctgctgctccacgtctcgctcgattactatcgagccggcgagcacaagcgctaggctacgaggacgatttccaaacgctggaaacttgtcctcctgagcattttcttttcttttttctttctctgattcttgtttctggtggctaattagatcatctttgttgggtgaaagaggtaacaaaaaattgtgcatttttagggggggtgtgtggttgagaaaatcaaatcaagcaaagaatcctcttcaattggattgtttttaactgttccaagtgtaaactgtgtatggagattgatttcagaagcatctgatgaattctgaacattgtttcatctcagcattgcccagtcctgtttcaagtgatgctctgaaaaatagttgaaacagaaatcgcaacatgaaagagacatcagctaaagtctcatgatagggtaaaagaagttacttcaactcacaacattaaggcatggcaaacacaagtataaggataatcataacaacaaacagaaaaagagcagtggacataaggatggaggagcagtgaagaaaaggaatgaacgagcaaggtgacatatcacatcactagaacctcacaacatatgggtaagcagaaattctaactttgtaaaagcgctaccgttggtactaaacaatgactttgcatcagggaaggtataccatcagagccgagttcgataattggtttctcatacaagcaaaatatcacatcctttgtgaaaacaacagtttattacagcaccgcagttgaaattgcgagccgggtgttgatacggcgactacagatggatggtccaaaccatgtgtacagaccatacaaactgaaaaaaaagagtctggtggctgacaaaccaatatgaaaatagctaatcatcatcatcatctgcagaaacagaaataagagattgataagccaataaatattaaacagagaaaaggtattgtatttataactattcataaaaatgagcacatggttcaacagaaatagcatagaacccatctacaaacaagagctctactggcttcagtaatatttggacgactgagctagcaaaggtacacaaatatgttgcctgaagctgttagacaccaaaagcaacacgaatcactactgccatttacacaggttgtgttcatactgatcagccagcccaagtcttaaaaaccagatatcttgttctagcctaagctttgtttctagctccatttcatttctactacaacaattatcaagcaaacaagatagccaaacaaatggaaatatactacatgtctacatctaaaagtgtgtagttcattcatgctacaactaaagattggcatatcatgccatacactaatcatgctcctacagtttttgccactttctttcttctatttgcattctcactaaaatggtcaattgaaaattttcagtcgcaaaatctatttactcacaacttttgagtattgatatggtttattgatactgaaatgaatttatattttacattatatggtaatgaacttttcaagatatccttttgtttacatgtaacctccatatattgatggggaaaaaaaatcattttactgctgccttgcttattagctgtttatgtgtgatattccaaacaaaaattagtgataaaattgaacttggctatcacaccaattcctcattatttacccaaccttatgtgaccttcagctttagtatgaatgtgtcatagagacggactgtactgaatttcccaaacgcaatgaatactagttctttgatcttttggcacattgtgcgcttgagactgctctcaggtaatattgtcctgatgtcctctgccacaatttaacttgaccatagctgccatgctgttgcacttaagccactatatgaaggtctctagagaatttcctgaacaggggagtagtatgagaatggtacatcgtcctagctttactttttttattagtgtaatggagagtggagactacaaagtacaaactatagaactcttcagctgaaatccaaatttgaccccaggtgttctatgcttttgtacctaagtcgatgccagtgaaccactagagtgaacatgtccagataatttcctacatgggaatggtttaaaaacggtgtatttactccaaggtttgatgtttttgctatggacgtaccaacagtgccctcttttcttttgcagtattgtgtttgtcattcatactagcgaggaacattttgcagaaacatagaataaactgttactccctccatctacttttgatagtcatatttccaaatctgaaaaatttatttttgataggcatatttcaatccaacaacctatcctcttaatgactttctcggatttaatgcgtgaccctccattcctccacacaagattggctatatgggcattgagaaatgtagatattaatgaatcgcttgtttacaaggaatgactagtagcatgtttaaatggatgataagtagaattacttatccttggtctatgtgccaagatgaaatatgactatcaaaagtagatggagggagtatcttgtatgttccttatagatctaatctatttagctactttatgttgttagttttaaacacgattcctttaaaatgcaatcttcgttgtttgttctcaagtacgtgataaatggttacccaagaattataactgtctgcggagatggagactatctgctggttatcaataaatccgggtatttctgcttggccaggaggaggttccagttcttccatacctccgttgctatctatcatggaatatgcattattatacatcacttgtgtatgccactcaaaatgctatcccaactgttcccaaggttgattgaatgaaccatgctaaacttaacacttaacaatctgaatggaaaacagattattgatgtgccatatttaagttccatggagtctaaaaatattattgtatatactagtaattattctaactactgctttgattaggaggcactactgattctttcaacagagtagcataaccattacggagtaccagagattgcaaagtcaaaattacagtagtaatttggagaatacaacttgttattactatcacttattctttaagtggcaatgctaaaacgataggtcgcatgtgggcaatagtaataacagaaagcagaatcgaagaaagagtaatctgaattcaaaaaaaatgttagaggaattaggcacgaaccaaagtaacgccgctcgttggcttgctttgcacgctcaagcatcttgtcgagatcctccttgagcttctcatcccacttcaccagctggttgacgaacaccgcacccaggcccattcccaccacatgctcccagggatctaaaaatacataaatcgtagcatcaagaaccctcttcaataaaaagaggctgccattttgatggtatctccctcaaatcaagtgaaatgggcaaatccatagcatcataaaactgtactaaagctaaaagataaccaacattgtagagctcacaaaacctaaaaaagtcaagaaccgcatcacatctagaacacctaagaacacgcggagagacggagccccccaacccgaccaagatacacgcgtctccggcagaaacaagtacagatcggacggaatcagcaaccagcaacacgtacagaatggcaggacgcgacgcgaggacagatcgagagagagagagagagggggggggaagagaggaggagggggggggggttacgtatcgaccgtacggcgcatgtaggggagcttgcggagggcgttggagtacatctgggtgccgaggcccaggagggcgccgatgatcgtcggcgtcgccggcatcttcggccgccgcgctctcgatttctcctctttctcgaggcggcgtggggggaaggagaggggagacgaagacgagatgggtgggaggagtggacggcgaggtctcggagaggctcttgggagtggtggtttgctgccactgtggtgtggggcccacgagtcagcggagattgagaaagaaaagcccatgggccgaaatactccatggactggtaccggatctcaggccatggggcatttgccatggctgaagcccatgggtttcttcctcttttttttttccaccttgtgtaaattgaaaaaaaaagtcacaagaaaaaatggaccaaaataatggtgaaaccttttttttatttgtttcctcattttgtggttgattattttattagatatattattaatcctttgtaaaaacatttgtatgtgcttgattttttttcattaccttattttaatcaaatgggcagatctcctgtgttcgagttttcatatttagttgatatcgtacatatatttgtatgatccatggctccatgctaagatttttagatatttgagcatagtataccggccagcattttttcatgtttataggctctgcaacactgtcatcctagcttgctgccaacctcactcatggctccaacagtccaagggcacatgcataccgtggtctggttgcggcttcattgctattcccaggttttacaattagcaaaatttcgtgatttctaggcgccccggaatcatgtttcgaatggtttttgagaaattcaaatttaaaacagtaattcaactgagattggtcaaaatttctcagttttcgacatcttgctgggtcgaaattcaacaccccagcggtattgtgaaccaaacctagtctattgcatcttcagtctcctaataatcccaaaggttgtcagtgaactatagctcagccagcgcataaaacagtcttcaagtcatacttttaaactctagcaattagtacactgcatatagtacattttttatattgcagatttggcttgaagctcttcttcctgctcctcatcactgcagttgctgaaaactatcttctttcctgcaagacaatgacgaatactgttattgtccttatgaaactacgcatcaaatcgatgtttgttcttcagttcattctaaatggtttgtcctcttcatgaaattagtggcatgtgcttgtgttttacttttgggacaattgcttatttgaccccgttttgaaccctaactaccaatttgaccctacttttcagagtttgcttatttgaccctccttttcaaaaacgaagcccccgtatgaccctgttctgttaagggcatctaacggtgttaactgaagcatagaatatctcttttgcccttactcatttgaccctattacatgtaggacccacccgtcagttctctcttctcctctcctcgtctcctctcttctctcttttcttctcttctcttctccacggatcggcgagagggagagcaggcgccgatggggcggcgacttgcggcggcggcattgttagggcggcggcggcggcgctctgaggaggcggagggaggaggcggcagcggcggctgacgaaggggcgagttacggtggcagcgcacggagggggcgagcagccgcgccggctcgtggagggaggaaggaagcggcggcagctaggggcgcggaatgaaggaggtggaggcggcggcgccggcgcctgcgcaggcgggtggaaggagggagaatgcggcg

SEQ ID NO: 22785 - DNA, 11936 bp, Oryza sativa
cccggatccgctgaccgcagctcgagctccaccgctcggactcgccgctgccactccttgtcgtcgtcgtcgtcagcagggccggtgccagctcgccgtctcgccattcactgcctctcctgtggtggatccgtggaggagaggagaagaactcgccgccgccactcctcgtcgtcgtcgtgaccaaggccggcgccggctcgccgtctccgccgccccatcagcgcagccgccgccccattagagcaccagcaccgccgcaaggagagagagaaagtgtgtagagagagaaatgtggatagggttgagggtggatggatagggtttcctaagggtattatgggtattatgaataatagttgcatttctttttttattttaaatcaaaacttaacggactagcggaaacagggtcaaacgggagcttcgtttttgaaaaggagggtcaaataagcaaactctgaaaagtagggtcaaattggtagttaggatctaaaacggggtcaaataagcaatagcccctttacttttacctgtaccaggcccatcaggagagatatggcctgaccagaatttcctgcccctaaaacattcagacacacacaacttgtggcctccaagttcagatccattcagcctaagtgcttctgaatagtgataccagctttcgcactttaggtatgctttcctgccaaaaaaacacagataattggggagacactgatgacataggtcaaagattagaatatttattagagactatcaaagtagcaacaatgaaagtgcaggaacttaaacaagagctattggaatcaaactaattaacaaccattactttgcaggttgcatgccataaaaatagtattcactatgttctttttttttatttgttgacagagtagaacaggtttcatcaatattttttttagaaaagtctatactgactaactttttcttactaaattcttactaccattgagatgactgttagtacaaatttagtacgtgtagcagtgctctatttttttctgattatatattgataaagaatagtaaaagtatagctacatggaagcatttgtcacggcgaatctgcaaatgtaaaatcttgatatttttgcacatattacgttgagatttcaaggtcttaatgcatgagaatagagggaatgtgaattaaaacaacacgtatcactattcactaccggagaccggaaggctcccgtgtgctcaaaacctacggtaacaggccaaaaacacacggtaacaacgttaccgggtaccggaaggttcccgtgtgctcaaaacctatggtaacaggccaaaaacacacggtaacgacgttaccgggtgctagtgcacgggaacagatactcggcggcttcatcagtttaccatgcgcacttcccgggtgttttacgattatgcgcacgggaaggccaaaacacatactgtgtgtgctgaatcacacggtaaggctgccgtcgtagctggactcttgtgtgtaacggagctcctaacggaatggtggcttaccgagtgtccttcacacacggtaacatttggtgtgttaccgtgattcattcacacccggtaacatgtggtgcgttaccgtgtttgaagcacccggtaagagaacatgtgttaataaaaaaaaatatatgctatttgcaatttgtttactatatccatcagagcttatttccatcacaatataaaccaccaacaagcacacaagagcacaacacattccaacataaatatatatttcagtaaagaggttacaattaataattagcatacaagcaattcaattcatggttcatgtcagttaaagcaatagccaaagttacaatagctaggaacatattatttggttgatgcaaggggggtggcggcggttcggtggagaaccagagtgggtcagaggtggcttgctagggttgaagtgttctatatatagccatatctgttgatgaatataagccgtccgatttaaatccattcgaccatagtttacaagcagttttgcttggaaaaataatactattcacacgatttctgtactaatccctttaatgagaacttaaatattcaaattatatataattgttattaaaaacttagtttgtttgcaattgttccaaacaatatcatgtgtttgtatattaacagagtggggaataacactacttgtttatgtgcaccgcttgaagtcacaccgagaacaacacacaggtgggaaatcctaattataacctactcaattaatctcatccaaaacgatatgtggttttgtgttcgtatttatactcatctatgtccctatccaagtagaacatgggaatcaagccaggatatggttcatctagttctgttggtcttgactagctagtgcgatcacaactgacgttgcctttctatttaaaagataataatacctttcttgcacttttaaccatcctgctctcttctcaatcatttgagccatattgggtactgtgacatcctagcccaattaggatttggcctgtgtggctcctgtgagttgtgtgcgcatgtttagtaccaccttactagtttagcatgagttgaaccaatttataagacatcttccctctaaccatgccactcccgggttaacccttttacacgaagcgatgacgaaagtataagtgaagtggtgtgtgtaagtgggtccgcccgtcggatgggctaggctacgcagttctgaagggacggctgttataggtacattatctcctacttgtctatgaactcttgatggcgacaatgacaagcggtgatggaccgcaacgatgacctagctagggttttcgagtttttttttgaatttttatttttgcgtccatccacacacaaaaatctgattttggcatgctggtgcgccacccatgtggaaagcgattttcacatacacttttgggcaaatggacggctcaaccacacgaaaaaaaggttttggaatatatggaaaatgccttttagtagtgcgtaagattaaccaatccaaaataaaaatattggttaaaaggatgatccaaagagaaaacatcggtaataaaagttagcgtaaagtgaaattcaatctaataataataaatcaaaattagttgtattatgtgaattttatcgtctactatattgggagtgtctagattgtagcacacgtcatgccaaatttattttcactattttcctcattttctatacttttacaacttttatgtgttttttagattttataatattttcctgcaattttcagttatccgtaaaaatattgtgtacagtgagttgtgaattatagataccctattattgcgagttgtattgtctactactctactatctttgagagtgtcgatataaataattttcccttacattttacaattttcatgcattttttatactttttaaacttttcttttaatttgaaattgttagacattcccgtatgtcaaaacgaaaaaataggcgggaggattccgctccgttgccgccaacaaaatcatagtgcgcgccaacaaaattcaaagttcgtgccaacggagtgaaaaccgaagtatggaattcagtcatgttaccgtgctccaggtggtcccacacggtaactttcctgttaccgagtgtttcgtggtagcgcacggtattgttgggacgttaccgtgttcctagtcctacacccggtaagttactgggtgttttgttaaacccacggtagcatctggttgcacacgggagctttcccagctccagtagtgattcataactcacaagctacagatgcatgcatgacagcagatgtttaatttacaaacaactacaattgaaatttgcctacaatttgagaggaggaattcagctaaactgaccctatgcttgatcccatagaattcgttagaatgataacccgttcttcatcagaggtaaagtgatctgcgagtatggttctgatctgggaaaaacaaaattaagctaaatgtaaataaaaatgtcaagggctagtaataaattatgtacaagataaaagtgcacctccaacaggaggagatgaatcaaaaccttcaaccaaaagggcacaatttaaatctccaggtatctccaagatatatgatgtatctctaagcaaattgcagataggggacgaattcacagagagaaaaaacacatcagatacctgcaaggttgacaaagcacaagtatttgcacgcgcatgcacagtgcttatatagagaaagggaggggggtgggacttgggggatgtcctctgccattactacacatgcagttgttccattgacatgtagagccatagtaaaacaggatccacgtgtcaatgactcaactgtatctgtagtaatagcagaggattttcttctcgggaatggttcctaaggagtcaatccccttttaagaacatatgtgtcattgtcgaagaatgaaaccttgagttggccacatgcatgacagcttacgtttagcaagtttataaagagcctacaagattgatgtaaagtcttatatagaaatcaattaatatatgggtaaatttgctagaaatcggggtctaaagatttcatgaaaccacaccatcagaattcatgtggccataatacttatggttatgtgcaacttgaatcaaaatatatgaagttttgtggaatttattcattaattatccattgccatcgtgcgaaacaatgatcaacaacttgatattgccaactttatgtgttgaaaaatcacaaataacaacaatcagatatcataagctagtttacctcagtggcagctctgtgtgacttgaaatcgacaatcaaaagacatcggaatatattgtgaaatataccaacaatagcagcaccaccatcttgaaagatgcagtccctacggaagcagccaacccatgaaaaatcgagagtaaaatgtgcgagattttcatgtgcacttttgagagaaaaaaattacctcaactgtatgctgatactgctaccaaagttccaaattataattgtggccacttgtggtacctcccaatgagttgtggctacaagatgaggggcctttgattctccgtcgaaaatggagagattagcaattccataagattaatagaacccttcaattgggaattaattgaaaccgaacagttattagtgtgtggtaggcttcatcatcgtacgtcgtcgatgatctgctcaccttctttggcggcggcggcggcggctcgtggtggccatggagccgtagccagcgacgagtaaaaggtacgcgagaccagctggaggcaggccccagtcgggcatggccggaggaggcggaggatgtggtggcgtagaaagcagcggagggacgcacgagcctcccgttcctgacgcacgtccccaccggcgtctccacgaaccggaaggtgcgacggaccgcatgcttccaacggcgacggctcgatcgatcgccgctgccaacgagacgaagcggtcgatgtggagtggagatattaaaccctagtccaaacgggctgatacgtagtacgggttgtgttagctagacgactgaatttagtttctctcgttttaagtggtgtactacatgtttcaattttttctataaagttctataaggtataactatatttctaccatcgcccacgaagaattcaaatcccacacatgtatgcgcagtgtcgccgtgttgggagcttaactataatcaagcaaggtgttaatttttttttattttttttaaattatacggtacaacgcagagactcacaacgcacgcacactcacccctataaacacacgcacgcaaaccctacccctatgagcatctatatgcactggataatgaatagccagttgcaaattacgtgtgtatacatatatatattacaatttttgatgatatttataacttaagtttgagtttacgtgcacaggatatgttctctagttagatagacaaaaatataaggtaaaaaatagataaataaagatatatgatgggattttagtataacaaaatggcacttgaagaatcgacaaagatatatgaatgaaggatttagtataacaaaatagcacttgatatatttcattgtgacttatttcacacgtgcggtgtgcatgggatcgaggaactagttatcaattcataattaacgagataacgactttgaaattaaataacttgtattattcgtagacacatgtccgggagatagcgaaattaatcatgttactgatcagcaaaagaaaccctaatattttgagtaaagcctgtggcttaggcttaggtaggaatactccatgaaatttccaccttggtgtcggtaaaagtgaatcaagaataatttttgaccgaacattgaatatattttgatagtatgtttattttgtgttgaaaatgttgctataattttcatataaactttgtccaagctttaaaaaagtttgacttgaaaaattcaaaatatcttataatataaaacatagagagtagctattgtagaggactatagtgaatagaattaggcagtggcgtagccaggaatttttcgctgggtagtcctactcacaaatacatatcacatagctaaattttcaaacgtcgtaaatcccatatacgagtacaaatttaatgaaaaagtaatataaatgtaacaatattgtcttatatcgtcaatatttgactaacttaacaagcaagctcacacgtgcaaatattacaacataaatattgcaaatataaaagatcttgggcacaaatagaaaatcacaatgccaatatgttagccataaaagtttttagtattatgtcttctttactaacttaattcataaaagatatctcacttgatatatgtgacaaatcaatgattcaataaatcatatattgtttctcctcttggtcatcactagattaaggctaacatacaaaagagcaattccatatcaaccacatgtttacaaatcctacatactacaatagtaccaaatagcaacacattcacattcgttgattcacaaatcaaaaatcacattcacgtattcactgattcacaaatcacaatacaatgatttactcacctaagcatgggattccaaggggtagacggagggaaagcgtcgaggcaaggatcaattagggctaggcagccagggtcctaggctcccagctcctggcaccggcggccggtggcggcgccatgtgaggagccccggcgaccggcgtaggcagcccgcacccaggcagcgtggcgtggggactggtgcctctagcgcttcgccattcggccgctgtagatcgagctagggaagtggcggcggcggcggcggtggcggcggcggcgaggaagcaacggcgcaagcgcgtagcagaggcgacgaggacgagtagagacggcatcgtggtcgtcagatgcctcgactcccagaaggccaaacctagcgcttttttccttctctcttgtgggcttgtttttctgggcttgaatgagaaccaaggtttgtgggcttgtttttctaggcttgaatgagaaccaaggtttgtgggcttttaggggggtgggggtatcctgggccaaaatcggggtagtcccgagcccaccagtaccaccccctgtctacgcccctggaattaggatcaatcttcgcaagttgttcaacaacaaacattttcacatggttttcatatgtaatagagcacataatttgtagcctcgcggcattttgcttggttactcccaagatgcgttttcacacggtttttccctctgtaatagagcacaagctaatcaaaatctatagcctcgcttgaggcattttcgcttggtactccggaaaaatatgtagtacaaaccacatatctagtgaaaacctagaaactatcgttgaatctaaaagtagacgtatgagatttgtccacgttatcaagagtaaagttttactttcatattcaatcacgagttaaattttactctaagtgacatggaccaatatcaggcgtcaattttttatccaacggtagtttccatgtttctactatacatgtggttcgcactacatattttctccggtactcccctactcagtagtgtactcccttagtttcaaagtatttgtccatagttcaccgtgagatcgaagaggcttccccgttcaatctccataactagagaaaaaattttatggcacacaaaatgagaaaccttcttagcacatgattaattaagtattaactattataaatttgaaagtagatttatttgcttttctaaaacacttctatatagaaacttttttaaaataatgcaacatttaacagtttgaaaagcgtgctaacgaaaaatgagaaagttgaaatttggatttgaagttgaacacacatggttaaggagtagaaagttttgcaataactatgtcttaatctacacagttgtacaacgaaagggcttagttgagaacaagaagaaaagccagacatgtatataaaaaagcatattattggcagaaaagctatatttttacttctttccccaacaatcgatacatcaaattggtcttgatgtacatacaaatgctatcaacatacaagaaaaccatatatacaacacgttaaaaatgtaacccttctgctaacaacgtatgatgatctgtcctgcaaatgacccttcacaccaaacctgattctttataagttgtgactggatcacagaaacagtatctgcaaagatacatagagcaaaacagcagaatgagctaggagtgtacttaaatatatacatccaagcttttggacatcgcattgaaatttcaccaaagatcaagaaaccgcagcgcaatcaacaaagcagacaaaacaggtgattcaacgcagagatttcagatcagtagaccgaagagagcgcatggatcttagagagcccgggtcgcgatggggcgctggattcgcgagatcgtcgcagtgaactcggagaggaagggaagggagagaagttcctcatggggtttattgggagatccatgaaaatatttatatggaactgaaagggggaagtacgatctcggtggccccaacggctagcagcgttgcccttgaaaaaaaatattatccgtctatccgtaaccatgttattacaatatgtaaaacgttggttccattcaacgtcatacatcacaagcccattttaactcgttttctttctattgtattttcgtatagtcaaaattatccctacccgtcaaaaatactgacatcggcgaccccctcctacggtgagtcagcgacctcatgcgtctcgatcggttgaggagtgcccaagctgctccaatctccccaagtcctccaccacctcccccccccccccgccccaaaaattttttttttaattttttaagacctttttatgttttagttttattaatagaccattccaaaaaatatgtccaaatctgaaccttttggccacgctagccctagcgtggcagtgctggccagccactcggctggcgtggccaaaaggttcagttcatgaaaatattggaatggtctattaataaaattaaaacataaaaaggtctaaaaataaaaaaaattcccccttcccctaaactagtgagcccaagctgctccttgccaaccttatgagcatcgccgagctccttgtcggtagccttgtaggtgtcacagatgcggatgaacctaatctggcaaaagagcttttagacgaggagggcagagatgccatgtccaccttgtccccttgttgctgcctcgccccctcgcttcccacgcacagccatgtcccgtcacccgccatcgcctcgccctctcaccgcccgtgcatagccatggtctatcgccactgcctcgccctctcactattcgcgccacacacaactgatggcctagagtggaggagggtagaagagaggtggagaaagatggagatgagagaagagatgaggagggtggatgaagaagatagaactaccgggttggttttcatgtgtagattggtattttgatccatccaatatatgtataagaacatatataaaatggcattgatacaatttgagagttattgtaatggcaaagttttaaacaggtgaatagtaattgtttttccaatacaacaaatttgtaatagcatgaatcaaatttcaaaaaaaaaaagtaacagccgctgggtggtgacttgtgcaacttatgatccaatgtagcactagttcacactagtgatatacaaggtgtcaaacaaaagaaccttggagaaatgatagaggattctaattcctcgaggatgtccccttgtctatttttctctcaaatcaatgtaaatggttgtaaaagttctaaaaataatttagcaatgtagagtattgcaacatcaatgcaaatggttgtaaaaattctaaaaataattcagcctcaagttgttgattctatcatcgacatgtgtaaagagtttgatctagccctaagttcttagatgagtcttcagcgcactcttctgcttgttgttgttcatttcctaaagctcttgtgccctccctttctttgattggctaggggtctctttgggacaccttagctccgtgggctcctgttgtaagaagaactatgtatttctcttctcctcaattgcaattggcagagcttctgcctttctcctcgaaaaaaaaaagtatagtaacatctaccactacaccaaaaatcatattcaaatttgctctacatattttttttgaggaaaccggcagcgggagctctgctggaatttgattagagatagaaaaacaagtgcaatatagaccagagcaaacgaaaataaaacacaaatcaaggtggcctaaaagccgatctacgaaggtctatttcctgcttgacaatgtatgccacgtccctctccgatctaacagaactattgaaaatcctattattcctttccaaccaaatattccaccatgttttgaggagagctcctcttgttttcagcttttgttcttcggagccttgacgatcgatttcagtccaccaattggatgttccaactgggggttgggcatttcctcctgccaagtttagccatgagcaaacaaagctccacacttgcctgacgaatgggcatccattgaacaagtgatttgtatccttaaaagcacatgtgcaaagacaacatatccagttgcatggccaatgcctcctgagtaagttctgcgtagtgggagttttctgatggagaactagccatccaaaaaacctagattttggttcagccggcgccttccagagcgaggagaaatttatggaagcaaaagatccttcgaattggaaaagatatgcactcttacttgtgtaaatcccagattcattccacttccatgagatatcatcaggaatagtggagagattaacatcctgtatcaagcttcccaatcggactaactcgtgtatttcctccaccgtgatgatttgccggaaagaggcaatccatttattaccaagcagctcaatttggacctttcatattgagaaacgaaaaaggaaaattcacacataatagtaccaacgctattcatatgttagatttgtttttttttatttctcaatgtgttagatttgtttttttttattttttagctagtgtatgtgtaagttgagttttgactttattttctggagtagagtataaaacactttccctggagaaacaactcaaaacatagctcattgtgtgggttgtacatgtcaaatctgttgtcttttgctgacatgaacaacgccaaaggcaataatattcttatccttcctaaatgacctaataatgacaaacaaatctttagccgcctcatgcttttgatccaatttaagctagaaatcagtcagactccaacgtctaaaac

SEQ ID NO: 22786 - DNA, 14575 bp, Oryza sativa
acaaaactgcagatgtgtagggccagggatttgcatgcttgcaacaagaaaggacatttttaatgacggtgggagaggaagaaaggccgtttaggcagcttaagccacaagactaattttggtttaactagctaattaagctagctgctagctatagatagcagaaagattgggctgctggtacatgcaggggggtgtttcgtgtgttgagacacagtactgttaattggaggacgatcttgggtaagaagagaacaaatggaaaggtgtgggaaaaggtgaagagaaatagaccagctggtttaatcaaggacaagagctacttgccaaggacagataatggaattggaagatgtcaagctaatatatcatttgaaaattgggaaaaaaaattctcggtctgtcgtataatcaactgtttcatatatatataatgaccagcagagggaacatctcagaacactgaaatttaaggccactttcggttaaaaaaataatttgaggcccgatgtaaaacatataatgagaccttatatcctatcttactataaagttatcccccactaactccttaaacttaacatgcaaagatgtcacatcatcatccactaacaagatgccacatcattatccactaattaacaagataccacatcatcatctactaacaatcatcacatttaaacatcatgcaaacatgctatatctttatagtttttataatttaagagcttttcaaatacaaatatgttaaattatcatccaacataattcacataatgtttcaatgtatatctttcttatattttatgatatcatatatacttatatagttcatcctcacttagttagtgcttaaatgattaatctatggtccaaattatctttcttctttttttctctaattaaatcatatcacatcaattgtttttagcctttagattattaatctacggtccaaactatctccctacttttcttcttccataaagtcatatcaccttactttttacgtttgaatcaccattctacatactatttaaatttaaattatcataaaccacattaatttacttaatctaatgttatctagctatcttacacgttattttttttattgttatcatagtaaattcccgcagcaatgtgcgggtttcacctagtttataaaataccaagagcaaaagaataaatcagcggtggctggtggtgctctacctaagttgaaagaagatatttttaaatgaaatttggaaaaagcattatgttatcctgtaatgatttgtttttttattaaacaaaaaaatagaatctttaataccaggaatgcaagttcatatcatcgtcgctctttgaagttgtcatcgttactatcgaacacctatcagaaccaaagaaaacatacccgttatagacaaatcaataaaggagtaagagtaagtcttttaaaaaatagagcaaaaggcctataaacatattggaatgcattggtatggattaaaataaaaaggtttgaggtcatgttcggtcgtccatttcgcactctttgttgacggcccagcaagcagggtctctagttattttagatttaaaacgactcctaatcgatccaatgttaatgtaccattagattattaattatactgctcttaacaaggacactcgtatgatgaatggtaagttctcattgctcttaacaaatccttgatgatttcaacaaaatctgataatgctttcggattttgattatcatatgattttaaaatatatagcacttagttcaaaaaatataaaaaatgcatatgtgttgaaagtactgccgttttctcataaacttattctgatataaaattatgatcaaaatcacagcttaaaaccacgaaaaaaaaatcaaacgtcaagtgtttcttttttttttaccaggtggagaccgtggagtaccttgttagaatcagctcgtggtgcaaggagaagatggcggtgtgctaatgcatgattaatatacatatataatggcaatatgatgagtattgataactctaggtttggtgaaaacttgacacacatgatccggcttccaatcaatatgatccaaaccctgcaatcgtagcaccacatctcctctggttatcaactgtgcactgtccggttgacctcaccgagaaggctaatctctgcatgtgaattgaagaacacaagcaagaacaaaatagattgcaactcaattgcatatgaatgattaagcactcaacttcagagttccacaaaccaaactagcggcgaaactgcaatggcagaaataatctaagcaaaacccaattctaaactatgacggctacttaataaatatggttagggacatcctaatgccctaggatgcacacccccttggacttgcacaattacaaggcacaaggcccgaatcagattcggaccagatgaagtatgtggctcgtttcgtagattcccgatagctcggtagtaatttttacgtgggaccaaaacgatccaaaagaactatatgacttgttttatagattcccaacagctcggtaggaatttttatatgggaccaaaactatcagaaataactgcgtggcttgttttgcagattcccgacagctcggtaggaatttttacatggaaccaaaattatctgaaagaactacgtggcttgttttgaaaattcccgatagcttgataggaatttttacatgggaccaaaaccatctgaaagtagactccataagctttccaacaagtactcataggcccctaaattccttttaaatcaacgactagatccgtttgaagttaatgctattaggaggtctgaatttgaatccaaaacatgcagaacttcatcttgccttgtatgaaccaaaagtgatgtgataacatgggagtatacttggagaaggtcttgtattggtccccaatcaacttcattgatcatccaagcacttcgtgagtccgttcgcttttatttcacccatgcaagtatttttgcaaacgagaaaatacaaaactcatagtgcaataatgtttgttgaaacatataacctgtaaatctcacatagaaaacatgcgccttgggttggtggatatataaagtaaccatggtcatatccgagctagtgatatcctcatcaggatatatactcacataaacaacgtctgcaatgatctctacttagagatatttcatcttttcttatatctatttatacttatcaagtcaattctatgtatttgaattaattaaaagagaatatataattatatatctgcacataaataaatggttataacgtctctacttgttatagattctattgagtagaatgctcccaacaaactaaaccatatcaaaaacagtcccacgggatgcaggaaattaatgttacttaattactatattacgtacacgctaaattgttaagccacatcattggataattaattgttcgtcttatcctgccattagcgtttgatcacatacacgacaaaacaaaatcatgtgcgaatataaaatggtgtgactgcactttatagttaacttgtctttcatcgcctgatcaccaattaggaaaaatcatatactccatatgatatccaattgtgctcgatctgatccaatgacggcagtaaattaacctcaaattgagccataacgtcggtaattactggccttccggaaacatgattagtttggaacgagtcgcaataatccagctagctccggtgactaatatgtagccatcaaagttgaccccggtcaatcataacgtaaatgtttatttcaactattaatgaatataagcaattaatgtagtcttaattatcgtatcaattctgcttcatcatacataggtgatatctcactccttaattatttcagttaaatatctatatatcgccttcaattcatagcattgactcgcacgtcttagacccgtacatatgtatatttagggtaaattccacacaatatatactagtttaatctcttatgtatactacaacaaaaacatgatgtagaggcacttcaacaattcatataagtaacacaaggtacaaacacacataagtaatgacaaaaattttaaattggttccttagtaaattgaaaataaaaatgaatgactacaagaaaaatgctttagacattttttctaattatatagaggtacttttaaagtgcgtttacaatactatagtgatattttcaaaaattaagtgccttatgatgaattatgtctacaaacgaagatgcattttatgaaatgtctctttgtcttgtggtattttaatagaggcaatttttatgtctataaaatggtagaggtattgtttagaaacattaaatcgtatcgcagccatatcaaaccaatgtgaaaaaaataataaaatatgttcccttactattgactatccttaaactgaagatctctcagcaaatcatttatttttaatgcactagacaactcaacttcgttttattacttataggtttgtgcatgtgttacttatatttggtctgttagtatgcattatcaatttatcattataagaagtgtttatatagtttaaaatgacttaagaaaatacctttacatatcagacacattttcaaatgccgaaaaaatacctctacttgataaaatttaacaaaatattctgaaaatgtctctaaagtatctctagaaagttttctaggtaacttttaaagcgcctctaaaaagtgtctctacgctataaaatttataatttagaggtaattaacaaaacatctctataaaaatgtctctgtatgatgtttttttgtagccatgatttcaaggcttcaagcattggcaatagaaaggaaaaatatttgtttttatcttttttcacattggttttatatggttgtggtacaatttaatgcctctagaaaatatctctaatcttttctaaccataaaaaatccctctaataaaatgccaaagacattttataaaatgactctttatttatagagacaattcaccataaggtaattatgaggcatttctaaaaatgcctctacactattgtaaaggcatttgaaaagtgtctctatagcattaagtgactagtgtctctacaaggcatttttgctatactgatagtttattacatcaggaaaaagttcaacacagttaagtcttaacttgattcaaactccaaattaagttgttcatataagagattgatttacaaatatgttctacaacagttgagtccttagtgggttgtacccattatatttctcaatatcaaatttttggattctcccttctaatttactcgagttaatgtgtgcctattaaagaaagagttgacccttctctttcatttattgtctttcacatgggtcatcaaataaaatacgtcatacaattaactctagtaaattaaccaattcctcactttttctcatataaccccctttcccctcccctccttcccgcgttcaccccctctctcacattaatatcagcatcggccctctttattataggccaatttacttattattgttgtacacatccttcgaagatatgaactcatatttcaactcatgcttttctatcagttacttagacgggaactaaattaaccacgctcaaacaatatgcatatgctaggtactgatatataatagcacgaaaactctcgtgttgccctaccccagaggcggctcgggaggcgacgacccggtcgagcagccaacggcaaagccacgcggccgcaaggacggtggcggcagggcttctcgctgacctcacactcgggcagccagggagttgcctagggtggcagtagtggagaccgccagatccgtgtcgcttcggccagatctagaggggtggcggctggcagtagggacggcgttagcaacggtggcgggaaaggcgacgacaacgatagagtctcggcggtagggacggcgacggcagagtctcggcggcggcgggagccttgatggcagcggggatggtgatggtgcgacggtggcggtggcggagaccccggatccggtggcggggcgcctggatcttgcacgcgttgttggattcggcgcccccgtgctggatccggcaggagtcggcacaccaaaggcgctggcagggagaccggtggctgggtgagccagtgacgacgcggtgtgcggatgtggtgtcgacaatgacggagggcggcatagtgcgcgtgcggaggcgcgactagcggaagaggagaccggtgaggcacgaggaggcgcagctggtacggaggccggtgaggcgtggctggttcgtggtcgcggcgcaaagaggcacagggatgctcggccaccggcaatggatgccagcgcgacacgaggagatgcggccggcccagtgggaggcgaggccggcggaggcggaggccgacaaggcgcatgccggtgcagcatgatcaggcacagccggtggtgacatgcagaagctggccagcaggggacgccgatgcagtggtacccatgcgctggcagaggtttagatggtgggagcaatggtgcgtcagctatggataggcaggcaatggacggcaggtgaaaacctagcccagccttggtcgggcctgcaacgatggcgttttgagcatcacttcccctcctgagggcgttatcgtgccgtctcatcccctctagctggtcggcccggtgaaagcctagtctcagttctctttgagaccttgatggctccttggagacgttgtctaggtagccccttgccgaaacctcccaaacaactggcgcaagctcactctagactaacgtcctcttatgtcggcactctagcttctgcaagttggccacatcggagggcctaggggggaaagcagatccattcttctctctaaccccctctccctcaatctcaaagatatggataaagcgggatttcgtgtcggttgtaaggattgggttttgggcgatctcgactgtagttcctttgttggtctagcggcggtcggtcacgtttagcggtggccggttcggtgctagactcctccagggtctgtgtgttggagctgtcagtgtgtgggtggtggtatattttttttcattttcttggttatgacctcccaagattgtaatcttgttttttttctactctattaggcctttcacagtgggcggaacttaccgtggctttgtctcacgtggcaaaaaaaagtgggtggggcccatagctatactcggttctccggttcctagcaaagcaacaaggaactttgctcgggcgcggggcccactcgggcacgggcccacttggtgagcacgcgggcgacgacgactccgcgtcggtggcgactccgcgccgctgtgggaggtcctcggccgccgcccatggcgagtcgccagcgcggctctctactccagtcgccggccgcgtcggccacgccgcccccgatctggtcgaccggagctcgccggccaggagcggcccgcacggggtggagagggagatgcgggcggcccccccagctcagctcagcgcgatgacgacgacaccgccgccgtcctcctctctctgccttctcgtcgccgtcggttggagctacttcgcgtcgacgtcggtggtggccgagccgccgctgccggagaggcgagctccggaggaagatgaagaggagagagcaaaatgttcggcttcgggcatcacggccaccacggccaagaccagccgccccagcacgtcggcggcggcggcgcgcaccagcccaccttcaagatcttctgccgccgaccaacccgcgcgacgagcaccatatccgcgcacgggatgtaggcggcgcccttggccacgccggcatgagcggccctgccgctcctccgcttgccacttgcccaagatcagcccgaggacgccgccgccgccgtcctcccgcgtcgccgccgccgtcgtcctcccgcgccaccaccgccgtcctcctcgctccgcctcctcgtcgccgcctccgggaagagggagagtcgggcgcggcggggacggcgcgcgccgccgcgggcggcggcgacgacgccacgtcggtggcgacgacggcgaccaccaccaccgccgtagtgctcgctgacgacgggggcggaggcggcgagggaacgggcggcggaggaggggagagccggcgctgttgggtgacgagggaggaggaggagcagtttgggatttggtgtcggtgaagatatttgtgggccccacaagtggtgcttgcactgtgaagagagtgtccctatgtgtcatcctgtggtaactcatatggggtgcttgcagtgtgaatggccttatgaacttcatatatataacacacattccctcacaagaatgtaccgctccgaggtgtactcgtatacagtacatagcttgacacaagtttaagattattgaaaaggataattaataaacaccattggaaatgagaatgttggagcatgatattataatagtacagcaagaggatgcatcaccgacagcgtagttcaagagagacatatgtatatcgatcgatcgatcaatctcttgtgtttcaagaatccctgcacagctagcttccctgaaacgctactccctcacacaagttttagcaaagctctggctagctagctgatgcgtgattaattagtgtgtgtagattttacaattaacagtgatcgtttggtactatctccagccagctagctagctaaagtatgtcaaagattcaagaaaaactaagatcccctggctgagtgcaaacgacgccatcatcaatatgataacccttttatatagctaattaatgaatatattattctctacctgatctcgctgttaatttgatcatcccgtaattatatattctgcttaactatttgttgtcgaaagtacccctccgtaaaaaaaataatactctctccatcccaaaatataaggcgcctatgcatttcaagatttcaccttcaaagcattttgactaacatttagtacattataaatttaattttacttgctaaaaattatatcattggattgacatttgaatttcctttcatatggttataattttgttattacaaaccttataatatatgagaaattataagatagtagtaaagattagtcttgtagaccgtgtcaagtttgaccatgctttatattataggatagaggaagtatctattatagtatccagaagataaattagtatggaaaaaacttcgatgccgcttattaaatgagtggtcgttgtgagcgacaaggtgatttatggtaagatgaggaaaaattaaatttaatttcagtgacgggtggttggagaaaaaaatagtactataaacttaaatgcaacaactgtattttttaaggtcgagattgtaatcgatttcattatttctccgctcaaagaattactagtcatcagggtctgaaaataaaatagtaaccgcgcaataaccatgttcaccggcatattgagtcttcacgaatcgagaaatcaaaaaaaaaagtgagatccaaaattttcaacaaaaagttgtttgaatttcacccattttcatcagtaatcgagattgaacggtaaatttgacaaatctaaacgatttgtcaaacccctgctgtggtacttaccgtcctagtaaatcaaatcaaattaaccgcgccctttttggcagtagaggacaaggaactttatttggagtatattggtcgtttcttcctttcacacccacacacagacacagtacgtgacgagacgacggggggcatagtcgtcattgtcaatgtcaaatggtgcaacgcagaggcaagcagcgtgtgtgcgcctcttgccctttgtgtgtgggtgagtgactcagccagccgagccaccggaggctttacatacacactcactgttggggttggagaggagaggagaggtggggaaagagagagaggggggggagactactcgtcggctaggtcaggaggcggccggcgaccatggggcaccactgctgcagcaagcagaaggtgaagcgagggctgtggtcgccggaggaggacgagaagctcgtccggtacatctccgagcacggccacagctgctggagctccgtccccaagcacgccggtatgtcgtacgtcgtccccctcgccgtcgccggagctggagttgtgtagtaatactccggcgatctatccatttctctccggccaatctgattgattcttggttcttggattgattggatcacagggttgcagcggtgcggcaagagctgccggctccggtggatcaactacctccggcccgacctcaagcgcggcaccttctccgagcaggaggagcgcaccatcatcgacgtccaccgcatcctcggcaaccggtaggtcctccccgggctccatcgctgccgtctcctctattaattaataggtgtcgatacctacaaaaattagtcgatcgtcggaaaacgttattggttcgttcggcttggcgacaccactggctccgtcactgttcttgggccatgcgtatggcgcatggctctgctttgctttgcttttttggattgaactggttggtgcatggagctcagaacgattcccgtgtgtctcaggtgggcgcagatcgccaagcacctgccagggcgcacggacaacgaggtgaagaatttctggaactcgtgcatcaagaagaagctcatcgcgcaggggctcgaccccaagacgcacaacctcctgccggcgtcgaagacgctcctccatggcggtggcggtggcggcgctgcaaaccctagcggcaacggcctcgcgcagttccagtctaacaacggcgcggcggcggcgggcaccacgccgttcaccatcagctctccggccaaggcggccgcctacgatgtcgcgccgccggcgttgtacgacgtcgtcctccctgctaaccccgccggtggaatgctgatggcgcatgatcaccaccatcatcaccaggtcgccgcggcggcggcgccggtgggatacccctacgccgaccacggcggcaacggcggaggcgtgctgatgagcttcagggatcagaacgccggcgtccacggcgccgcctccatggacttcatgaacggctcctcctcgtcctcttccatggagcagctcggcggcggcggcggcatgtcgtcgaacggcaacggcagcttcagcgcgagcatggcggcgttcatggacgaggaggcggcaatgtgggccaccgccgtcgcgccgccgggcatgggcggcctcgccgggatggatcaggtggcgcagcagcagcagcagcagcaagtgctggtgcaggatgcggccgtgggcgttgcgccgacgacgctgatgatgcacggcggcggcgccgccaccgccggtgcaatggtggtggacaagagcgtggagatggtggacgtctcgtcggcggtgtacggcggcgcgacggcgacggcgttcgatctagacctgatggtggagtcgtgcgggatgttctgcggcggcggcggcgccggcaacgccatggagcagctgcagtgggactgctaagcccatttatcctctcacccctaattagttccttaatttcccatgcttaaattcgatgcgttttttatccccttagtttccattttgatgttcaattccatgtgttcttgattcagaatgtttcagagatcgtcctttcaggcaagaaatgcaatgctaagatgagtgataagacaaacttatctaatttagacatctcaaaaaagttgtgtcaaatttctttttttgcatgtcataaagcatttgtggatatacatacatgacattaatttcttgtagtctagctcccaacatattaatcaagatgatggtcattcatgaatctttttgatatatagatatatgatcaacccttcttgattacatcttaactctgttgcatcattttcatgcatataatccagtcaactcgtttagtcatgagatgagagcaacaagtcagttattgttttcttcctagtgtgtgtgatgtgagagcaacagctcagttattgtttcttgctagctacagcactgacattacatacgttttcaacccttttagtgcaagaaaagtttgtttcagttttgtcaatttatgcataagcatacaagtttctccaacaaacactgcacctatgcatgcatgcttgagtgaacctttaattcatctccaacatgtacatatcttacaaaggataaccattgcactgcataagaaaaataaaaggtcatcaaccattctctccaacaaacacacagtgcatgatcttgcaacgtcttcaatttgtctctgtccatacattttggaaactgaagggaaaacaaattaaagctagctctcatagttccatgtacacgtgtacatatatctactggcaaggtataactcatctgagtcatatatatacttcatgatgattgatggagattgtttccaatttgtcagctactatcgaataataattaatgtgcacataatgtgaaacattggtatatgttagacgtaaataacttattaattagcctacaactcaatgacacaagcatagtaattgcatgctaatgctactctccttttttagtatttttgtttagattttgtcttgaaatacctgcatttaattgtgaaacaatatagatatatcaagacataaatactgtggcatgccgcatgcatttcctatttatatataaactacatgcacacttctgtgtttttaaatacatatatagcacacatcaattaattaattgtgatcttgaataaaaaggtcgatgctacaataactagcaagtgcattttacatatcacactaatttgggcatatatagaaagatatatgattctgtagccaaaagaaagttgtttataaacataaaattatatacttttttaaaaatatatatgtatcatgcatgaatacacattaataatagctactggattgtttccactcacctgggatgagatgtacgtcttgggcaaatttttgtgcaaatagacatgtgttcgattatacatatatagaaaactactatatatagttaattaactagttaacatagtcatgctggaatatattaatatagtaactaagttgcatctgtcttcctaaatatgaatagctagctagatgcttaatcgacctggccgacccagagattggatatatatgatttagtgcatgtcagtatacttatatttgaatggctatatattaattaatggtgtaattctaagtgcaatatggttatgtgtcagctgacccaacatctattttgtcctgaatcgcttggtgaattttaatacatttatggagaccaaacacatggaagttttcttatttaatttgcatgcaagctattattaaattatcaacctagtcaactttgtgaaaacaggatatattttgttgcattgcatacatatatattatagttactgtaaaattttatgtgaatataatatataggtcacttagagagtagctagtatgtttggccacataggcgtgtgcaatgtctggttagttcttgctaatacatgccaagctatttctgttaagaacttcaaaagctatgaggatctttaatccaaagaaaataaggtataaccagacttatatagattctttcacgctactaaaaagaatgtatcatgtcaaaaggattttcctagtgttctcaagtccatgtggttgaacttgatgttcaaaaggaaaaaaagaaatgtgaaagatcttataagcaaaattacaagtagcatatatatagagaggacagcaatttaatgcatgcaaccgttatttttgtcaattcatttatcacaagtcaatgtgctttctagccttttattatcattcattttttgttgtgttatgttaattaattgttgaaattatatactcacattagccacacaaattgtgctatgagtaaaaaacttgccatgtggatgcatttaagtacaacaacttcaaaattgagcatttgcattcgacaacttgagatgtgtatttgaaggtcacaacttgataattgagcatttcggtgttgtgacttggctaggtgggtgcgttcttaaaggagttgacgtatgtggtttttttgccacatcactcatgccttcatgggaaaaatatcatgtgtggcgactcctttgaccaaaaacgcatctacctaggcaagttattgcacttatatgcttaatttttaagttgttgcactcacccacctgctacgttattgtacttaaatgctctactttcatgttgttgtactcacctatctagttctggccggtacgggtttagcaatttaattactttatgttagagtatatgaataggactctagtattcgtttgtgacactggaaaggatttgtttccatctatatctctagttttacttgagattgaagtcatgtacttctctctctctctctctatacacacacacacacacacacaccattaatcttctctttctatactattcaacactctaggaattgat

SEQ ID NO: 22787 - DNA, 1918 bp, Oryza sativa
tttcacatttacaatcttccaataaataatgcaactgcgttggttgcaaataatagccatggtcacagccacgtatagtttagcttcgagaaggtttaaaaggctttctattcgaggtaacacactttcaagaaagctcatgtgcttttcccgtagaggtcaattgaacctatctgaaaccttggattgccattagattctctcactcgcagaaaccgaaacctgtcaaacgcatataaaacattgttagccaaaagggagaaaattcagcaatcactaccagcagatagatattgaacataccgaaaagcatttgctttatatctcttgtccacagtaaatgttttcctatagaaacgactgtcgaaaattacagaactccgggcgtctattgtattccaggtggagcctccatcagtgctcccttcaagaaccctgtgacacaattgcttgtggctcatggaatatcatcgctttaaagaagattcaaagaaagcaaagctagtgccatatctatcatcaacttcaattgatgtttgccaaaaacttgtgtctcgtaagttttaacagctttatgccttttaaaatcttagaactaatcataagtcgtagcactttattccttagaacttctcaaaattctgttaacaattaacaccatttttccccacaaaaaaacgattaacaccattttacagtattaaaaacaaaaactatagagtgcaaggaaatatgtcaaaacagaaagatttccaaacttttcctggaggagcataagagaaggccaaacatttgtacaggttctctacagttgctggtataagagctgggtcctgcgataagtatgtctgcttgagtggatcaaaagataatggtctagcctaaaaaagtagcgccatgtcaaaacaccggcattgcaaaagcccaacagctaatctaacattttgtattgcaacaaacaatggtaaccaagacatttgcaggtcccactagagccgactacccaccaaaacaaagttcaattgccaaataacaacaatttagcttgtaatccagatttattttaatattatattttgtcgcccataattctcttaaattgacatatcttgttgcatacttcatgttactaggattttggcactgtaatggttgcttatcaacggtgttatgtgtgtaaaaaggtatgtaaggaaacaaagttgctataccagtccattggatccctctctggaacatcattagctgacatcaaatcatatgaatccaactcgcaagtttggccatcaagcatcttgtaaattatccaacatcctgaaaaatgactatgttagataatataatgggaacagtgaaaatttatgtttataactatttgaaacacatgttcttttaaacagcatgaaaatactgactggacactaatacctttttttttcctttagagaatactcaggagaactctattacttgtattaagacagaaaaaggagaaaagctccactcaacgacagatgtttacaggggagcgctcatgaaagacttcatgacctagagagcacgaaattctaacccacgccaaaaattggtgaacagcttaaatttcaatgtgcatattggcaatcagacaggaccagaagcatatgaactactcatatagaaaatgaaattctgcagcaattatagaacaaaccctgcaattctaactggatcatcataaactcaaaaatttaagttccaatctagcaaatcaaaggtagatagattcatctggagaagaaatgagatgaaagtaatatcaatgacatttattcacaattattacaccaacagccaaataaaaggattcaactatatgataaagcatgggcaccatcattttcatcaaagttgggatatcgacagggcacaaactaat

SEQ ID NO: 22788 - DNA, 2483 bp, Oryza sativa
actagtggatcccccataggcgtgacagaataccaaattagaagcagtgggtatattcactaacctcccatacaagtttgaaaaacactctgtccacacatgatcagtgaaatccagaatctataaattaaattactcaggtaagcaaagttacagtatattgacaatgctagaataaactttagtgcactcgttcttcttccaaatggaactgtttgtgaacattgaaatagaaaaggagtgttatattgcattacacaagagcaaagaccagtcatcagtaattagtggcaacataaatttaggcatactaaggctctgtttgctattagagtggatcatggtaaccttgtttggtataactgttttaagatgttttggtatgaatcatgtgaataacaatctgcatatgaatcaaatttctgcataattcagctgacatcgaacatacagataattgtgcaatagttaaacaatcgcatccacatatttttataggatccaattgtgaattcaagtatcacagaaacaagttttgcatgggaaaaacctaattcatatttgcgcccaatgaaattcgataatcagacaatgcagataatgcataattctttatcagttttgggtttgaccactaaattgggcattaagggtgaaggtaacaggcaaggaaagagacttccaagatgttaagggtgaaagtaacagacggtcagacaggaaaaccaaaagtatactgacaagtggacgaatggagagccgcttacaattataagcaaattgtatatcattgtggataaaacaaatttatgaatattatggaactaaccagacgagcttcatatccaaaacttcgacagtagaatgtaaagcaattggcccattctccacagcgtcctttcctagtttctagaagcttccaaagcaataaatattggaacagacaatttgaccatcaatttcagtttggttgaaaaataacaccttatctcacacaataacaggacttattcataccttatatggatcattatatcttggaaaacgggtggtactagaacaatagttgcacctaaacatagacatactcagtatatgcaaataagaaaatgaaaatgatcataaagcatcaggcataagggctgagccctgacgggtaaaagattaagaagtgcatttggtctctgttccagtgtcatcaacttattggtgagacaacttagaacagagggataccttagaatattatgaccctggtgttgtatttcacctatctctaactggcataacatagatgtaacagctaggaaatgagcatagcccgattcagcagttatacacaatgctgctaggactaacctgtctaaccagtactacaaaataccatgatacgacacaataccatgaatcattcaaattccaatgctcagtgggatctttttcaggtaacaccatagaatttatgactttgtttactttccttacttcatgaaaagtgtgcaaatctttgcacattccctaaaaaaatcttcagagtcatgactttctaactaaaacctatcatcactgtattatcctgatcttgttgacaaacacacaaaaaaaatcctgcctagaccatgatagtgacagcatttgctgctcagacagagatgtcacaaagaagtgcaccttagatttgccttaagctggaggtacagttgcagggtaaagaacagattagaatgatagttgacaactgttgcatttgaagcatatggaaacaaaccttattgacaccttaacatcatgtatgtgggagttcaaaaataaaatagtgctccctccatcactaaatataagccgtattagcttttacacggtctccacattttactttgatcattcataatatattatcaacaactacgaaattaacgatgaaggtactttcaaatacaaatctaatgatatcacatgtgtgacaccaaacatatatatagttagcttaactattagtcaaaaattacaaatgttgatttttcctcaaaatatggacaccttgtattttggatagagggagtacatgcaactaagcttcaggtacaaatgattcttctatttagaattgatgtaaaagatgaagatgtaagaacaattgattgacatctagagactgctacctatagatctcgacgcgattggcaccaaatttaatttctgagggaagtgcggtgcccattccaacattgaatgtttcacggccacagctgtcgcagggtggtgcattgacccatctgcaaacaaaagcatcatcatcacaagatgagcacatatgagttccatcgtaggtctttctatgaaaagtacagtgttctgtaagcatcatgaaagtatatcaacccaaaatgtaaaccaccagtaaatcacaggcaatcccataatttgagctcaaagttatcactagaattgacacctttgttccaaatcaatgaacttgaaaa

SEQ ID NO: 22789 - DNA, 6581 bp, Oryza sativa
gtgctgcctcttgacgcattggatcctcgtactgcattcaaaagtgtcaacaaacaaggattatatattaaatataaatgcaatcatcacaaatatagctttgtatatgaaatacattctaagaccataccatcagaacctggtgcatgtatggctcaactctttctctgaattcctcccctccatcattgcgtatgctgtactgttgtagaagaagtgcctcttcttccgcctaagatttgttaaggaaataagcatagttctgatgagaatgataatttggagtccctactttttccctggatagaatatttaaactaacgattacttcatttcattgtcatgctaggttatgctttgtgggcactgtttagtccatacttataatccatgggtgcgagatgaggcaattctgagcaacacctatgacatttttactaagtaaaatactatacagatatgaattttcagtcagctccagttactccactaaacaataagaagcctattcaaatacccctcatgtatattgcaattgcaaacaaagcatgaacagactgaataaacagttcatgtgtagtctactcacaaaatgcatatagaaaaaaaatagtggaagtagccgtctagccgactcatgcagttgcatgacttgatgatgaccagttccatctaattagataattcatgtactctcacctcagctaacaaggccatcaaaataaatgaatatgatctacaatgagcttgagtcctagattcagacacagaatatgttgcatagtatacatgtctagctgaagaactgaaatcaatctgatcagccaactgagaaaagtcataaagatccaccaaatcagatgagaaccaaactatattgacgggttcttttacacaacatttgcctgcctcccagaacattgaagcaaagactggaaccaagaaaactaaactccattctattgcaagctaaaattcagataacacatagtatccactcaatgacaggtaaaatgagttcaatgtggtattcagctatccaccaactaaaatatctggacaagaaactgcattgtatgctgtattgcagctcagtttacatttgttccaatttgataccaaataaaccaaatcaaacccatgaaacatgagccacctcaaactaaggaaaggcctaaaaatcgaacaaaatgaagttagactgcacctgaactgaactaacccctgctcataaaaagttcccattcaaaccaagacaatgtccaaccagtggtaacagcataagctatccaaactgtaatgtggaatgcttcacgaaattggcatgtagatcattcaactcacttctcaatcaaataacaaagctcaaaggttccattgaagaacctatagaacgcaagttattcaggcaccttaattgaattcagatatttcacacctgcttcaaacctcagctgatgaactaaactggaaccaaagggaactttgatgtataaatcatgtgaagcgactctgaataccattaataactgtgaaacccaagcaacagcgaagccctaattgtgatcaatttcaagctaaataccctactagcccaacaaaagtaagtaaccccaacagtcactagcaaatccaacatcatcacatagtatgtccaacttaaccaagcaaaataaaaggatgtctaagctatctactcgattccaaatgcacaaagctcagctctcagttatttcaattaatcatgtcacacctgaagcatccttgcaaactcctcgtcagacttctcctgcaccctggctgcctctgccgcagcgatgtcctccccatccccctcactgatggccacaacgcggagaccctcacagatggactccatgtcggttccaccgtccacccttgatccatccgcctccaccacgatctgcacacgccacagcattgcatcacaccagatgatgagcaatgcaaagcagtgcactcggtgctcagatcaaagcaaagtggttgaggccgcaatctgaacctcaggcaaaccgaaaccaaatagaatcatgatgtccaaatcacactaagcagttataaataccgacatagccgtatcattccggccacaatgcagccaaacggcaacccgttctgatcaaaatgcagcttgatttaacacccacttcctccaatttccaaccataaacttatcaaaccaaacaaaatcaagtgacagctacagtcacacactacaacatcgtaaatccatccaacttaaaattaatttccacgctgtcccggaccaactaccacacgtctacgcaagttccgattcgcacagacacagagccatcagctagaggggacatcaatttaacttcggcgcacctgaatcatccgcgcgagctcctcatccgacttctcttgcgcccttgccgcctccgccgcagccgcagcctcagcctcctcctcctccccggtgatggccacgaggcggaggccctcggagatggcctccaggtcggtcccgtcgtccaccacggacccgtccgcctccaccacgatctgcacacacacacacacacacacacacagacacgccgaaatcgatcagagcagaggccagccaaccaaccggaacacccgcggggacggtggtcggtggaggctgtcccgtgcagggcgcggcgcggcgggggggaaactaagtcagtcagtcgcgaaccttctggagctcgggcgggacggaggtgagggagaagatctggaggcggaggatgtcgaggccgtgctccgtgtcgtactccacctcgtgctcctccgcctcgccgcctccgccgccgccgcccccctgccgcacgacgaaccggcgggccaccatcgcgcgcgcgcgcgcgggctctctccgtctcctccactccgcggcgcgtactagcggatacttggtcgcgcgaatgagtccaccaccacccctctctgttagttggagacttggaggggaggaatcgcgtgtggggggtgggaaggcacggcagcattggttccgggcgtttcagagttgttgcagtgctcacgccaacgtgtagcagtggttgatgagatgacttgcgatcagggttgacctgacttgtgccctcttctgtgggattgggatcctctctgccttcagcccctaagggcactatcaatgcgccactcaatttgctgcgcctggtctgctaaataggctgataaaccttagaagacatactatacataatgcaatgtggcctaaaattaggttagggtgtgtttagttcctgaaaaaaagttagaagttcgaagaaagttgggagtttagaaaaaaaattgaaaatttatgtgtgtagggaagtttttgatgtgatatgatgttatggaaagttaggaatagggagaaactagacacggccttagtaaagtctgaagacacaaatagaggctacttggtccacagtgggcaagaacacgatcgagtcccaagtgacgagcttcttctggttgacgaacgtgcttctccggcgactccgaggtgtcgctgccaccgcccgagcaggcaaagctcatctaagaactcttcggactcccgttcggcaaagaactgtaccccttccatgcagtagagcacaaacgtcggaagcgcgcgcggcccccgtcgctgtggcgagctccgccgcggcctcgccgccgttggcatgctcggcttggccctgtgcgaagtagtacacgcgggagtgcgccaccaacatccacaccatcccgcccgcgcaggcatgccacacaaaatcaaaccttttccacccaatcaaatgcaatcaccacaaaagacacgaacaaaccagaactaaatcgaatcatcaaaaagcaacagaggaaacgatacctcatggcttcctccttcgactggcacatatcaagaaccggtgcgcgtgggaagaggaaaaggaaactagcgcgcacggaaggagcgggaggggtgagggcaagcgcggaggaacgagaccaaaaccactcgcgctctccttgccccacgtgccttcgtcgtcgccgaagaacggggagccttctttggacgtgcgtgcttggttttggtgggctcgattaacaacgtggcatcaaaattcctctctgcgtcgacgtgggatggtgaggctgaatgccatctcaccgcattgtgaaggacctaaaggtagaggcgcacagtgctgtgcctttgggctatttttaaccgtttgatctgtaatgaacagacgatatcaactgctacaaaacgctatagtacatcatgaacactaccttgctacagtacaaaatttctgttttactgttttctactgtaaataactgtgtttcactgttttgcactgcagcagcagactcaatttattgtttgcctctgcctttggcccctaaaggcagaggagccggatcctcttgtgtggtgctagtctactaggaaaatcggtgacgtaacaaagagtgcgttgtaactcaacgaaacgattagattatggagtagaaaaatataaaataattacttatgtggatgaattaaattaaataatataaagctaacaatataaagggaaaaatgttatccaacaatattggtacagacagtttttaaataaagcatgattccaaaagcgtggcgcataaatccatcataccttcgttaactgtttagaatgttctaatgacagggaagaacaaaaggttctttttttgaattttacggggtataagcattgtctatcattgaaatattgcacataaaagtgtgacattagttttgtatagtgtacacttagaacaaatcatctacataagaaaatcgatttattgtggattatgagagtagcaatcaccatgataaataagaattagtgtaagtccataaaatatatgtaccttcaaacttgtgcctaaggaatagttagacgttatcaccgatagcatgattatagtcatgcttaagtcataaagttgccacggtgaggaaaatcgtaaggagccatatgtatctgtacgcaggtttaaagaggcaaaccctggataactaattatcagatatgtttatgactatattgtaaaacatttagaaatattacaataataagacttgttgatacgaagatgagcagcccatatagaaaacgacaatattatatagtatatctttttttcttcaaacttgtagaaaatcctgttatgtggtccaactaaagtttcggtgctgccaatgttagtgcatcagatagtttggagatagattccctataatatgtaccaactcggacttgattgcttctatttccctttttctcacagagatatattcatatatagcctatgacttattataccaactttgattgacaaaggttaaggctggaaaatacccgcgcatttgaatgagggtgtttttatcctaatccttatctaccgaacgcggccttaagcacttctagcactatttagagtttcagactattactactctcttcaattaggttctattcaaaaaattttctatcctacttttaaccatcatctcacccaaacatcccttacttaacaaggaacattaaagtattttcttctcgatcttaatatatactaatatactactagtaaataacctaatacttgtaaataacctaaaaatacttatactgagtacacccatactaactaatgtctctcctttagctattttgttacatagtgaatggctcacgtagcatccgtaaccttttataatattgcatacaccaaaaagtcatattattcatcatgttgattgattattctcgtaacaagaaaagtttactatctgcttcatccggtcaaaaataattgatgtttagcacaatattattagattttataaatttattttaatattaaataaatggttaaagttttaaagtttgactgaatttcattatggcttaacaaagtataatattccaccgcaaattattaatgtacaaatgagtacaatccagtatactttctttttattcgcaatccactctacttgcgtgcgtttaaaacgggcatgtagccgtgcttttagcccacgtggaagttaaattaaagttaaacaaatgcattagaaaagaaaaggagaaagaaaaagaaaccctatagaacagaaagcatgaacaaaaaggagggggccaagccgacgcatcttctttgccaaaccatcgcggtgtcaacctataaaaacctcccaaaatttttctcactcaaaccttcccacccaaaacgaaaagatcgccgatccattccatcgtcgcctccatcctcccatccatcccccctcccccaccaccgtcctccggccgcggcgcgcgccggcagccgcggccgcgtccaccaccaccaccaccacacagaggaggccagccagaggcacgcccgccgtctgacgccagccagcgcgggaggcggagcccacgtgtccccctctgctgcccccgcggggcccgcctgtcacccacccctctccctcctggtgggcaggcgaaagcgacgcgtgaagggggagcagcgctgcctgcgct

SEQ ID NO: 22790 - DNA, 2739 bp, Oryza sativa
gcgcctcgcgcgcgatccgcggcggaagtcccggcgatccggcactgatttcggggtgccgccgcggcgacctggggaggtgagccgcgattcggggcctgctggggcgggtttgcgggggttttggtaggaatttggccgggggtggagtggggtggggtgggctacgcgagcgtgtgcttagggcggagattcggatttcgggggaggtggctgcggctgtttggagcggaggggtttaatagctacaggtgagcttgtgcgagagaaacggatggttgtgtctacgtgatccgacgacgagctaggtatagcttgtctgtatgcatgctgtagttcaagatgattagctaggttaaatacagtggtttgatatagagagtaaaccgagaagaaatttcagagacccgccgcggcaataggtgtacgagctgaagcttggggggtgtttggactaacagcagcatgtcatagtggaatcatgtgcgcggtgtgctagtttttggactttgaagcaatgaaacatttgaatgatgttagggttggaagtaaagtagcaaggatgtatctagtgcaggctaattgtgttggtggttacaaagggagggtttgttttacttttcataatgtggttgggttgtccatttgcatgcttccttcatatgacaaagtttaatttgagtatgagtgacaaaatgacaacaggatattgtctgttatgttctgtttaccccagttttttgttgtttagcttgtttactggggtttcatgataatagaaatgcttttctgtttgttttgtaccgctctctgaatttcggcctgtaaagttgtatgcgtgcatgttctgttctatgatatatggtgcaagggagtattaaatgcaacattgaaacgggtagcagtcaataatcgaagtgtaacgtgttgcaccacgcatgtctgttttatctgttagagagtgcttatcaccagattgtatgctcatggaaacagatggtaaccttcagttaaagtagaactgttcatcaactaatgcatcattttggtgtaagtacataatacgaataattccgagtatattcatatacctgaagtgcttaattttattgacacatatcacagtacaatctaatccttgattgaactctgtctgatttcttgttagaaacttagaatcgaactctgtatcatatgactataatgatatgaagattaatctattcaattaagggttgcctattttccgattttgaactaccaactaaggaaattctcttctgttgctagcagcatgtgacgttgatactctaatgatgaaggagcggagctctttatgtgaaagtgcggcagatggaagttgggttttgaaatacaaaaggaaacggagcaagctaacagttagtccatcaagtgagcatgatgcttcctcaccaatactggattctcaaatgaacaatggctccatcaaaaagaagatcaaacatgacactaacatttctccatcaaccaagaagataagaggacatgacggggtggatatctgctctgatactttccatttgtagtttagctgtatatctcatctaataatctccatatctggctttgctgttaatctgtcttgtggatattgtttgtgatttactccttgtggtcatgagaacaggtcatttgatacattaaaacagtttcaaatacaattttgaccataattgtaaaacatctgtagaacctaataaaactatcatatcacaaaagttcttgctgaggcaaatctacacatatgattttcatgtatttaatttaactgtttaaagacatcttggtactcaagttttgaaagtttgactggagaagcatttcttatggcactcatgtaaaatccctcatatctacaacaatggatcaatccactacctttggcaatttgacacatgatggggatgtgaccaaactcttgcagtgtttctgcattcaagatgcatgcctacaacaaatattggagtcccatgtagttatcatacatttgtgtgcgaataattataggaaattgcaaaagcaggttttggaaaaaaatgaattgaatttgagctgaacagtgatacatgtagtcataattcttacaagtttaaggcctgatacattattatttgttttctttgcattatgcggtctaaatatttttacatatacatttcttgtctttcttcagtacttctacgagtgtgtagaatgtgatctcggtggcaatttgctgtgctgtgatagctgtccacgaacataccacttggaatgtcttaatcctcctctcaaggtttgaatcttatccgttgtttcttgttttctttgactgttttttttggggattgtactgattgcttcttatctctttgcatgcttccatctacaatgtagcgtgcaccacctggaaattggcaatgcccaagatgtcgtacaaaaaaagttagcttgaagctcttagacaatgctgatgctgacacctctaaacgtgaaagaacaaggagaatgcgcacaagcaccacatcagatagcccatccccatctccacaaaacaaagcctcttttaacacatcacgtggtgctgcatttagggatgatgaaccaggtgcaaaagacaatgaagttgagaaaaggaaaccattgatattacaaaatgaagaagcgttcaaccaaggaactatctacagataccacatcatcaaagtcagggttact

SEQ ID NO: 22791 - DNA, 3729 bp, Oryza sativa
aggtattcaaacaaaactttgttatgctaaaatagcattggctgagctgaatttgttttctttattttttttcactttttcagaaatgctacttagtgattttgccattgttatacattggtgaacacgttattatgttacttgtgaactcaagaagtatgcactatgttttttcttcctgatcctatcaccatttactagatctacactttactacatttgccaccttctatattttctttttaaccttgttgtatcttgcgtgtcatagtttagcaattctaccataagtttattacctatattttaggaataatagcatgcaaccatcatttctttttgcaaagttctaatactaatatttttttatagcttattctatactgctttctcatattacacaatatgtaattgatggcctttgaattggactaccttttatggttgtttttctgtcttcaagttttactctggtgctgttgtatgctgtggagggaaaatatatctttcgacatacaatcaatctacatatcccataaatgagttagactatccttttttatcaccatttatcttcacattacaggcttactgtatgggtattatggtagtggtgcaacctttttctgtcttggtgtgtctgacctatcaccactgccatgaattgctttttaatacttttattttacaaagataaacttacttgatcatttttttgtttcatcatctggtataaagatttttccatgtcagcttcttctgatcacttctctttggttgctacgacaatcagccttcaccacttttttatgtgcatagtgtcttacctccttcaattcctattgcatgatgaacaccttattggtattcacagctaccaaatgtcctaattctcttaaaagaaaaatgccctaattctctgacatacttgtgttcagaatgctgttcatataactgaaaaggagcatggtggtgcaggagacaaaataacaactcagggggatctgcaggtttgctctaacaactaatctgctagtgtttattgtagatggtggtctgtggagtactgtagttgcatcaagccactagcttatctatataaattgctttttcatcccattaatttgcctttgttctgtctcatttctgagttatctgactattgcaaaacattgttctttgcttaggttgatcgcatcctaggctgtcgacttcagacaagccaaatcatttcacctgcccatgcttcatcagagcagattgatatggcccctcctagtgcatccggtgcaccagaacctagtcaagcccttttaaaaggacttcatgaagaaattcagtcttctaatagtgatactaatgtgacagaggatgcatgtgctgatgaattagcaaacgatggtggggaaaataatttggattgttctgatgctcaaaaggagagtaatgttagatcccatggacacaaggaatcacttaacgcaaaagaaatcatgaatacagcatcagcatgttccgctgatcaaatcgtcactgttaaggatgctggagcagtacagacatatgtaacagcttcagtaaatggtgaatatgagacagtaactgatattccagaagaaaagaatgacaccaaacatccagtttccaaagctgacacagaagtccacactaaacaagaacatacacctgatagtaaattgcatgggaaaatacaagaaactgaattgaaggagcacgacggaactacttatgagtttttagttaaatgggttggcaaatcgaatatccataacagctggatttctgaatctgagctgaaagcattagcaaaaaggaaactagaaaactacaaagcaaagtacggaacaggtttgataaacatctgcaaagaacaatggtgccaaccgcaacgagttattgctctgcgcacttctttagatgaaatagaagaggctttgatcaaatggtgtgcccttccatatgacgaatgcacgtgggaaagattagatgaacctacaatggtgaagtatgcacatttggtcactcagttcaaaaaatttgaatcccaggctttggataaggataagggaggtagccatgcaaagccaagggaacaccaagagtttaatatgctggttgagcagccaaaagaactccagggaggcatgctcttccctcatcaactggaagcattgaactggctacgcaaatgctggtacaagtcaaaaaatgttatccttgctgatgagatgggtcttggaaagactgtgtctgcctgtgcttttctatcatccctatgttgtgaatataagattaacttgccatgtcttgtcttggttcctctttctactatgcccaactggatggctgaatttgcatcatgggcacctcatttaaatgttgtggagtatcatggttctgcacgggcaagatctattattcgtcaatatgagtggcatgagggtgatgcaagccagatgggtaaaatcaagaaatctcataagttcaatgtattgctcactacttatgaaatggtgcttgttgatgctgcctatcttcggtctgtgtcatgggaggttcttatagtcgatgagggtcatcgtctgaagaattctagcagcaaacttttcagtttactcaatacattatcatttcagcatagagttttgctgactggaactccgttacagaataacattggtgaaatgtataacttattaacttcttacaacctcttctttcccttctctagcttcatttgaggagaaattcaatgaccttacaacaacagagaaagtggaggagctgaagaaccttgtagctccacatatgcttcgaagactgaaaaaggatgcaatgcaaaatatccctccaaagactgaacgaatggtgcctgttgaattgacatcaatccaggctgaatactaccgtgctatgcttacaaagaactaccaagtattgcgcaatattgggaaaggtggtgctcaccagtcattgttgaacatagtaatgcaacttcggaaagtctgcaatcatccgtatcttattcctggaactgaacctgaatcaggatcaccagagttcttgcatgaaatgcgaataaaggcctcagcaaagttaactttgttgcactctatgcttaaaatcctacacaaggatggtcatcgagttcttattttttctcagatgacaaagcttcttgacatccttgaagattacctgacttgggagtttggtccgaaaacatttgaaagagtggatggttcagtatctgtggcagaacgccaggcagcaattgctcgttttaatcaggacaagagtcgttttgtattcctgctatctacgcggtcatgtgggcttggaattaatttggcaactgcagatactgttatcatatatgattctgatttcaatccacatgctgatatacaggcaatgaacagagcacacagaattggacagtcaaacagacttttagtttacaggcttgtcgtgcgtgctagtgttgaggagcgtatcttgcaccttgcgaagaaaaaattgatgcttgatcaactttttgttaacaaatcagaatcacagaaggaagtggaagatatcattcgctggggaacagaggaactcttcaggaaagcgatgttgcagttaaagataataatgaagcttctggtgctaaaaatgatgtagcagaggtgagtttaagcataaagaaaaatggtggataggcga

SEQ ID NO: 22792 - DNA, 748 bp, Oryza sativa
  unsure (1)..(748): unsure at all n locations
atgttttcgtagaaaaacagaaacaaaacttaagaaacctctgggttgagcagtaccgtgcgaaacaggtgccgtaggtcgaggtcctgctccgacggtaggcgcgcgaggccggggttgtaccggaccagctggaggtacgacgtccacggcgctgcgacaggagaagacgcgcatgaccgcacgcatcttctcctgcatccggtcgaaggtcaccctctgctcaacgtcagtcaagtgcaaacctctgttcaacctcacttggactgcggtgatatcggcactgatatcccgtgcggcatcagcctatgcaagatggaaataaaaaattcagtagttgtcctatattatgcaagataaatgaaataattgtaagaagtaatacaaattggacgtaccgccacgaagtagtctcggtcacggtgcatgggatacgcgtccgtgacagcggcaacgtgcggctctggggcgtctggagtgaaggtcacacgcgcacgagtgcgaggaaggtaccagcgaaggtagtcacggtagttctcctccgtgtgtgggaagagctcgttgatcacctcctctgtagctaacacccccagtcggtcaacgggtactgctgggtacacgtntggaagcccnnaaaagtggcgccctgcatagctgttcccccgtcgaggtcaacctgtgaagagaggtaaattatatggctcgatgaagtaattatcataaaaatttaaaaatggggctgcaggaa

SEQ ID NO: 22793 - DNA, 1265 bp, Oryza sativa
ctttgccgttggctgcttccgatgaccggcttgccgtcggcaagacgctctcccctggcgccaccctcgtctccgatggcggcgccttcgccatgggcttcttctcgccgtccaactcatctggactgtaccttgcatatggtacaacaatgtccccaagctcaccgtggtgtgggtcgccgaccagctcgcccccatcaccgaccacccttcttcttccaagctcgccatggccgacgacagcagcaacctggtcttgtccgacgcggccggccgtgttctttggaggactaatgtcaccgccggcggcgtgaactcgtcgggtgccgtggcggtgctcgtgaactccggcaacctcgtgctacggttgcccgacgacaccgccctgtggcagacgttcgagcaccccagcgacgtgttcatggccggcatgaagctcggcatcgactaccggtcgcactccggcatgcggatcgtctcctggaagggcgccggcgacccgtcgccggggagcttctcgttcggcgtcgacccggagaggccgctgcaggcgaagatctggaatgggtcgcgcgtgcactggcgcagctcgatgtggacgggttacatggtggacagcaactaccagaagggcggctcgtcggcgatctacaccgccgtcgtctacaccgacgacgagatctacgcctccttcaccctctccgccggagcgccgccgatgcactacctcatgtcctactccggcgacctccacctgcagagctggagcaacgtgtcgtcggcgtgggtcaccaacgccaggttccctcgccgcgactgcagcctcttcggctactgcggcgcgttcggctactgcggcaacagcaccggcggcggcggcggcgccgggcggcgtctcgacgtgccactgcctcgaagggttcgagccggcgagcggcgccgactggagccgcggcgacttctcgctggggtgtcgccggaaggaggcggcgcgctgcggcgacgggttcgcggagttcccggacatgaagctgcccgacgggtacgcgctcgtcgggaacatgaacgccggcgagtgcgcggcggcgtgccgccgcaactgctcctgcgtggcgtacgcctacgccgacctgagcaggagcacgaggagagatccgaccaggtgtttgatgtggggcggcgagctgctcgacatggagaaggtgaacgagagctggggtgacttaggcgagacgctgtacctccgaatggcaggtgcaggtaaa

SEQ ID NO: 22794 - DNA, 6058 bp, Oryza sativa
tctataataccctcaatactcttaacacccccactcaaatgcaatgtgtatgcaataacattgcatttgaaaggtaaactaaacactagaacacaatccaaatattagcctatctccaaagccttgatgatgtcgtcgaagtgtgccaattctaggatgatgaagaagaaaagatgtatccccttctcaatgaactggaccttggagccttcacaaactgttcttcggctcttcattgattcggagatgttgatgatgatgatgatgatgacaatggaccttcacaaactgttcttcggtcctttgactgatgatgagacattgatgttgatgaaggcccttcacaaactgttcttcggaccttcactgagtgatgatgatcatgttgacaagctccgacatggagatgatgaagtgacaatgaaggccagctccgacggggaactggtgatgattaaagccaactctgacagcgagttggtgatgtagaaaagacaatgaagagatgaattggcatgactttgacgaattgagggtaagcaatggatttggattgactcgataaattgtagagaaatttgactcaatgatagtagcagacactaagtagtagcaaaagagatgaactggtgcaaattcaacaaattaaaggatatgcattggagtattggacttggatggacttgatatgaaatatagtaaattgatgaccaagacatgaaattgatttgaaggcttatcgatagtagtggctgcaaaaagaacaatgacagtagcaggaacccattcttcaatcactaattagctgtaacccagctgcataaccaaagagtccaagagcctcaaatctgctcctatctatcctgttgctacttgaccatgagcatacacgcaacagaaaaacaaagacggagagaggggttgatgtggatctgaagttcaggaatagcctgggacgatgagaagatgatgacgatgagcatcggcggctggccggctcgatgggtggacggcagcggcttgccgcaatggacgacgagggcctggccggcggaggacgagcacccacgacgggggcactgattggctgattgctgctcctgtttgtttgctcattggagatgaactggagaacgacaggctcgctgctgctgccgcttgaagaggagaaagcaacaatcagtgatgacgactgcctttgatgcggcgggcggcggcccagatctgggcggcacggatggcgcgcgaccggcggcgatgaccgcgacttccgccgcgatgggctgtcgatggacttgatgacaggagaacgaggaagtggtgctgctgctagaacctttgctgattggggacgaaactgagctgacaacggtgctgttgcacttactactactcaatgaggatgtggacgggttagttgggcttgccggcggcgagccgccgccggcgtgccggcgtggacttggatcgacggctagggtttgctcccttgctctgataccatgtcacttttggagagaagatagaaattggggatttcaactattgcaattgacttagctcaaagagcatataaatatgtacaagagaagtagaaatgtctataataccctcaatactcttaacagaatgagcatgctacatatacatgtaaaagagtagaagtaagggacaaaccgtttccaagtatcggatgcttcatgttttcaccatgccagctatcagatggcattccctggcacatctgatgacaattgacaagtacctcattagtcctgataatgtctttgtactaatgagcgaactaaaacatctgaataaatagtaagaacctgttttatgtctcaggggatacagttttcacatgctcgatgtctaggtaattagaccacaatccatcaccttggcttttagcttcttcttcaccagctacatcggcaagctccattcccaaacctccaaacctttaaacagcgcaggtgctcttttaccgttcccacttcccactgaccgggctaattaatggtacgatggatcaggtagatgcagcaccagcaggggtgaaacggcttgggcattccgtcgaacacgtaggaggcgccgtgccggcggcgccaccagcaactctcaggtccagtccaggccaggccatgcaggaggacacaaggggataaaagaggaagcggtcgcccatggcagtagagtggcagagcaagggagagccccgcgcggccgcgcgcgcgcgcggcgacgagccggaacagtgacgacgccgcggcgaggcgacgagcgccggcagcggcggtttgaaatgcggtcacgtaccgttagatcaaagtactaacggcccagattgatagtaggcatcaagtggatattttcagatacaccctactaacattccatatttttgtctcagcccctcccccttggcttgtattttagcagaacagaagcaatcattctactgaaatttttttgtttttaaccaaaaatacagaaagaacctataaaagaaaatacaatctgacctgctccgagatagagaaaaaaattgaccgtgccttactcttaaagatcataatcggtactgaaacgtgacaaattagagcccatcggttgccaaaagaataagttaaaattaaaaattaattttgaagttgactttatgatatttttaacaaaatttatttttatcattaggttttaagtcgttatgtcggtgatatgggaccgggagtatcgtgaccagaggcttgaggcagacacaatcgcccacgtggcctggcaccttcggggacgtcgggcccgagggtgaggtgtccgccctcctcctgatttcctcgagggggggtcgggtgactcctgccccggccccgagggccgaggcgccccgaccccttgtggagttagcgccacatgaatgggttgggtgaacacggtaagcctcacctaaccacatttattgcggtctggtcgaacgtgtcacgctgcatgcagcgtagtgcagcgcgttcctttatccggtctgtgaccagtcacagaccggtcagatcacgggttaggtggcgactggcggtctgacgcacgccttgccccatcccgtcaagacgaaagcctctaggcactcgtctcaagccggagctagcgtgtaatctcttagagatggcacgttagccctggttagatttataccaggcttcatcccaaccattacaggcaagatgctacatgaagaagggcaaacatgcacgttgctaagctgacacgtggtggacaaggatgactgatctgtgaccagtctgacactggtcgcgtcatcaacagacagccataatcccacgtcgcacctgtttccggcggaagtggggtagatatgggccgtcccgtcagaagggcacccggacagcaaccgtaccgatctccgtccgtttatgaagagaagaacagtccagtttggagagggagaggggcatgtggtatccccttgagatataaaaggaggaccttgcccacttagatagagagaggacttttggacacaaggccttctccagatccgatcccagagcgattgggggctggttgacactttgttacttgtgcatacacaaatccaccaaaacacaggagtagggtattacgcttcccagcggcccgaacctgtatacatcgcccgtgtctcgcgtttcttcctagctggcgatctttccacataccgagagagcttgagatttcaccctaagcccccggccgaaccggcaaaggggggcctgtgcggtctcccggtgaggagccacgagctccgtcacgttacaaacacatatttaaaagttttacatataaattagtttttatcactaataagctgatacgacttataatttatttttaggtaatcgattcgatgggacccttagtttaatacgctctccgttcaaaaataaattaacttatgactataaatctaaacatcgctttttctagattcgttgataggatttaaatctttttgatggagagagcgagtaattactaattagtgctcaatttggcgacaaaaatatgaagcactactactgttatatcaaatacaggagcacataaacgcattttccaaacagaaattacaaggtgaccatcttgtttgaatcgttccactcgaagagaagcaaataccattatacgttaatacctgtcacatctctggctggtacgccccaatttcatctcaccagccacatgagtccgaaaatgtagcattaatatgataagctagactgttgcagcttaattggaaaggttagttgactttactctaagagttcaatcattgtctcattagttgtcagtatctcactgaaacgtgtggaattaatcttatcttactacttgttgattttggcataactctgtttagctacttgccatttgccaatactcgatattactgtaagtcttttacccatatgccattaaaaaagttgaaggttacgcgtgtgccacaaaaaagttttgagtcacctgtatgccatgacacaaaatttcgtttacccgtgtgccattccatccaccttctgttagagaatgagctatgacatgtgggacccacgtatgaaaatgactaaattgcccctaaagcattttcatctctactcctctcccgtgcgcctccactcgaaccctagcctagctgccgccgccgccggtcgtctccgtctccgtcgccggcgcgccaccgccggtcgtcgccatcgccggcgcgccgccgccggtcgtctcgcctcgccagatccggcggcgcgcccaagctggcgtgcccaggccggcgcggcaagccgccgccgccgccggtcgtcgccatcgccggcgtgccaccgccgcctcgcttcgtctcgcgtcgcctcgccggcggcgcgcccaggccggcgccccaaggccgcctcgcctcgcccccggcgcggcacgccgccgccgccggtcgtcgccgtcacgccgccgccgccagcgtggctgaaatagagcaagggcaaaatagacttttcaaacctctgttagtctccgttagtgctgattccatccaaagtggctcacaggtaaacgaaagtttgtgtcatggcatacaggtaactcaaaactttttcgtggcacacacgtaagctccaacttttttaatggcataggggtaaaagactcgtattaagaaccactactgcacaagctgggttctttggtggttaagtatacatctgtcccttcttggctggtacagtgaacccccaacttcatttcacctgccacatgaatcctgaaatgtagcgttgatatgatacagaaagctagtcacctgcaacttacaaatttctaaatcttctgcaacttacaaatttctgaatcttctccaatctgcatgcacacttgaacactatgtaagggtgaagttagctccatctccacaagttcaggcacaactgcaaagtgcaaggtcaggtcagctcatcatcaatggattggccagcttcagcttccacttgcatcgccatccttctcttcgttttcttgatttcatggccgtcactgtgcgcctccgacgaccggcttgccatcggcaagacgctgtctcccggcgcaaccctcgtctccgacggcggcgccttcgccatgggcttcttctcgccgtcgtccaactccactaatgctacctcgtcgggactttacctcggaatatggtacaacaacatccccaagctcaccgtcgtgtgggtcgccgaccaggcggcgcccatcgccgaccatccttcctccccggcctccacgctagccgttgccagcgacggcaacctggtcttgtccgatggcgccaccggccgcgtcctttggaggactaacgtcaccgccggcgtgaactcgtcggcgtcatcgggaggaggagtcggtgctgtggcggtgctcgccaactccggcaacctcgtgctccggctgccggacggcaccgccttgtgggagacgttcgagaaccccggcaacgcgttcctgcccggcatgaagatcggcgtca

SEQ ID NO: 22795 - DNA, 17684 bp, Oryza sativa
accagaagggcggcaggtcggcgatctacaccgccgtcgtctccaccgacgaggagatttacgccgcgttcacactgtccgacggcgcgccgccgatgcagtacacgctgggctacgccggcgacctccgcctgcagagctggagcaccgagacgtcgtcgtgggccacgctcgccgagtaccccacccgcgcgtgcagcgcgttcggctcatgcggcccgttcggctactgcggcgacgtcacggccaccgcctcgacgtgctactgcctcccggggttcgagccggcgagcgccgccggctggagccgcggcgacttcacgctggggtgccggcggagggaggcggtgcggtgcggcgacgggttcgtggcggtggcgaacctgaagctgcccgactggtacctgcacgtgggcaaccggagctacgaggagtgcgcggcggagtgccgccggaactgctcctgcgtggcgtacgcctacgccaacctcaccgggagctccacgagggatgcgacgaggtgtttggtttggggcggcgacttggtggacatggagaaggtggtcgggacatggggtgacttcggtgagacgctctacctccggcttgcaggtgcaggtatgtaaacgtacgtaccagtgtttaaaatagcgggctaagacatagcaagctaaatggagctatagcggttaattgtatatgagagcaaatagctagaactcttctcagacaagttattgccggagatagcgacggctatagctggagatttaaaaccttgatatgtacctggtgtttggatttttttttaattttaagattacacggaagacacaccactacacatttgtcatcatttgtttgggattttgttctgcagccttgtctcaacactactgatcctctgtaaatatttttataaaaaaactctataagaagaaaaaactgatcacaatttcatatatagagtggaattatatatgctttgcaaaagtatttcaaacactagttagcttgatgcaaattaatcaaggttcttactttgcaggtaggaagccaaggactagtgcactgagatttgcacttccaatagttttagcaagtgttcttatacccatatgcattttaatatgtgctcccaagatcaaaggtacccatatttattttcatgaagtttagtactttaggtccatgggtaaggtgatacatgttcaatgcattaataccctacctcatttttcttcgcgaatataatgaagaaattatcaagaaaaaatatggggagaataacaagaggcgggccttgcgagttttgagcatttctgatgatcttgggcaggaaatcccagccaaagatcttgagtttccatttgttgaatatgacaagatcctagttgcaacagacaacttttctgaagcatctttgattggaaaaggaggttttggcaaagtttacaaggtaactcattcatatgctgacctagataatttctgaagaaagaaaatgcagagtcaagctgatcctcctgaactttcagataaacaaacacccaaagtttatggtgtgatgtaaatttcttaaaaaaaagaagaagaaaaagaaaatcattcaaaatacaacatgtgagtattcagtgatgatgtttcttttatatttctgaagggagtgttagatggccgggaagttgcagtcaaaagacttagcagttggtctgaacaaggaatagtggagttcagaaatgaggtggtcctaattgccaaactacagcacagaaaccttgttcgacttgtcggttgcagcatcgaaggagatgaaaagttgctgatttatgagtatatgcccaacaagagcttagatgcttctcttttcagtatgttctctactagcagtctatcacaccacaagttgcctaattgtcacacacaataaaccattgatgctaatcaatagtgttgcttatttgcagagggtaaaagaaaatcagtgttggactggtccacacggttcaagatcgtcaaaggggttgcccgaggacttctttacctccatcaagattcaagattaacaattatccatagagatcttaaggcaagcaacattttgttggatgcagagatgaacccaaagatatcggattttggtatggcaaggattttcggcaacaaccagcaaaaggaagtcactaaacgagttgttggaacatagtgagtattgtccaaaccatttgcacagattaattaacctttttttttttacaattctatgtgtggactaactatttgaagtggtatgatccaattagtggctatatggctcctgaatatgctatgggaggtatcttttcaatgaagtccgatgtctacagcttcggcgttttacttctagagatagtaagcggttctaagataagctctattgatctcattgaggactccccaaatcttccagtctatgtaagcattccattttatgattttgcaatcacttatacaaagatccattttatgaaccggtaatcacttatacacctgaggtgtaaatctgatggatgcaggcatggaatctatggaatgaagggaaggcagacattatgatagactcaactatcactgcaaactgcttattggatgaagtcattctctgcatccatgtggccctcctgtgtgttcaggagaatctcaatgacaggccactcatgtcagatgttgtgctcatcttggagaaaggaagcaagtcactcccagctccaaatagaccggcttattttgcacaaaggaacaacaatgaagtagagcaagtaagaaatggtagccagggcgctcagaattctaacaacaacatgactctcacagatctagagggacgatgagaacactgttgtttgttaagagtgatattataaggcttaaggtgatcaactcaactagatgggctctaaacctacccaagaaaatttgatagggaaaggtgttttggttatatcttaatgtgaaagaatggcaagaatgtttagcatgaaaaaggatgataagaaattgatgtcgttactcatttatccttaacattcattaattaatcctcttctttttcgcatgcctcagctttaagaaagagatatggtcgatatttttgcaaacactagtactccctccaggctgataatacttgtcgttttagacaagggtgaggtcaaactttagaatatttgattatgaatcatttttaaaatatttgtcattcaaatatggtgattacgtgtatagattagccttaaaaagtactttaataaaatcgtatatttgttaacacttttatacatattataatggaaaataatagtcaaagttgtattttgaaaaccgtgctcttgtctaaaacgacgagtattatcaacccggagggagtagtagcttttatagctggggggtaatttcataaactttattcttttcacaaaatatatatactagtacaagtttgagtataactaaccgatgaacattttcaagtcaactggatgatcggttaattcctctagtacgctagtctagagagaaaggggaaaaaaaaaagaatagttggttattttggttcagccctaacgcctaaactcgtcaactgcgccagattgaacagttgtcaagcctggtttggggaaaaagtccacttcgactcccttcattgtaggccgaatctaattcgtgcccctcaaccgaaaaaccggatagaacgactccccgaactattaaaaccagtgcaatttgactccctcaacggttttggacagcggttttgctgacgtggcgctgacgtggcaatgttgacccggtcttcgtcccacgtggcgcttacgtggcattataattaaaaaaaatatctatgggacccatccgtcattcacacatacaaatacattgtaggacccactgacatgtagagcccagatgtcatcctttcttcttcccttcttcctcctccctctctctctcccttctccgtcttttctctccccattttctctctagtgtcccctccaccccaaggcccagccgccgcctcctcccttcctctcttctttcttcgccgacgacgccattccccaccggcgtgcggcggcggcgagggatttcgccggccaactagctccatcctcaataagataaaatcgaggggttggttgctcccggtggaagagccccgtggtctccgccgccgccccgcagcctctgtcttctccatccaccgccagctggcgccgcgtcgaaccaccacaagcgcaagaagctggcggcaaggcggaagaagggcaaggggcgcctcggcaagaagcctaggcgctccgatgaccccgccgaccgccctcgccgccgcagcaagcccagcgacaagttcctcaagctgctccgcaagtgccaccctacgccaccctcgagcccaacgtgtcgcggcgaggcccaccacgcgtcgcacccacggcgtctagcgccccgcgcgcccgcgcccctgggacggcggcctccgagcgcgcccgccgggtgcttatgcgtcgcttgccgtactcgatcattcctgcgatggcatctcagggcgttgtattgctcgccgtggtcgtggcggtggccgtcatgtccgtgtcggtggcgtcggcgccggtggacggaggcgtgctgccagcgccggcgccggtcacgggcgcggctgcagtggggcgcggcgtcagcggcgctggccgtggcgtgctctgtcgtgctgtccatcctcgtcgcgggtgggaccatgcactaggcacgcgaggtagtaatggatggaattggttcgttgataatctccgatttggacactgctcgttttgggtcgtttccggcgatagagtagtagtactagcactctgttcatttacatttcagggcctgttcatttactccgacgacgagaagcacctctcggaggaggatgaggaggagtaggggtggaaacgagccgagccaagcccaagcgggcttggcttggctcggcttgcaatggcttgcaacaagctaggcttggcttggctcggctcggttagggaaacgagctaaaacatgagctcggctcggctcgtttcctggctcgagctggctcgcgagccttccgttgaagctatataatttgtaatcattaagaaaagcaataacaaatcatcaacatgtaaaattaaaataactttatatattaaattcatcaaattatagatgataaattacatattgacaaataataactccactagtaaataaaattgtcaatataaatacatgatggctaggctcacgagccaaatcaaacggctcgcgagccagctcgggctcggctcgtttcagaaccgagcttaaaaggaagcttgggctaggctcgtttggcattcaagccgagccgagctaagcgagctcgagccaagcccgagccgagctcacaagcccaagctttttttccacccctaaggaggaggaggagggggcctccagctccgccgacgacgaggccgccgacgccatcgtgcgtccgaaggggaagagaaaagggggagagaaaagagagagaagggagagagagggaagaggaagaagggaagaagaaatgatgacatgtgggcccacatgttagtgggtcccacaatatatatttgtgtgtgaatgacagatgggtcccatagatattttttttaattctaatgccacgtaagcgccacgtgggacgaagaccaggtcaacactgctacatcagcgccacgtcagcaaaaccgttgtccaaaaccgctgagggagtcaaattacactggtttcaatagttcggggagtcgtcctatccggttttctagttgaggggtatgaattagattcagcgtacaattaagggagtcaaagtggacgttttccctggtttggaggaaccctggtttggatcaggttgggtcaaaaagtagtcaaatgtgggcttacggcctataagaccaacccgtttgttgcaagtccggactctcctgaaagccttgaagaagcccaacctttttctttgagtggactagcccagctaaatgcacagctagtgggctgcttcagtcaagcccagtaatttgatgaattacttcaaagcgaaactgtaatactctctttcaaattactttgtctcaagtgtttgatcctcgatcatcaactcctctaaactcatatagttcaacatatatttttaaattcatcatgacaaatattttcataatatataattcactgttattaaattgcacgggtttttttaaaaaaaataataatcaaagaaaaacatgttcgacttagaaaagaaccaaataatttgaaatagataaagtagaaaagtttaataagcttacgatagtatgaagtacttttaaatacaaatctacgaccccatcgtttgtcttatattggaatcagtcgctacccaaatttaaattttaaaaattgatttctaatttatttttacagtattggtttctaaattactacttagaacatatatatatatatatatatatataaattttacttatacattattattattttgctaatatgtcatacgacgtattatccacatatgcacaaccgatgagcccgacatataccgtatttttatttaaagttaagcatttgaacgtatacatttctttaaacgtactacatgtctttcgtgtaattaaaaatgttcgcttttgctaagaaaccctgtaaaaatttggttgatactgtgcacagaggacagcagtactaaccgtatccaaagcgcaaaccgcgcagtagtaggctagtagcacatctccatagtttacccgcgcacgcaaccaacagcagccagctgcaacgtgggcccacctcgcccactccagtgctcccgcacacgcgcctcacgtgctatccctcccaaacactaccaccaaaaaaaaaaaaaaagaaaaaaaacacaccgaaaagtccacccacccgcacaccgcaccaccacgcctcccaacacgcaaacccgactcctctcgcacaggccaaaacgccaccaaaattaaagggcaaaaaaaaggaaaaaaaggaaaaggaaaaggaaacgcctcgccgggaatgggcaagcagcagccgcagccgccaccggcggcgatgtcggcgccaccgcggaagcggaagaagaaggggcggccctccctcctcgacctccagaagcggaccctccgcctcgagaagctgcaggagccgccgccgccgccaccgcccccgcagccgcggcggtccacgcggaggaaccccgccggcgtcgactccggcgacgaggggacggcacccggcggccgccgcgagaagaagctccgcctcgtcatgggcctccccgacggatcggccaaggtgggcatcgttttcgttccccttccctccccttacccgatctgagaccccccgctccgaatccgcgccaatttggccaattccgcgcggaatttggcctaattctggtgccgccaggggttcgccgtacggatctgcgcagccgcgcgccgcccgaggaattttctttgctattttgggcatgaaaaggtcgccctttatttatttatctttgtgacaaggtgcagtggtcaactcagctcagcggcgagctctcccaatcatttggcgggggataaaccaaaaaccctcgcatctcccgcatcgccttgcctgcggcgacaataattggcgcacaattctttttttttaaaatggctcagttcgaagcttttaaagtcgtgccctttttatggggggagggttttgtctgcttctcgcgccaaattttgctacatttcacggcatcgctagatctgtacttggttacaggcgctgtggtaaacgaaagccccacttttttcttgtgcttttatctcctccattattttggattcttaatctgagttttttttttctgtctgttttgattttctttttatcttttgctgttgctgccgcagggagaaaagacgaggaaagcgacggatgggagtgaaggttggtgttccttgctcagatgcatttattcttgagatttctaggaacaaaaaacacctgggcgaatgtgtatgaaagatgccatttttaattcttttagtgcctgaggcattccagttattttttctggtttaattaatgcttgtgcctctgcctctgattgttgctgtgctcgtgctcgtgggttgatttgttcactcgccagagccgtcagattccgggcccacgacacctttgccggacaaaaagttgttagtcttcgtccttgataggctgcagaagtgagttgctgtgctctctgcttgctcttcctcgggttcagttcattcacagctgcatgacctctaacctaaggtggatttcctggtttcttgcaggaaggacacatatggtgtattctctgaccctgttgaccccgaagaggtttgtgtttgaagatgataatgtttcagatattaggttttctttgttttgtttctctggagttgattgatctgtatcttaatgcgtatccatggccagctgcctgattaccatgatattatcaagcatccaatggatttttcaacaattcggaagaagctcaataaaggggcttatggcaacttggagcaatttgaggtcagtgtcagagcgtatggtgatttttgttggcctttcctgtgctgtttcgattttccttcgttaacagtcaggtgtgtggtaggcaattagagtaactcttggtctgttgcagttggatttgaatgttgggtctttaacttggttatgtcctttggctggatcagctagtttagcctcctctgctacatgtgctgcccagtgccaatgtttttattttgttcttctttcagcatccataaatatattttctttcatatccagaagttcattaatgaagttttggtatctactaccgtggtcatttaaaaaaagtctattttatactggtgcactaatgcaccgtgctttttaggagcagatattcactctctgactcttaatcaaaagagctagaaacatttaatatgaataatataatagaaaccttcgagtttgctgccaagttactttcagtgacaatattccatctgtacaagattttgcagttacacctgatctccctaggagaatattgaaaaatctcaacaatttgagggctagtacagtaaaatatagctacattttatcttgtaaaagtgcacataataagtttcttccaaagggtacctacgcagctgccaggagttactgctattgattgtattaaaggaattctaacagaaaaagtatgaacaaaattcacaaacctatcttatgcagttttcttggtttgctctatttggacatttgaccgaagaaaacctgtatatcttgaaatgggaaacaagaaggatatatttgtatctatatttggcgcttgagttatccttctttatgctgcagttcatgcagtgtcattgacttctggatgtggaatttctgtcagctaattgtggtaggctatcagaggatgtattgtctatcattcctgggtggtgcttttctcaaagatcatctttggtttctgtgttatgcttagcttgctgaatttaaattgtaccaagggaaagtcctttgccctgttaatatgcatggagggaactcttgaatactgagatatcccatgccactgtatgtttaattctactgtacttgtggtttctggctaaatcaaaggatttttgggccatttagccatgaagggtgcttggatgatatcatctaagttagttggtagtatctacaataagacgagagtttttgaatgcctttcttcttttatgaaatttgctttaatactctgtatgacactggaatttatttgtcttatgcatgtgtgtttatgtttgcagtacatattcaagtcacactcaaaagaaatcacaagtacttaatatgaaaatgctgctaagtgctaacacatcaactgttataaagtgtgttgagcctcaggttggaattatgtgttgttggaaatatgagatagacaactgtaaaatgagaatatatgaactttctttaattatgatgctaggaaggttttctgtgatatctgctgcagcttctatcaaatgaagttttacttgtctgctaccatctcctaccatttcagacatatctgatccacttatttgtaccagacatcatagatttgtattttcacagggtgttagactttcttttactttaaataacaccaacatcattcttttgattagttttatgccatgcctttctgttttaaaacattggctcagccgcacacaccacaaacaatttgattcatataccactcttgagtactgcatgtgctactgttcggtccaagttgcaggctgcactagttgtaaccgtgtacagtttacattgtgttgaacccactatttcatatctagctaaaaggctgtcacgcacataatatttttgaaaaaaatgttatgcattcctaaggctcatcctaatgtgaatacttcttttttttttttgttattttcatctttctgcaacacactattccttcagtggaccagaatgctactagtgctttcttaagctcgtatgacaggacctgaagttttaatttacaggatgatgtattcttgttaacctcaaatgcgatgtgctacaattcaccagatacaatatactatcgacaggtaaagaatcatgcttgcatgttttgtttttatgtaaccataacgtatgctgcatatgtgatatttgtgtgccatgtattataggcacgggcgatccaagagcttgccaagaaggactttgagaaccttaggcaggatagtgatgcaagtgagccagaaccagaaccggaaattaaaccagatcctgaaccaaagccacaaccacggaggggcaggcctccaaataagaacactatcaaacagaaagttgggaagccaccggtagaacgcgctactgcagacttttctggagcaacactcgctagtgttggaaataatggacatcgtacgcagccaccatttgatctgcaacggcaagtaatgaatggatcctttatcgcagatgtactgagagcttcttttgccagtcgaaataatggatacaattggtctaacgagcgcaaattggaaagaattgaagattactcaggttttatttattttcttttatcaaagttttgtgttttgtatgggtcaacactcagtgggaaattgctgaacattttgacaaacttaatgtcttctcctgaccacttgcaatgccattcgtttgttgcagggtctatcggtaaatggtcagcaaaaagtgggagaaaaccaattctgacagaagaaagtagccgaagcacttattgtcagcctcaaccttcgagttcaatatatgagctgccggtgtcgtcctcatacaacgagacaaggaagctgctagttccagttgagtgtccgaaatatgagtcctgtctataagtgcttcaccatatatgtttatataatctcaacctttttctattaatgtttgtcaacagcaagacatcatcactgacactaaaactctttttatttgtcaggttggggttcagttgcagcagtcctatccccgcagcttggcacgttttgctgcgcagctaggtcctgtcgcttgggagattgcgtccaaacgaattgaacgtgcccttcccccaggaacaaagtttggccgtgggtgggtaggagacggtgaagcaccgaacgcaactcagccaccagtgcttactacatcttcaacagccttgatacacccaagtagtacagaaacatcaagtgaacagccaactcataacggtacggccagcacaagccattcagcaggacctcagccatcttccgcaccatatgcctcttctacaatcacaactcatagggtcaattgtcagtcattaccaagccagcaacacggatcagtgccacaggtttcagcagaaagaggtgaacatggtgctgaggtgaagggcaaccataataatcttcatgaacggccagccattcagcacactgttaatggcttcagtgctgtttcaggtactaacccagactcataagtaaagttcttctgatctatgtctcctgttagttctggttctaagttggctactcctaatgccctgccaattttctcctgtttttattttccttttaaggatcaaacatattcccttctgcggcacagatggtggcgaatcggatgcagacacatacagctgattagctagctagtagagagacctgagatcaacatagtgaatttaacatttggatgcagagctccagtgaattgtccatcatgatcaccaagcaacaagggcctgctcacactaggcactagcaactcagcaccaactgtccaaaaacctcggatgatccaagttctgacaagtggcaagtcttgtgagccatgtcgatccaccacgccgtgaattggcattgcatttgcgaaaacatgttgtgtgattgattagaaacataggatagcatgcagaaaattgcagagtaatatgtagggggaggtgtattcagcagtgtgtagtaacagcggtgagttccagttggagattcaacgattctgatgtgtagaaaccacagggaaaactttctgtatagattattcatcagtgtttatgattggttgacattatctgttctccatttggtagaattagatagcatagcagatcatatataggcttgcaagatatgaaagttcatcacaaactctcatcaaatacattgagatgcagttttcttttttctttttttcatctcacactgctggctgacattgctacaaattaataactgtatcagcaattttttttttattttttttagagaagggtattttttacccggtctctatatccaaccggatatatacggccattgaaataggaaacttagccccacaaacaacccaatctgaaattcgctccatagaagatttgaactaaggaccttggggtactactcaggtcaatgtaaccactaggctacacgtcctttcgtttattgcaatagggaactgtatcagcaattgcagaaagaaacaaggcaaattcgtttattgcaagtttgctgatgatgatgcatgtacttcctccgcccgcttgagctcctgctgctcacgccagatgaggacggcggcgagcaggaggacggcggcgccggcgagccggccggggacgaaggcgtcgtatatgacgacgaggcggcggaagacgccgtacatgaggacggagacggcgacgcagcaggagacggccaacttgagcgagatgtcgtcgtcggcgtccgtggcctcgtacagctcccctcgcgcttgctgctcctccttgtccggcggcgacgtcggcttccggcgaggccactccgccgctctgtcaacgtcgtcgtcaaaatactcaacggcaaaacggacttttgtctcggattgatcctttttttctcttttgatccggactcggattgatcgttggttgcatgggaaacggactctgactcagtcggtatccatccaacacgcactgatcacgtcacgctctgtttagatcaaaggttgggtttagatccaaagtttggatccaaacttcagtcctttttcatcacatcaatatgtcatacacacataacttttcattcacatcatctccaatttcaaccaaaatctaaactttgcactgaactaaacacaaccaaaaataaaaatttggtctaaaacgtcacatcaaatgtttggacacatgcatgtaatattaaatgttgaaaaccaattgcacaatttgcatgtaattgcgagacgaatattttgagcctaattgcgccatgatttgatagtgtggtgctacagtaaacatttgctaatgacggattaattaggcttaataaatttgtctcgcagtttacaggcggaatctgtaatttattttgttattagtctacgtttaatacttcaaatatgtgtccgtagacatcaaaataattttggcgaatgaagccttagtaaatctgttaatttttgggtgaatagctagtttagtctagtcgttgctcaagttttaccgaaggctcaatttggtcctccaggtttcattttgttcacataggtccccctaggtatttgtttcacataatatgccatatggctattgctagtcaatatttatgttagaaaatatcccttttgcccttaatttgtatataactatacactagataagagaaaaccaagatgaataaacaacattgcatatgtattttccattgttacaacatgtgcacatgaaacttaagcaatggctatcgtatacacttgcaagtacataatttatttttgttttacataaattactatgcattatctataaaaaaatcattgcatgcaattttttctcatatatgtgaacgagggggtacaagtgtcatttatcaatagagttgttggttatgtttacccatgtggcttctaagtgggttcaaagataagtttgaactaaaatgaaaacttgaaggactaatatggatagattgaaatatcgatgactaaactgagcctcggatgaaacttgaaggaccactttagctattcacccttaatttttctcacaataaccacaaaactttgtcacaaaggactgttttgttttgttttgatgccaaaacttaccttatcaaatagttggactaccttgtagataccaaattagggttattggtctcgtgttagccacttcaggcaccttaaggattgacacagacatttccataattttgacaaattggtccttctcaaaagtttatttcaagaataaaccatgacaaaaacttattttaagaataaaccgcgacctcagcgccatacctgatgacgctgaggtccaacataacagcgccacctattttggcgttgagatatatgccgagttgacgtgttacaccagaccagcagaaggtcagcgccaacccctcggtacatgttaaataaataatatgccattctatcgaacaaactatggtgatttaggaggatggtaacgttgtagttggtcatgggtcaacgccaacccttctggcacatgttaaataaataaggaaaaagtacaaaaataccccctaactatcgcgtacgatcgaattactcgtgatagtttagggggtaattcgtacttttttccatatgtcattctatagtacaaactggtttgggaggatggtaacaattaatgccaagctgattttactactacgatgaaaccagatgaaaccagaacttcgatttagttgggcaagtaggtgtattaacgcatgtttgaggtcagtgccaaaatacatggtgctgttctgttagacctcagcgccatcgggtatggcgctaaggtcgcggtttatttttagaatatatttttgtcacgatttaattcttaaaataagcttttgagaatggtcaaattgtcaaaattgatggtaaagtaaaatacttcaactattttttttttctgaaaatcacaatatttgcacaaccgctgtgttctccagtgattctccatcttcttcctcatagttttctctggcccaaagtaaccgatctcccaaatacctgagctatcatgtgataagcatcagaatcttcctcctgtcatgctccccatctgtcatgctcccctaaactttgtagccctcgacgcgacctacaactttgtagttgaaaaatttttgaataaaaattgtttatggtcccaaaatattgttgcatgtttatagattttgattaattttaaaattacattttgggacaaaaaatgactaaaaataaaaaaaaatcaactacaaagttgtagatcgtgtcgagggctacaagtttgatataaagtttgtcttcattagagttcacatgaaaaagttataaattatttttaaatataaagtctttagaccgtcctatttgacctagatgatattcaaatccaagtttagggaccggggtgacacaactaaacaaattggaggacctaaacgagtgatctgtaagtttagggaccgggatgacacagtcgaacaagtttgagaacctgaacggtagattggcgagtttagagaccgggatgacacaacggtacaagtttaaggaccagtgataaactttattgtgtttctgcagttatgtatctgttttttctctctctgctgaatcttgttcctttttgctgtaagactataaaatactatgtagttttctcattttgttaatgaaatggaagaggtatatcctctctttctcaaaaataataaaaaaaaactcgtatgaactgtaccagtcaacgttacaaaattaattaaacaggaggagaaagcagaaagttctcgaggacctttcgcgcgacatccctggtcaacctggcccgcctgcgctcacacgcatcaatcacggcgagtacggaggtctccactagtatcactaggccccaagccaagagagtcagcatcaaacccttggttccgcggtagacgatggcaagcgcgaacatgaacaaggtgccgaagaggccgaacagctcgaacgggacgttctcgttggaccaccaggtgtctcccgcgacccgatgggtctcggagatagcccccgcggtcacgctcacgtcgctgtcgttcatccccgccgcctgcagcctcggcaaccactccagtggcatctttccggccgcgaacgccgcatcgatctcggcgtcgatgttgttgttgcggctgatgctcatgctgtgatggatgatggtcgtttaattcttcaattcaatttatttggttgcgaacttgcgcattgcgatgccaatttctatagctcgtgtgctttgggccggaggggtcccttttgggtgatgtatatatgcactttgatgtaagctggaaaacccagcaagacaaatttgctttctatataagcaaggtcgtttcgaccttttctctaaaatttgtagctcgtgctgccacaagccgcatccgactcggaatcgttacatctcgaattcttggtggttgccgggagatcgacgcggaaccaggaatgcgaatcaaacaggagaaagcagatagtgtcggagaacagttcgcgcgacctccctaatctccgtggctcgccggcgcttacactcatcggacacggcgactagggccattgctacgtagaacacgcccacagccaagagcgtcaccatcaagcccatggtttcccggaagacgacgacggcgaccaggcacaggaacagtacgcccatgacgccgagcgcgatgaacgccattttctgcgtcgaagaccaggtggttcgcaggatgatcaggtgggtgttggcgatggacgccgcgatcacgttcacgtcgttcccgttcagccccgacgccagcagcagccgccgccactccggcggcattgctccggccgcgaacgccgcctcgatctcgccgtcgacgacgttgctgctgctggtggtgctcatcctgccgccgccgaatcgccgatggatcaatgctccttttgtccgtacagtttccgttgcgaacttgtatgtatgcaagtgccacggcccaaatatgtaaacaaag

SEQ ID NO: 22796 - DNA, 4588 bp, Oryza sativa
cgtcggggaggtgctcgccatgcgcctcaaggtggacggctggcacgtgagcccatacacgctgacgccaccaaggaggtggagaagaaggggttcaagaaccgcaccaaggtctgggccatcctcaacgcgctgcgcgaacacggcgtcaacctccgccttgacgacgacggcgatcataggccacacgtctgatgggcgacacttcattcggtccgtcaactcgtttctttttactactatcattcctctgttgaatgttttatattgttgctgaaacttcgaaagattatagaattactgctgttgtagcacaggtatcaaatcaattgtttcttgaaatcgactgttgtagcatgggaattaaacaacggataggcttcggagacgcatgaaaacttcaattaaggttttggtgtactactggtagcaaaccacaattagactacagaaaataaagtttatttgcaatgaaaatgcattttattgactagggtagcatgactcatatggtgagtgacttagtgcttctagtttatgataggcttccagctgattcagagcactatccatcacagccttcttactaccattgatagcttcccgcgactgtttaagctcacacctgacagcacccagctctgtctccaggttctgaatcttcagcatgtccctgaccttctcgagttccctgatcttctgctcgatcaaaggcaagctctgatggtttgattgaactattggtggtactgagtcccaggacatatgatcttgtattggtagagctgatggtgtattatgtgcacccttagcattggaactgctccctagaaccattatcagtttctgcgagcaaagcagagctaccagttcagttcagaaaatcaatagtggaagcgtctaggtcaataatttagaaactgtatcaaggttctgttgatctgacagattctaacttcgtgtactgtaaccctataactttggcaagttcttctttctgcggtttgatttatgtttacatttcctgtcattcctagtgcatatcaagttacatcaactaaacagattcagtttgaaaaccaagaacatgcatgtcattctacagttatgcagtgtcagtgattagagaaaagctttacctgcttgctgttctgaacttgttgatcagggtacacaattttgacgtctttccttatcctcctcttgagccagtgacaaagcattgttggattcaccttcccggccactgccacaatccctgtatcaacatctgctactgaagtttcgactccttcagggcaacaaaaaatcagtcgaaatgtctccaaccatgatgatcgaaataactttcaaaaaaaaaaaattctgaagaacatgagccaggaaggctgtaccagtgacgcttccgatgcaacccattgccttctcgatcttcctgatgcaacccatgcagcggcactgcatgtcgatttggagcctgaattgcttcactccatcctgggaagaaccaaagctatcttgttaactctgatggaaacaacagaaaacatggtcatggctcaaagaagaacaagggaaatctgctcaccatctccatggccgagtttatccgtgaccctgtttgcactagcacagattacagtctaggtgtgtggtttaggagaaggccaaggtgagtttaagtacatttttcaagtcattaggtagttaatgagcagcatttcttggttcaccgccaattaataggatggaccaaaattctacgcaaattaacagtgcgttgaatgggaatgagaagagtcactgttacccgttcacattagtcgctgttccagtcttcgaaatatacactatattatccttttttttgtgagagaaagtatacacaaaaaataatactagtgtgtagaactactactgtactttctctgacaaaaaaataaaaaacatacctattaaattattctttttagagagtatatataggtaggagtaattctttgtgagaaaattagggtattagggcaagtgctatgatagatgtgactaccacctctaaatttatctattttattcactcatgaactaagagacaacccatacaatgtatcacctctagtacacaaataccaatatatttaatactcttacatccttcttgaaatttgtgtggaggttgcctcttaatttaggggtggctcatcatctctctcctcacttctctcctccacatcatcactcaatccaatgtggcattcttaggggcaacatatgggccattatagtacttgcccttatggtctttaggggcaaattttgatggtcaacgtatcctcagcaaccttgcggacatatttgcaaacgaaaaataatttataaataaaaattttatatatgtgttcttagcgatctaaaagcaaaggctgaaaaataaacttcgatgaaaaaaaaaccttaaaatcaactctaaatttaaagttgaaaatttaaattttaactgataagtataaacataagcgaaaagatgaggccccaagtttgtaatacaagatggcatagcgacaagcactgattctgtggttcagaatctgccaagcacaagaaatacggtttcagcgagtggcaaaaagaaatatttcccccgaaattaaagctaacatctagtagcacttgtggcccaagacccatttacatttcgcagcaaagccatcgtgtattcaattcggcccaacagaggacgtagggcctaaaatggcaatggcatccaaacgaggggaaaagaaaccgcaggccagaatgtctcgccggcggcagcagccgggctccgactccgacggcgaggacgacagcttcctctaccgctacccgctcccctccgccgccgctcccggcgcctcggggccctcctcgcacggcggcaagcccggcggcggcggcggctcgggcggcctcgcgccgtccaagtcgacggtgtacgtgtccaacctcgacttcgcgctcaccaactccgacctccacaccctcttctcccgcttcggccgcgtcgcccgcgtcaccgtcctcaaggaccgggactccccgcggagccggggcgtggcttccgtcctcttcgtccgccgcgaggacgccgccgcagccgccgcccgagatgcacggcaaggtcctcaacggccgcaccctctccgcctccatcgcggaggacaacggccgcgcagccgagttcatccgccgccgcgtctaccgcgacaagtcccgctgctacgagtgcggcgaggagggccacctctcctacgagtgccctcgcaaccagctcggcccccgcgagaggccgccgccgtctaagaaatcgcggcgcggcggcggcagcggcggtggtggaggaggcggcggaggcggtcgcggggcttcctggcagtcggatgatgaggatagcgccgcggcgttcgaggacgacaggtgggcgtcagtggtggatacgagaggggaggaggagaaggcagctgggaagggcgaggggaaggcgatgaagaaggagaagaggaaaggctacttcagcgacgagagcgatgaggatgaggactgagttttcagtgtatgattccagcgttcttgtgttatgtgagattgtagcttctgtatcctaggtttccagaaatttcttgagttaattgatgaataatttcttgcagcaaacttattgccatctgcatttccatgctcccatgcttgctaagcttattagttttgaacaatatcattgctctggttagttggcatgctgagaggaacttgctcattgaaaagaacttatgctgttcttgatataacttatgctgttcatcactgatctgctaaccgacatgcttacatagttacattgttctgtttaggatatagaaagtatagatcaactatgggttgctgatgacctgatttcttgttttcatttggtaaggaactccttttttgctgatatccttttggaaccatctgatgtgcctacccgcagcaacattttttagtcttcttatatatgtgtgccccgctaatccttttcatccttcagatcgagccctcgtattatgctagtgtacatgtgttgcaagccactgcctgacatacaaaggcatattatgtgtaatgcttggttgtcaacttgtaagttagcatagggatgcaaatcatcttgttcctaacatggattcgaatgcagcattttaactttgcttctgtttaagaaaaataaaccaaatccatatccagcaatcctgttatttcaacaatttatgttttgatatcattgtgtttgtactgttcatttgatttttctagtagaatacaggaatatggttcccttttacttatagatgcacacttaagcacttgcgtttgtacctaacagtaccatatttaagctgttgaagtccctgtcttcaaaattctaaatgagacatatataacaggggaacaaaatgtctttagagtttaaaaatctcatatgtttaagataaacaacaatggatgtggattgatccaaatatttgctgaagccaactatatctgatgcctgataaggcaattgggcagg

SEQ ID NO: 22797 - DNA, 2159 bp, Oryza sativa
gttatttttagtttgctatgtagagctccttcctttgcttataagtgattcaacgaatgcaaactgtggaagatatttaattttgccttaacaaatttatcatggtgctagtagtgccagtatcagggctctagattgtctgtgctggaacttttcatccttttatttccatcctggagatgcatttagctgtacctgaatgccaatgctaatcatcaagataataaggatatgtctgccttttccaatgacacttgaggcccatgctgctttctttctaaattttgtagtcaaatgtatgttctcaaggacaatgagttggaaccttcgttgcgttgaagggggctaggatgttcacaacatctgttctcaggtctctggccttaaatttggtgagcaaatctgttttcatgaatgacaggtactaaatgtgcttttagatatcctgcatttgaaagtcttctacattatttgccctaactgatagatactgtagacaatttctggatagtatctcattgagagaacataggtcttatctctactttggctgtttccatcagctataagaacatgaaaaccagatgattccatatatgcaactattatccctgtctacaggtctaaaaattactcctcacaaaagcacatgtttacctgtcagtgtgaacttaaatttgtcattgtcaagtactccctccgttctaaaatataaggcacaaccacccttaatccaaagaccaagaaacaattattatcacctcctaatttgaatcaccctaataaataaaatgcatgcaaccaatagaattagagatcttgagggtggaggattttaaaaaatcataatttatgtagaagaggtactagttaattgcatgcatgcatgcacgccttatattatggaacatctgaaaaaagtagttgtgccttatattatggaacggagggagtacattttagaatttagacatactaatggcatttgttacagttcagaaaatccaatcttcttaaagaacacaattttttgcgtgaataacagcaacaatctctccaaaaagaacacatcatcatgctgtacgagtgcaccatacatttttgttttccaatggacaaacaaattgaacaaaggaagcatcctatcctccaatatctataacttattaagaaccattgctgtgtcaaactgtattttcagagaagcatgccaaagaattgaagtccttgctgctttttttcggcaaaagagggggaagaagactttgctgctggtcactcagacgaggggcaagtgctgtagtatcctttgaagggactatcacaggtgatcaactgatcattgatcaatgatcagtagccagcaaggattattgcacataagcatgccaagaacgtaaatatacttggggctaacctggtttagatatatttcaccctatgatctcaatcaaattacactggcttggaaaatatcaggtccatcagtgagagtatttacaagtcaatggtttctttggtatatgctacttttcaaaactgtattcccattgtcaagtactccagtgtaatcagcagttcctaatctcagcaacagattaaagactaatccagctaacaggagacctgcatctgattgtggcacttggtaccttgcacaggctgccaaccattttttgggtttccctgggtttctgaagacatcccacaagctagtgaggctcattgtgtcttcatgagaaaccagtgtgaccaatggtgatccttgttgttggactagcagccagatgaactgaaatcttgattgtttggatatctgctagtttataaacatgaaaacactcgtgtaaatctgcatcacatgtcatcaagacccattctgaatcgtcatccaaatactttacaatcaaggaattcatgtctgctatactcagacgttttgatatctcctgcttcagttcttgaaagtcacactcaggtttcaatctgaacctcaccttttctgagccaaaagtgacctttactctcatacctacatttgcagtctgcttgggggatgatggactttgagacatgtgctgttcaccatttgccttttcagcaacatcctgtaagagatctattggtgcttcctgacctgagaaatgttcatttattga

SEQ ID NO: 22798 - DNA, 6159 bp, Oryza sativa
aaattgttgtcagatgatacagaggtgtttgtgaggtccttgtagagggtgttaagctggaaagctgtctctgctccatgaactgaatcaatgatttgctgcagtttccttagagaatggtctactttctttatcttccgtgatggccagcggtttatgccatgctgcctgcatattcttttcagggtggttgggcacactgtgagagaaaaagatgtggtgagtatatgtgcagccaattttaatacagttgctttttcctcttttttgatttttttaccactagatcaaacacatataaatcatttttactaaaaaagaatgcgggcaagccatgtagtatatgcacatgatgaacagctgtctttttttcccctggaaggaataattttgcctattatccatggaactcccaaaccaactattctgtttctagaaagcaacatggcacaccaacttagggacttgtttctggactgtagtgtgttacatatttcttgtctttatatatttttcaagtcatgtttattgcatgaagttgctgctcagctgtaagtaataattgcatgagagactgatcaattctaggctatacatatctgctcaaacagccaaaaccgtacagttgacttgctaactcattctccctatttccatgaatcagtttacagtgactaaattttaccttgtaccttcatgcaatagcacgaatcacgaaaaaatagggtgataacaatgctcacattctgactataaggtgcatgtgaaggttgaccttttttatggaagaatgttttcttattcagtagttaatgctggcgtcatggcttgggtttgttaatagtttaatggctgatggtatctacttaaatagtaaagtatacatagctgaatcttgcatttatctgataagttaatgtcactcacctccaaggctctttgctgcatccttcaggctcccagcaaagtactgccgaaggacctgcaagctcacggtcttctccgtctttgtacgccttttcactttgctaccttctttacttgtttgatcaccagcttgagatgaaccatgccctccatgtgataacattccatgtgtatgcaattcagctaaatctgatcctttctgtgaagtccctactaaggttgtccaagatgcctcctctctatcccctcttgtgttgtctccaaaggataactcctcaactttgttcttgccccgaggactaaatgagttcagctcattcatttctctcatggcctcatcctccatctccttgtcagtaacaacacgtaaagtttggcaaacacttctcatggtgcctgataatgagtccagcactgccttctgctcctcaagtacttcacagtcagttggcagaaagaactctagcacaaagtcggcaatccctgtgcgcgtgcaacgcaatcggattgccactgcaccttttaaattgaaaatcttagcatggtgagacaatgggtactccagtttagtggaggatccaatatctggtaggaagcatggctggtttgtggtgaaggctttccctgcaaccccctgcccccgtagcaggtggtgttcggagcaggcctcgtggaagctctgcatccggggttcattcacatagcatgctgcatcaatggtggaaatgcagtacttgtagttctcgtcagaatggcgactgccccgctttccttgttgagcacatgtgacccaggtctgagctaatggtagcttgtgggtgatgcaggctgctctcaggacttctagtatctctggtaaagcatctttgtaggaagcactgttaagctggttgataatcaacaagaacagccataagtcacaagaatatataagcacatttttatatcaagatctttatatcaacatttacctagattggtatttccttttctaaagaatgcaaaatttaacagtagttctccaaatcatgccaatgtcaggtgttactctatcatgtgtttacaccatatggttatggtatatataagtactactccctccttttcacaatgtaagtcattctagcatttctcacattcatattgatgttaatgaatctagacatatatatctatctagatttattaacatcaatatgtatgtggtaaatgctagaatgacttacattgtgaaacggaggaagtacattgttttgtccgaaatgaaatacatatattgccccaactcaaaactgtgatacaacattctcaaatttctgttgctgcttacctttgcgcgcggaatgcttgaaacttctgtgcttgtcaggttaactgcctgcaaagagcattagcattaagaaagtccatatgcctaaaatattcagttacttcctactgtaatcaatagtcatcatgtcttggtgaaaccatacgtgctctttcttgtgcaaccaagtttatttcttggtcagatacttacaacaagatttcttttttgaacttttcagagtaagtgatgctcatacctggagagcactgcaaatggtattgagctcggaggtgaagttgagcttctgcttggtcatgatcaactcgatgacacctaagcatgagtagttccccctctcaaacaccggcagccccatcgtcccgtggacatccaaatattgtgcatggttgatcctagggtactcatagctggtgaagtatcgaacgtctggtgaccattcaggaagcctaccgatgaacaccctccctggtagcccaggtgaggaacctgaagcaacatctgcagagaactggtactttgtcgaaacctccctgaactgtatgaggctattggacctctgatcgagagtgaatggctgcccgctcgtcgtcaacaccagctgaccatcgttgcccttgactggcacccagagctgcacaagcacatcggcgtcgctctgtgtctccctgatgtaagctagagcttggtcaaaccgttcccgaactgaggtgcttgcaccgctcggctgaatccaccatgaatttgcaggtgtggtggtggcgaccgaagcatctgtcaagcagttggagggggtagcaaagaagttgggtgagcgtgaagtgtttgctgccacttcaagccaggcgttgtcggctgagagaagctgctcaaggagatccaagtcgactgccgccgccgcgccttccgacggagtgcgtgccaaggagatgctgggctgggggtctccctcttccatgcaggtaaggtttccttcagaatctggtcacagaatttgacaccatagttactgcatcagtattaaagccaacaagatggttttgctcttggaaatgatgacaagaacttgggcaaggagcatgcaagtcgtaatacttctctcctgttcggaatcaagaagtaaagctcgctgcacatcttgggcaaggggagtacaggagactgggagtcctgggatgaattttgtgctagatttgcctgcgtttggattgcagggtgtgggtagtagggaagaacacatcattttctacagaaaggaagcaaagaaagagattgatagagtagtagctcactggtaatcgtatgcctcccttctcctcatgaaaaagtctcctttcttcttcctagctcggtgttagcctccaacaagtagtagctctagaaaaggtttagtgctccaccagaacacctcccaccattcattccaaaggcatctgatgaatcttgctgctgtaggatggaaagcaaaattgtctatgcttggcctgtccttgctttggttttgcctttgtttgtctggttttgtcgtaagaacaaagcttatggggccaccgctgcattgttcttttctttatttgttagaatctttccctctcactgagggacccagcaccacacaggaatccagccatacccacttccatttttaaagtcaacttgatggtaattatgttgcttgagacggattcctccgtatgaaatcctcccttgcaataccatgggtaattgcgaagtgggggcaaactagggagggtcgtttttgacagaattacagaactaaatcacctattgctgccactatgttatcagagtacagttttttctttatttgtttgattgtagttttacacatcacatgctgggcatgaggccacatagtagactactaaaatgcaggccacaggtctaaccacattggtgactgcataagtgcatagaggggatcaggggcggtgtactaattggagattccatcgttccagtatagctgtgtacttgtgtagagtagggccaaataaaatttgtcctctctattcattggacggaaaaccacagattccgtgacaattatctgggagttctagtatcttcccactaccttggcattgatctatttttatttataagaacaagaaaacccttgttgtacacacaaatatttggttttctctagcagcaaattgcataaaaataaatctttattgtatgaaacttgtgggcaaaagatctcttgcaatgcatttgaagttgcactgtcaagtgttgaactgtcatctcttgtgcagtatccaggctaaccattccaactttttatgtaaaagtgcttctatgctactcgtaaaaagataccaaggaagcttcattaatcagtacagtgaattatggagctgtctgtctctggcaccaactcagggtaaatcatttttagccgttgatgctatgttagcttaaacaattttctctggagatcaccgaactgcttgcttatttaaatgcacactgtgcttattcctaggattgcatctcgtaaaactgcatatgtacggcctgttacttgtctactttggattggttagtgttttaatttaatcatctttttattataagatctttactttcctctattttccagacttgtgaatattaaaaagtaggggtctgttccaaacaaagatcaattaattagttgcataatggtggttttggtggacatacatgtgatccccaataccaatttgaaaggttaattgttctagagaaactcaatgttgtctcagtttaggaaggactttaaagattgtcagaatgttaacttgttaacttactatatttataggttaagtttgcttgattccatccatgggaacgtgttcttgtcccctgttcaggaaggaaataattaatatacttatttgattcattattccgtgacatgtacaggaatcttgatgcctcttggcaatgcaacaagccaacaccatacaactgctataatttatatagcttgaaccttttttctaactttttacatatgaaatgcattacataccatttcagttattttttttctcaaaaccaattattcagaaatcaagactggagagtagcacccttatattgttttgatttaaccataattgcattaatcaagactggatagtatggtagagcactcctttacattttgtattcctaatgatctaacctgttttctagtgctcgccgtatatttgtttgatgcagcatagagggggtgtacattgcttggattaattggatgctgatgagaagacactagttggagagtgacatcaaagatatagtacaaggcaccatgaatactcatcttcgagtcaccttgacatcattcatatgaaaacaaatgctatgttcacttttcttttcctgctttccctttaatataatggttcagtcactaccctagagcccactggaaataaatatagttgctacttgtctcatatttgaccaaaagcttgggttttctttagtggcatgccaatactaccatcagctctcctccaccagctatggaggtcttcttaattcccgccaatcagataccggtttggttgttaaaattctcctgtgggtgggccccaacccaaaggcaacctaatgtttggtatccatgaggagtcaccaccaccatggatccaattggcattgggcatgttaaactaatatagggttgctgttacttagcataaaactgtgtaaaatgatttctgctctgccatctgttgcatgctcttgtatgatttgaagacagggtgtaaatcagttctgaatatttaccatttttctccaagtaattatttaataaccctgtccacactgatgaattctcacaggacatttgaataggtgggatcagttat

SEQ ID NO: 22799 - DNA, 2008 bp, Oryza sativa
tgatattttagaacaactttcatataaaaagttttcgtacaaaacacaccgtttagcagtttaaaaagcgtgtcacataaatccaaaacttcatccagtctttttagtggaaatgaacggggcacagtggtgttcttttctcctgaagatgaagattaagttttttacgcaaaacgaggtggtattaacgtgtgattgattgagttttaattattacaaacttaaaaaaatatattaatatgatattttagaggaactttcatatagaaagttttcgcacaatatgcaccgtttatcagtttgaaaaacgtgtcacaaaaatcttaatctccatccaactcttgttggagaaaataacggaccgcttgttgctgttagcatgtcaactcttggccggtcaggttacagccaatgagtgatctactaatctgacagcagcaagtagtaattagtagtaacacattttcttctggctgaatctgcgaatcagtgatgaaacatgaaacatgacactggcatacaatacgactcgtgtgcgaagaaaatatttcacatttgcacctcatcttaactagttcaagatgaaacatggcaatcattttgcacgcagaagaaatatcagcacagggggctatgaaatttgcaggttagttgaagtagatgaagtgatgaaccatccgtctatccagagcatttctttggctacggaatggaatgcacactacgcactgccgatatgctctgatacactgagagagcatcagttggcagatataaatggcttattgtcacaaaggcaacacatgctaaccatgctatagcattcaggttgtcagctgggaagatttcagaatgaacttcttcaacacctattatgccgtgacatggctgaactttcagcttctcgtcagcggggtggaaatgccagatgcctaacagaagcaggctgagttggtaatggtagagcatcagtaggtgaaagcttgttcagtacattcagaactttcatcttctgcagctctttccctgacaagaggatacaaaaataatagtcaatccaaatgatcctgcttcctaaacaaattcaggatgactgatagctgaaaaaatagcatggaaactgaagtaatacactaatactgacaaacatgttcgaagcttcaacaatcagagtgaagaataccttcttcaatcaagagcttgactgctctgttctccagctcaatggcaagcttgcttcggccaacagatgacaaagaccgaagcactgcagtttagtgaaaggaaacagcgtattagatagaaattgtggcaaattgtattgaactaagataaacataaacttactgtggatatattcttcctgtcctgattgctcgttatttctcaagaaagcctgcagcctaataaacctctctttccaatcttgattgcttgatctttgtggatcaaccggataacatgctggagcagcaccacgagatgctgtactagtagccgaaacactagaagatgccaaattagctgctatagaattctgagaaactttagtagtagacgccagattgcgaggtggactagcagccgcaacactagaagatgccacattggctgctataggatttcgaggaactggagtagtagacactagattgcgaggtggaggactagcagccgcaacactggaagatgccaaattagctgctatagaattatgaggaactggagtagtagacaccagattgcgaggtggaggactagcagccgcgacactagaagatgccaaattagctgttatagaattacgaggaactggagtggtagacaccagattgcgaggtggaggactagcagcggcaacactagaacatgccaacttagctgctatagaattctgaggaactgaagtagtagacaccacattgcgaggtggaggattagcagtcactataatacttggctgaacaaccacctttcctagagattgctttctgagaaaattttgagg

SEQ ID NO: 22800 - DNA, 13085 bp, Oryza sativa
tgtgggttgtcaccagcaggcatgatgccccgcactaagcgcctggattgaaatttccaatcatcagtgataaatttgcaaaatagtaacatgttgaatattagaaaccagccaatacattagtaacgacttgccaaatcatttgtagcattcaagttatgtaattccatatctggctttagtttcgagttataatctgatgtggtattacacaatcccaggccattgcagtatgctaacattttcctttctagaaaactcaccaaaatatagagtactacagagctaaaaataataaaacatcaacaggaagcaaatgcttgtttcatctacttgaggtaggaatttcaatctatcaaccaaataaaccttgcaagccagttaaagtgaactgatgagactacaacaacataccaagcggcgactcaagtagtaaaaaagtaacagcaaaagaaaagaattacacttgtaccaaaattgtagtgcaaagttgcatgccttccataacttatggtagacaaaaatttaaaatccataaaagcaatggccctgagcccctgacagcctgactagtcacaaccttaacactgaccagggctatcagcaatttcaacacaaggccatgaatccaacttgttatatactttcagttttcagacattatattttcattcaaaaaaatgtggttatgattcacattactgcaaaaaggtcacgaatagcataagttatcccctacaacactctgtggtcaggttaatttctgcagtagcacatacaaaactcactaacatcaaagatacatagcaaaaaggggaaaagaaaattttatcaacacctctaagagcgcataatctactccaggtgatagcattttccaaatcataattaaggaatagttgaccaagaaccacagacccactagccacacaaccgtgggggatcggattagaccattgaaatataacctagaaccctaaatcaaaggtcccgtggcataaggccagatgcagcaccccaaatccacctataaagaaaagaagaagacgaagcacatccactccctctcactcaaagatcaagaacctcaaaacactctcaccaatccatggcatttcaagaacaagaaccaggcgctaggcacattcagcaaattttccaatccacccccaaagcaactgcaagctctgagaaaagaagaagtagagatgagattcaggtggttacctcacctcctggtcgcagagagaggggaagcgagctcggagcctcggatcggaggctagggtttatcattcacgccctgagagctcgggagagctgagttgtgggcgaagctactgcctgtatactgactctcctactgagcgtgagaggagtggcttgtggctagctgggctgggcccaggtgaaggcctcgttgaattcttagcccgaatacagttttgcatcacttcactggagccttgggctggaagagctaaggtgtacggcccagatgagcgggcccatcatcaaaagtagattactggagtacttgataacacaattacacaagcagttacgtgtcatgactattgtttttctccattttgttctttccaattcaaaactcaagcaaacgccggtcaaacggggaaaacgacagtcgcacatatcagagagaatttatttcagtcaaataacaatctgcttatcctttttccaatccttccgctccaagttcccttgtgtggcttccactgcaagcctgaaacttcgggcctatttgacacagctctaactctagctccaccccttttgaagctagagctcagccaaacaatttcagctccatcaaaactgggagtggagttgggtggagctttctcacaaaatgtactggagttagttgggtggagctctctcacaaaatgtactggagttgtggagctgggtttaggcagcttcacaactccactccagactcaactcctgtagttatatttaggagttaaggctgtaccaaacaggcccttcaaacttccctcggatgaaaagagtctcaattgaaaacaaaaagaaattaaatacctaagaaactactagcactacggtgatatttttttcccccaactgaagatgaagacgaaggtaggacacgaaaaataaaacattacgcatgaataattgaattttaataattacaaacttaaaaattgagtttatctgatattttaaagcaatttctacgtagaaatttttatatgaaatgtactgattaacaggttagaataggtgcaaaaatcaagataatatatgtatctttacccgtaaagaccggagcatacctcttcagcttttcttaggtcccattcttctctcatgaatatggaagattttaccttagttttcgttagcacacctttcaaatactaaacgacgcgttttatggaaaactttctatatgaatattgctataaaatatcaggtatatctatttttcaaatttataataattaaaatttaattaattatgtgttaatagttttgcatgtctcgtatttaatcccgatctttataagattcgaacgcagccacgtcctgtagctgacaccaactcggcaacaccacatgtccacatgtcatagcagctaatgtttgaaatccgaacagtgagctccctttgtaaaaaaaaaaactcaacctattactagatctcatgttttctagtacaacatatctacatgtctagattcgttgtattataaaacatcacatctaatattaggttaagttttttttttgaagtatgcccacgaacagcagattatatgatttcctgttaaaaataaacagctcacatgactgagcaccaatacctaaaccaaagtccaatctgatcacggtcactaaattaaaatatttgttgttggtgtctcacgttttgtttttaaacgccgtgcagagtgcagacatcgacgacactgtgacacactgacacacacaaaaaacttcaagaatggatcaccggacgaagcgggtggccatcgtcggcgccggaacgagtggcgtcgcggcgtgcaagcacctcctggcgaggggcttccggccggtggtgttcgacgccggcgcgtccgtcggcggccagtggacgcgcacgctcgcgtccaccaggctccagtcgccgcacgtcgcctaccgcttctccgacttcccgtggccggactccgtcgactggtacccgcgccacgaccaggtcgtcgactacctcgccgcctacgcgcgccgcttcgccgtcgacgagcgcgtcaggttccggtccacggtcctcgccgcggagttcgtcggcgacgacgcggcggacgggtgggagcggtggaacggcaacggcgaggcgttcggcgacggctccggcgcgtggcgcctcaccgtgcaccacgacgacacggacaccacgcaggtgaggtggttcattccagattgaagaaaaacagaagctctctcccatggcgcccctgacgccccgttcgtcgtcaggtgtacgagttcgacttcctcatcctctgcatcgggaggttcagcggcgtgccgaacatcccggcgttcccgcccgccggcggccccgacgtgttccgtgggcgggtgatccattccatggagttctccgacatggacgacgcggacgccgcggcgctcgtcaagggcaagcgcgtcgtcgtcgtcggctccggaaagtccgccttcgacatcgccgccgagtgcgccgaggccaacggtacgtaccccagctgcgacattgttctctgctcgatgaactaaagctgttcatgtcggtgtcgtgtcactcatgtcaggcgtcgagcagccgtgcacgatgatttgcaggagcccacggtggctactgcacgacaccaatgtctggggcaaggtggacatcggctacatctacttcacccgcttcgccgagctgatggtccggaagcccggcgccggcgtcgcgtcgaacctcctcgccacgttcctgtcacctctggtacgtacgttcgccgccggcgacggcgccggcgagcatcccgaccacattctgagctgatggtgtctgtgcaggggtggttgatctcgaagctgacagaggcgtactacaagaaggagataccaatggaggagcacgggatgtcgccggagtacgggctgtcgaagtcgctctcgtcgtgcctgatcggcatgctgccggagaggttctacgacaaggtgaaggaaggcagcgtcgtcatcaagaggtcggcgaagtccttcaccttccgcgacgacggcctggtgctggacgacgacggcggcggcggcggcgagcgcgtcgtccaggccgacctggtgatcctcgccacggggttccgcggcgacgagaagctgaggcgcatgttcgcgtcgcgccgggtgagggacatcgtcgccggctcgccggagaccgccgcgccgctgtacagggagtgcgtgcacccgcgcgtgccgcagatggcggtgatcgggtactcggagagcgcgacgaacatccagacgtgcgagatgctgaccaagtgggtggcgcggctgctggacggcgcgttccggctgccgccggtgcggcggatggaggcgagcgtggcggagtgggggaggtacatgaggcggagcgccggcgaggagcacttccggcggtcgtgcctcggcggcgtcggcatctggtacagcgacgagctgtgccgcgacatggggtgcgacccgaggaggaagaaggggctcctcgccgagtggttccagccctacggcgccgtcgattacgccgatatccagtaactttttttttatacgttgacacgttgctacaaataatgcagtgtaaaagttgaattcagaggatctaaagttgaattctgggagaggggctaaagaaatgagtggtgggagaatttggtaggtgtagtatgtggcaatggtatgttaaatgggccaaaataagttgggccttaggctagtactagttgggtatatggttgtgggctatatgggcatcttattccgtattggagaaaagtccaatgtaactccctcaaaatataggtcggatctaattcccgcccatcatctgtaaaaccgatatatcgacacctccaacaacttaaaactgggtaatcatatgtaaaaccaatatatcgactcttccaacaactattttgaagggagggggggttcgctgacatagcacattgacttggtctaacaggttgactgaacatatggggttcacatatcagtgcctcatcttgatctttcttcccctctttttcttcactcggtatccttacttttcttagcctcgttatctacgccgagaattagtggcaagagcacgggatgggcaatagatccagggccacaacgacattagggagatggtgagtgactggtgtcgaggtagacggcgagcgcagttgccacgacattagagagacaacatcgaggagctactgacagccacactcacgattagtggtgggagcaacaagagggagagacgccaacgcagcgcagctcggagccacggccggtaaaggagtcggtgatagaggccagagggagctcaaagtgacgactgatggaggagtcggtttgtggcggtgcctaggcatatatggcctgatgttggcgtcctagagattggatccggcaccagcgtcgccggcctcactagagcccagagaggatggggcggagccgagccctaagacgggcggacagagcaggagttacgaggacgggtgttgggttcggatgcagagggaggtcgacgatggggagctgagctctagcctctaggatcagatgtggctgctcttgcggagctccctctacctccttcaatctacatggagggcgactagcagcgggtggacgaggaggaggcggaaggggacaagacaaccatccttggatttggtatggatgcaacatatgccgacggatctcaccatcgaacgcccctaatcctccagcgaccgcgctcttcttctagttcttcgaatgtctttggcatgtagggcccattgtctttttcattttatttccacactgtaataccacgtaggcgccacgtcaatataggtggacaagtcaacgtgtcatatcagcgaaaatcacactaaaatagctaagggagtcattttgcatagttttaatacttgaaagagtcaatatatttggttttgcggttgagaggtatgaattagatcttgtttatatttaagggagctaaattgaaccttttcctttcgtattgcgatttcactttctaacagtggtgagcccacgaaaattatgttggccatgcacccttgccaagctctttaaatacaatgcatatgcatacgtatcctagggtcttgtgccacaattaaggctgtgtttagttcgtaaaaagaaaatattttgatgtcacatcagatatttgaccaatgtcggaagaggttttcggacacgaatgaaaaaactaatttcataactcgcctggaaaccgcgagacaaatcttttgagcttaattaagccgtcattagcacatgtaggttactgtagcacttatggctaatcatggactaattaggctcaaaagatttgtctcgcgatttccatgcaaactgtgtaattagtttttattttttatctacatttaatgctccatgcatatgtcaaagattcaatgtgacgttttttaaaaaaaaaaatgagaactaaaccaggcccaactatagccaaacgtaatgcatgcaaagcatgttgttttatgtaaacaaaaatgattcttgattttttttcttacattttttaatatgattttcagcacattttttttattattctaagtttatgatgttatcagaataatttctatttctattttttaatttcaaactatgaattctaaaatctgttgctggttaaaattttcaaagagtgactatatgctgtctaaaacatcatataattacactggagtgcgttttttttttgttgatctattatataaaaacctgaaatagattattacggccttgcatgtgcatcttcgggtgcaatgaatgaatgttattatcattaattgtgattgtttgcatgacaatagttaaattgaaaacaaaggagatctacgtactggacattaattaaagattaacacaccatgcgactcatctcctatatttgtgctaaaagagaaaatataaattagctagtgtgactaaacacatggaaaattatctaattaatattattcaagaagacaatgaatttaagatctagaacttatacaaattaattaaaaccaagtcacccctcagcctggtcgggtgtgccacggacaaaaataaataaacccacgaatgtgcccatcgggtgttgtataccacatggagccatcctcatctacgagccaaaaattagaggggtgttttatgcaacatgcatgcacatgctatacaaatacaaacgaatttatatcgttacaatataatgttgataaatgctttgtagcttccaaatgtattcagatcactattagactcatttagtttctcttgtagaataaaactttacgttctaaaaaatatggaacttgatggtttaaacgaatcgtaaatctagtactgcttatggaaaaatacgagagtacatccccagaattccccataaaccacacaactgacaagttcttgaaataaaaacatgaggtgatgggacaaatccctaacagtcttacaaaggaagccaacacttcacacacaattaaggccctatttagattccaatttttttcttcaaactttcaacttttctatcacatcgaactttcctacacacaaaaactttcaacttttccgtcacatcgttccaatttcttcaaacttctaattttagcgtggaactaaacatagcctgagacaaatgaaacatggaataataaacttactaaagtagtattaatatagtaaagaggaaatttatagccagtgtcctagtgacaatgattgtattgtcaagtacttatgattgatttttttttaaaggaacgtggtttgaatcacatgtagtactcctagctagcaagactgttcacgtctgaaccagcaaacgggtgcaacaattttggtgcaaattgaagcttcttttgttggagcagagccatgaagtactccactccagtccagtagtccactcttgcttcggtttttggaatcttgtgaaactgtcacctggccggcgctcggcggtcaggggccggccagctgatgagaaggctgccattcttttgcagttttgctgagagaaccagcaactctcgtttcctgagagaaaaccatgaaccatcgtggtgctgtctttttttctttgaaaaaacaacaatgcttgaataaatagaatctcgtttatactacgaaaaaataatagtaatttgaagaagatccgacaattggtaagcctcctaattttgtgtaaaaagaggaaaaaaaactggctgcacatagcttttatctaactaatatggttcaaaatgaaacaaatttaagcgaaagtatgtcaatagaacagtcacccatcaacctaataaacccaccgatatttcattattcatcaatattatattgaaaatgatttcctttaacaaccaataaaaccaccaaatattttgtacttagccttctacaggttcaaaattagaagagttcattaagcaatatgtgcaggatatacaatacttgcacaccaaaagccacacacgatattaattattaaatcttttctaaggcatgtttgttcctgaatggaataaaataagaataaacatgtttttcgagctcttaaataatacaattttagcaaactttttatatatgatttcttaggagattgttttcaatcgtctttaattttataatgtttaattaatttgtttgtaccttgataattctcataaatcatttatctatttagcataaaatactatatctatatatgttcaaatatattcaatactagattcgtttggtttccctcgtaaaataaaacaatatggtttaaacggattgtaaatccactaataacatttaaacgagatggactcctaaacattactagctagagtcagtacataagaagaaaagatgaatcggtactactagtaatacgtgatgaacatcgtttctatgcatgtatgcaagatgatgttgtgagttgtgacccgagtgaagtcatgtcttcacggatgcttgcactgtgcgagaaaacaatttttttaaatgaatggcttcgacataggaaataaatacgtacgtggcacttgagatacccatttggaggaacttgcacttgtaagtacgcatttccttatgtggtgtttgaaacttatagatgaagatagagattaagtattttacataaaacaatgatatcaatgtataagtaattgagtttcagaaaaaaaaatctagtatgatcgagatatacaacacattttagtattataaatctaaacataaaataagtttttttaaatttgtagtaacatgatactacatcacatcttgtattgggtttattttttaagacaatactcgtaggattactagcatactgcgcttacactactgaaatcagtagctgccgctgaaaaaaaaaatgtgtttcagctgccacggagaaagtatctgatccgttgtacatttgccgtttgtttttttttgaaaaatctatattgtatgttttgcatgccactgctcaggatgaagatgcctttttggggtctagctactgtacgttcagcgagacttgtacatttgccttccaatttctttttcagcgagacttgtacagtatgttttgcatgtcggatggttatgtctttttttagggctagttacttcagtatcaagaactgaagaggagaaattaacgataccaaagaaagggtaaagataaagagaacagggtaaacattgttcttgttgtatatgaggctatgaggagttgaggactgttcacggctgaacgagcactatccaggcaacaaaaattggtgaaaacccagactccttttgttgcatcaggaggcaggtaggcacctgcacctctcgcgtttcggtcgtggagaagcctagcctgtccctctctgaagtctgtacccagtacccacgcgcaccgtgctaggctaggccaggcaaaagataaggctgccactctcttctggtgagacaaacccgcaacccgaaaccgctagggtctgaagtgaaacaaatggttcatctctgaaataatttgccaatgttctcctgcaatattacatgagctatagattaaatttgatatatatatacaactcttaaattttagttcaataaatacaatcatatatttgtatatcatcatttaaaagtagaattccttttgctatacaactattaggtagtgttctaaataaattattcatggatgaaaattgatggattgtctacacttgattatagaaaaagtaaacattttatgttatgaaaccaaataaatagtttagaataagtggtctaagcaatgcaatagaataaatgtttttcttaataaattcatatttgaaagcatatatttatatatagaacaaataacccacgacaatggtacgttgtcattctctagataaaatttatttcatataaagaaaatttaaaagtaaaaattggattctatagacaactcttagcttgtgtagatatcctttttttaaataatatatatcaatcaatctacaccattgtaatcttgacttgtaataatatatctattggtttaattaaattttcttcttaaattaatcactccgacaatttttaaaccttagtgaatgatgacactctttttctttcttagttctcttaatatttagtatatacaaattttaaatctaaaattgtaagcacataattatttggactgctatgcaaaataaaaaatggctgctgtttttttggcaaccactgtggcttttgggtctggagaaacctgtccctctgtaatctgtatccacgcgcatcatggctatagctactggccggctaggtaggcaggcgcgacgaaaagaaggctgctaacttttcatcagcaaggcagcaaccagcgaccagcaacgctaggctctgatgtcaaacaaacggttcatgtaataccgaccagtaatttgcaaattttcattctcaatttaacaccgacctattttcaaaatattaaatttgatatacgattattgactttcaattctttagatgcaattatatttcatgcgtaataaattttacaagtagaattagatttttactatcagttcttggttgtatttctacgtatacaattgagtttagtactatctccatcacacgtgcacgcattgaaatttttgaccaatagttagtgcaatataaattaaatttattatttagtaaaaataatatcgttagattgatatttgaatttatattatacgagaaactgaaaatcaaatattagttttgaagaacatgctaaatgtaaccgcgtcttatagagtacacctccgtcttagaaaaaaactagggatgaacatggataagtgtttgtctagattcatcctcagaagttgtttattttgggacggaaggagtatgacacaaggagtatacatagattttaaaaaatagaataagatctaatatacaaggcaaatttgctacagtacatcgaaaaaacatgtaattagctaggggacaccctaaaaaactagtaattatctgctggacacccgcgatattattttataatatccaaaggaaatagagagagaaacaatcacaaaaatacgattttgcccctacctgcgaagttcagctcgcatacatgtccgacgacaccactgtactgctgccgccgccgtcgtcggcgaggtggctctcttggggggggggagggggctctcgtcgtcgatgcagcacgagggccacaccgacaccagcgctccgccacacaccgcgcttgcaggtgagcacaacgtggaccacctcgtggttcatgtcgagcagggcgtcacggagcgcaggcggtcgtagtcggtctcgcaaagacgcgccgccgttaccgacgagacgactctctagggggttcagggggcctgcgtgcctgggcctgtggctccgcatcgttcccgcactcatcgtcgttgcagcatgagggccacgccagcgttggacatgtcatagccaccgcgccgttggagctatatgcgagccgcacatggcaagcaagggtaaattcgtactttcatagctatttatttctctatttgctctaaatataataaaataacgccgcaggtatccaacagctaattatcagttttttgcggtgttccacagcagatacacgttcttgcagtgtctagttaattacacatttttgtatgtcctttagcaaattttgccaatatacaactcttagggtgcatttgagaggagggtaaaggagaagatacacaaaatgggggtgaccgttagtgcataattaattggatgctgattatttaaaacctgaaaaaaaattaatatgacttttgtaaaattacttgcctttttttttgccaaaagtataacatttagaaatttgggaagcatgcacgtgaaaaacaagattttttttctcgatctgttgcaaaaaaacactgccttagcttatgtagatataagttatattttgaatgcaaatatagggatcaatctacaccagtgtaatctaagtatctaacccagttggaatatactccaatagtttttttttcttttcactaattagtgtggtaatgtttagaacttaaaacgcatatgctgtttatttaagatatctttacaatataatattatcatagatatatagattgatgaataaattcataaataaaatctattaaaaaaagttaaggtgtacaattatttagactaatgtgcagtgctattgaagtgattaaggaaaggaaacaaaaaaaagagaattagagagtgatagaaaa

SEQ ID NO: 22801 - DNA, 20209 bp, Oryza sativa
ccccgcctcccttcccagtatcactcctgctgcctccatacttgcggccgatcccaacaatggaggcttgtctcctgcctccaccgccctttcccccttccctccgactgccagtctacctcggtggaccatcactgaccccctgcacggcaagcgaggtgcatctgccgccgttgtggtcctcgccgagcgatcgatggagtcctcacatcgggacgccgggctctcacatcggggccgttcaggctcccgcctcctccctttcttcgtgctcggagacggcggtttctttcctccccgcgccggcgctgcccacttctatggagagcactttcccgtcacctcggccgccgtcaacaccatcctcctcgacgccaccgtcgtcccccgtgccaccaccgtcggcaaggtcgcctaccgttccagcaccagcagatgccgatgatgatgatcagggtggaggttctggccaagaagctggcggcgggaatggcgaagatgaagccggcggtggtgatgactccaatggtcatggtgatgagcaagatggtgattactccagcgatgtgcagcgacgggatgtccctcgacatgagtctgctgatggttcagagatacatgacgagcaccatgtcattattactggagaagaaccacctgtttcgcctgttccaagggaaccacctgttgcgcatgtgcgcaatcgaagaccgatttccttactctgtgccgttccgatgttttttctgtatggagcataccattttacgattgggggatcagcatttggaatagacaaacatgtcactcacgatcgtctgatggccggaggcattctcgcaggcatctggttgtttctgcttccatttctgatccttggacatgtatacttctcccaccgtatccgcgtccgtgtcttgagaaacaatgcaccatcggcaggagaagctcaagtccccgcaactgacgtacaagacgaaggctacttccctcgcaagatcaaagcttccgtttctctgatggtccttagggcatccacaatgtgcatataaagtgggtagtaaggaataaaatactactactatcaggttgtatacattgtgaaagtagtaagtaacaaatactaggtaatatgcttactacctagccataagcaataaacaaatgatttctcttattcctctctcatagctaatggttgtggggcccagcttactacccacttttgttatttcaccattgtggctacaacaacaactaatacccactgacgcagggcccacccttattctcaaagtaggtagtaaacattggtgatgcccttagtggtttaggaaagattgcttatctgacattgggcactgtttggccatgggcttggctctctcatttgattgggtttatcatagaggttatcatgctaatagttaaatggtacatgcaggatgtagtagatttttccttcttattgcctgaggtgtgagtgaacagctgggtaacattgctctgggtggtaccggtagtctggcagtagtagtaattgggacttgggaagaatagttggtttactactctgcatcggcatggtcaatcagcaaggcacttatctactagtagttctctgtgtcgaacagttttttttggccccaaccttagatatctggctgtctgttctgaaggtcgttttggtactgtaactgacttgatgctgcttggttaaggttactgagactgggaattacactccatgcaatgttctaattttgctcatttattatagctgcaatatatatatattgaactgcaaattaatgacatttgggctgttaatttgatcagttcgtttctcaagatcgttttggtaatgtgtaactgaatgctactatgctagtagtataatcttgcatgttacaggttgctgagcctggcaagtagcaattgatatattgaacaaccaaatgaccatacatgttgtaccagttgaggtgattgctatatatatgtcatgcatgcacatattggactacaaatgaccttgttgttgttgaggtgatggttatgtcgtcatgcatgcacgcctggtgacattgacatatatgtctactcgctcctttcttattacaattcgttttttattttcttttagtcaaatctttttaagtttaattaaatttgtagaaaattttaacaatatttttaatacaaaatgaacatattatcaaaatatatgaaatgttagtttgaatgtaactgatttcgtgttacatgtgttgctaatttttcatataaacttgattaaactttaaaaaaatgactaggaaaggaaatagtaattaaccaagctctctgtagcgtccgcttgtgatatacgaacttctattgttcagtgttttgtgaagggaccaaattaacgagctcgtcttcgttactactgtttcgattggggaggtcattttgctaatagcatcagtgacttgtcacacacctcacatccaaaccatcatcatcatatcgatcgaatggagtccccttctccttcggctagaactctgttgtacgtcttcctaggctccagtaggtgttcgatatatatataaccatcgtatccctgagacactgactgaatgagatttatgaatgctcaatcataattgaactattctgcaatggctcaaccataactgaacagctgatgcctttttttttctttggtaaatacattttagatgcaaaagacaatcattcacacttacatagtgtgtgcccatgctcccagaattcatgctgatttccaatataaaaaaaaagtaaataatatatctctactacctaaaaaataagagatgttttcttcgtccgtaaaaaaaatagcgaaaaaaataaaataaaaaagtccgactcctatatcttattccctcttagaaacaaaaaaaaagtctagattggtgaaaaaaattgatgtgccggattgaagatctgtcttcaaaaacggaacctacaggtcgagagcattctatttttatatgattttaattttttggtttgtacttttgcatttgagtccctatatttttatatttacatttgagtccctataatcttgcaataaggtacttgaggtcgtttttgttaaaaataataataaaagagatagaacaaagggagaaaggtgcataaaaagaaaaagaaaagccgtacaaaaaagaaaataaagaaaaaacaacaacaacaaaagtctttttcccctaagtggccaaaaaaactgtagattcgaacgagaaaaaaatctgattcatataaaaggcaaaaaaagtggtgaaataaaaacgctagatccgattccttcaaaaacggaaaaaaagtctgattcctataaaggcgaaaaaaatctaaaaaaatatctaaaaaaagttcgtccgattccctaagaaagtggcgaaacaaaatctgatttctaaccagtatatatctcttctctatctctaatccaatctaacaatttaaaaagagaaaatacacgagaaaataaaaatgggtcaaataaccgcgtgaggcaaaagtcagaaaaaagcgcaaaaaaacacgctaaaaaggttttccatcttcaataaataaaaaaacgcacgagaacaattatttccatcgttggtaaaatattttaaaaaaacatgcgaggaaaaaactgtcaaaaaaacgtgccatttctaaaaaaatggttttaaaaaaccacgcaagaaaaaaaaacaccatctattaaaaaacaaatcgttctgaaaaaattgtcaggaaaaagctaaattgatagacgcttgagtcggatagggtccatcattttttgccatctactacatggctttatttcgtcatatattctcatgtattggaaaaaaacaaaaaaaacattcgaaaaaaacaagcaaaaacaacgtgcgagaaaacatgaaaaaaaacacacgagaaaagaaaagcaaaaaagagaaaaatatggttttcttcgtcagtaaagaaaagcaaaaaaacatgctaggaaaaaatcttttaaaagaaatgcgccatttctaaaaaatggtttgagaaaagggttaattggatccataccattacaaatatggcatattagaaaaataccattacaattcacgtatttggaaccatgccactggaaattttgaaaatttgaaccatgccactcccgtcactgcttccatcctcctccctcacgtcgtcatcctcacgccggcgtcactagcagataactcacatcgagcagcagcagcagcgaaacccggcgatggtggcggagacaacagcactccggcgtgcatggggagcgggaggagcggcggcggcggcggcggcgacacggtgcacgcgggaagcaggaggagcagcagcggcggcggtattcagcggcaacggcgacacggcgcgcgcggggagcaggagcagccgccgccggcgaagacgggcgcggagggggatgcgccgcctcgtcctcgccgctcgccgacgccgccttgtccctctcgccactcgtcggcgcctcgccttctcctcgtcctctcgccgctcgccggcgtcgccatcggccactgtcgttcccgctgcaccaagccatctccggtcgagccactgcgccacaagcgttgccatcatcccagtagcaagcccaccgaaggaatcgagctgaggcgttgtcgttgaggagatcgagcctttcttcctcaagtccgaccgccggccatcttcgtcgattcttctttttccagtgagctaggctatgattcctcacacatgtagcttccctatagcatttataattcattcctcttctctccttggtagcccgaaggccggaggaacccgacgcgctgtcgtcctgtcgatttccaatgccgccggagcatttctcagttcgccgccgtagtccgctcgcctcgtcctcgccgcttgccggcactgcctcgcgttctccccgtcctccagcaccgcctcgtcctcgccgctcgccggcgccacctcgttctctcgctgttcgccggcgccggcgctagctcgccttctccccgcgcgcgcacgtgacagattgacggggagggtgacgacgtgaaagaggaggatggaagagtgacgggagtggcatggaaccaaatacgtgaattgtaatggtatttttctaatatgtcatatttgtaatggcatggatccaattaacccttgagaaaatcgcgcaaggaaaaaaactgtttataaaaaaacaagccgctcattaaaatagaaacattgtcattgacatgattatgcatgaaaaacgtatattatcattataatttctttacccattgcaacgcacgggcatttttctagtatatatatacacacatggaactatagttcttctccatgctcccaggaagtactagaatgttgatttccaaacaaacgaaagaagtgcagagaagcttgtccggttgtcccctccgggtcgactgggctgacccaagtcaaattgttggacctgacgaggcgaagacgtacaaatcgcatctgaacttctgcttgcttgcccgtgagatgaaaaatgaacgtagatgcataaatccgttagaggatccggtgttggaacgagataaatatgtatataaccatcatgatttttgcagttagaggcaccgacgaaacacacacgaccgtttcgatctgcaaacaagagcgtgcatgcatgctatgcgctcgcgctaggggattggagcagtgagcagtcagtcgtcgcacggatccaccaggcatctctattagcatctcacttttatgttaaaaacataatcacaagtttgaatacgaatatatataataatatcaaatatgtgtcataaaaatatattttttgatagagtagttgttagttcaattcttgtcctaatagaacctcatgcatgcgccttaagttttttagcgaaggattgataagtccattttatttttgggtcatgtgttttgttttttctttgataaatatagttgagcatgtttcttcttttatttgcaaataaaagatgcatttcattaagttagcatataataaatattcgtgcatggaattggtaaaagttaacaaaatttacttgaataaataaaatgtatggagtgaagaaggtatatgcgtataaaaaaattacggtggagagatcaatactcactccgtcctgcctaaactacaagggctatatatatttttggttaattagatctctaccattataaatatatacgttttgaaaaataccatcaggctattcacagtgcgttgttcggcccaagcgcccaatacaaaatatttgcctccattttggtcactcgcggagccaaatgaagcacgctgatccaaaattggacacacatacttcacctccatcgagggcgtgcgacgcagggagaaaggtggaacgctgcgttgtagaggtcgtcgcctcgtccctccgtggtttcgcgtattccccacccgtgctctcctctcatgccaataactcgtgcaagggtgacggaagggagaacgagaggagcagtggcaagaaggctgcgcagcgggagagaagaggggcctaccggcgacctaggagcaccactgtcgggatccaccgcgtcggcgccgaggcaactccaccgcggccctcactagtggcgcctcctccctatccgcgccgaccagagctcgctggctacgtctccccccccccgatccgtgcagcccggagctcttcggccacgccggtcagagctcgccgaccacgccgcctccaatccgccgccagccgaagctcgccgaccgcgttgaccggagctcgccggtcggccacgccgcccctcgaggcgagaggggagaggtggtggtggccactcgcatcagacggccgtgagtagagtggtgagtttgcactgatgtcgacggagagaggaggggaagggcgcttggtggggaaatcctgtttgggatcgatcgccgtggggatggtgagcgatcgatcccctcccccctccctccctccacccctccacctggtttccttttttggcaccgcattactttcctattttagtaaatttatacattaaagtttatacacctcaagtttacacatctaaagtttagagaccaaaagtttataagtcaaaagtttatatatccgattcaaattttaatttgaattcaaattttttttatatatagtatttctatacatctaaagtttatacacctaaagtttatagacctaaagtttatagatctaaagtttataagtcaaaagtttatatacccatttcaaatttgaatttgaattatatctgaatcaaatttgaatttgaattcaaatattttctatatatagtatttctatacatctaaagtttatacatctaaagtttatagatccaaagtttataagtcaaaagtttacatacccgattcaaatttgaatttgaattcaaatattgtctatatataatatttatgtacatctaaagtttatacacctaaagtttatagacccaaagtttataagtcaaaagtttacatacccgattcaaatttaaatttaaatttaaatttttttatatatagtatttctatacataaatttttctaacttttattttttttaaaaaaattgtgtggtgtactgtagtagaaaaagaagaagggagaagaaaggaagacggatgcaagaagaaaagcgcgtggaggcaagtgggtccttctcccgatcgctggcgacgcaagtgggtccttctcccgatcgctggccgcaatcgcgcaataggggcacccgcctggtggttggtaggtagtaggagaaaaatataaaatttatagtttcccatatagtcctcaatacgataggaaaaaaaaaagacattacttgaattaatactacaggaatataaattgccaaaatataatagaaaaattatacggccatagagagcttatatatatgatctaataggacatgatcgaatcatgcaactcaattgcggttagctcataatcgatcgatcatgatctgctgcatgcacgtacgtacgtaactagctagcacatatccatctgcggtggcaactgggacgacaccgacggatgaaccctagtgttgttgttggcggcgtttctcctgcggaaccagagacgaccataatctagaatatggcagaccccaaaaatcgagatcacgaaagccgccgcggaatacccgaacaagatggtcttgtctcgacgcactgtttccgacttggccaagaacaagaacataactccgaagcctatcacgatcgctattagcggggcggaaatcttgccgatgtacgctctctcggcatcatcagccgcatccgcatccgcatccgtcgtggtgttattccgaggcttcgacgacgacggcatcatgccatcttgttggtgatcgtcgttggtcgtcgtcgtcgtcgtcgtcgtcccattggcttcacccatcgaaaatatatatataaccccaaaatctcctctctctctctcctatagtcccaaatccagacgccaagatatatatatgatcgatgatcgatctgggaacaacgatatgctgcaattagatagctggctacctcacgatgaatctccaaagtttcagtaaatacaaataagtagagagaattgcgtaccgagacggagacggagacggagacggagatggagagatcgagcttctgttttggccgtgcgtgatcctgttatgaccctgcaaaacaatagatcaaaatcgttatcgttagttatacatcccggctgtgccatgagcccagggtactacacgcgtacgcgtgagcaaggcccaacgcaaaagcctaggaaaggcccggcccacaattacaggccgctaaccgggctcatgggatagcagcagaagtgggcctactgatcctggtgaagtggtgatgccgcaaaaaaaggccttggtgcgcttcaaaccaagcgacagctgcgagcgtgcgatgcgatactgcgatacacaggaagcgcacgagggtagtttcctgcatgccggtgggctcaacacgtacaccgacaaggcaccgagggctgatttggtttgaaaccttaccaaaaatattggtactaaattctcaaaaaaaaaacattggtactaaatttaatagagtagatttattacaagctagataaaaattggtcacaatccaaatactatttgaagctatcaaaatagtggcaatggcacaaattggtactgattcaaatatgccctgaatcctcctctgtgcagtcgtccctaacccacgtaagtcacgtgaataaactttgcacacccttattatcgtgggttaatttgattcatgccattgcaaatatgtctattcaaataaatactaatataatttatctattcttatccatgccatttaaatttttataaaattgaaactataccatcgcagttatattttcgatcttctttctttcgtcctctcattttcttaattccccatctctccgtcacggcaaggagcgtgggcatgacaggaggccggtcggcggcgccgtacaacgtggccctgcaaggtcactcagtttcttgcatggtcaggaaaatccagcgcaagcacgtgtgccctgttgccggtgccggagcaacagcacaccaagaagcggtggaccttgccgtgctcctccatggtcgacatgtttttgcatatatggtgcgtgcgatgcagatggcggtgagcgcggcgttgaacattctttttttagacaaaaggtccttagggacctagctttttactgaaagccaaagtggtagcgctgaggaaaccagcttacaatgtagtacaagttcagatggccacaccccggcctgggaaggaggatagcacaacttaaaagggaaatcaacagaaaaactaattcagcctactccagttcttctcggtttcatattagaggtcagctccttcatcttttcagcaaattgttccagtttcccttcttcctcagcacgacagagtttcctccactgcaacaacaaagaaataatttgaaacggcaaagttagtggtgagtaaagtagagtttttctgaaaaccatgttgtttcttgtcagccacaaacaccagcaaatggcagctagcaacataatatgtaatctatcattaataaatgcagagctatggttgcataagagaaaaaactcatcaagatttttaggagggtaaggctagttcagaacatctctacaccaacatcacacaaagcgagccatagggcatacaaaaaggatgtgattagtagactcaaaatctccacacaggctacaattaacatctcccctccccatcctttcttttgcaattgttcagcatattgaatacgatctctatgagccagccataagaaatgtttgattttcattggacatggcgctttccaaattttctccatctccttatcaacaatccctctgaaacacatagctctatacatagatttcgtagtaaaactcttgtttgaattgagacccccaacagagcagatcttgcctatcttccaacttagtatttaaaataacagttttcaactcattccactcctctacttcatctggaccaaaagatcttctaaaggataagcagttatatccttcctttaacaccactctaaccagaatgtcttgttagttactgatctcaaagatcctataaaatctcactgtcagaggacatgacccaacccaaaaatcatgccagaaagaaatatggtcacctctacctaacttccactcagcccccaacatgaaccattttctggaattgagaacccccttccaaaattgagagcaatcccctagagtaacttgaaacaccccactattctgtaaatacttcctcctcagcaactctatacatgggctatggtcctcagattccagtttcatgatccatttagcaattaaggcagcattcatcttcctagtttcagtgaatcctagcccaccaaaatccttaggaaaagctatgtcatcccacttcaccatatggtatttccctcttttttttatttccagcccagtaatacctccctctaatagagtcaaacctcttatgtataccttccggtaattggtagaagcccattgcataggagaggatggatgataagcaagcattaatttggacagctctaccagcatgtgaaagtgtatttgtttcctaagttcccaatctcttttccaatttctgtcccaaaaaatcaaaatcatggttaagaattttttctgggctaattggaaggcccaggtatttcatgggaaaagcacctacagggcagttcaacatctgagcaactctatctgtttcctctttttccaaccccacagtgaacacctcgcttttatggtaattgattttcataccagccgtatcctcaaaacagtataggataaatttagttgctaggatttgattttcatcaaaaggaataaacaccacagtatcatcagcatattgtaggtgagtgatacccccaggaaaaatttcagggactaaaccagtcaaaacaccattacctttagctttgtcaagcataactgccagagcatcactaaccatattaaacagcaatggagagaggggatccccctgtctcacacccctatacgttctaaaaaaattacttctctccccatttatgttgacacacactttacccccagtgacacaagcttccacccatttcagccatctatctgggaaacccttcctctccatgacttcaaagaggaaattccaggacactctatcatacgctttctcaaaatctagtttccaaatgatccctttatccctcctaagttttaactcatgtagcacctcatgaacaatcacacatccttccaaaataaaccttcctggaatgaaagctgtctgtgcgggtgagatcacggagttggccacctctgtgaatctattggtaactactttactaatgaatttaaatttgtcattcagcacgcatataggtctgaagtgtctaatgtcagaagggtcacttttcttgggaatcaaagatatcacaccaaagttcaatctctttagatcaagttccccattgtagaggaggatgagcatctcaaataagttcgcggcgttgaacattgtcgggcactcaggctggcgttgcagatccagcgatctaccgtctacaccttcgtcgccaactccgtcgatggcacgagcaggggcgtggtgttcgggtggctcatgggggcgggcaagttcggcgccgtgggtcgcacttctcttggccttctcatggcgcccacctcgttcttgggaattcctggctggcgcctcgccttcctcttgctcattgctgctggtgccgtggtcggcgtgtccatccactcgttcgcccactgggagagaggcgaaggccatgctgcgtgtcccgtcgttccaggattggcaccaaacttggtgagtttgttccttactttgagcacttcaatctggtcagtttggatggagattggttgagtagagcaccggatttgagtggtggtttgtcagctcgagttactgaaattacatattgtgcagcagttagtaaagtgtcagtttgagggggcaaacagtgttcgattgggctgtttttgggacaacttggaagggactcatagaccatcatctcagccaagttctatatattacattttgatacaaatatgatcatacttaaaaaaataactttaaaaataagtcagaacgtcttatgttatactttttccgtcccattttaagtataattgtaggtttttgtgtccaatgtttgactgtccatcttatttaaaaattataaaaaaactaaaaataagtcacggataaagtactatttatgttttatcatttaataacaaaagaaatactaatcataaaaatatttcaagtaagatggatggtcaaatgttgaatatggaaacccgtaactgcacttaaaatgagatatatggagtatactatttcattgaaacaaagaaaaaactcttggtcatatcaaattagtagagtttgaaccatcaaaacaagtgcttcgatcatcgaatttgttactcaattattggttagctgagttagctttgatgatctactgcaagctagcacagatccatctgcgggggcagctggggtggctcatggagtacagatccagcgttgtcgatactgtgaaagtacatgggaccgtcaagaagatagcaacccatcgcggtagcagcgcacacgaagcagaacactgccatcccggaaaacactatcttatctagtattctcgtgtgtcttattaccaaaagcacggaaacaactcccacgcacaacatagccactgttccgatgacgagccccttgcgcactgtcatcatctgctcctgcaccttctcctccttggtcttgagacgctttggcgatgacataagattttgttgatcagccatggctgcgaagatgatgttgctcgtcgtcgtagtcgttgtccctgccttctccaatatccgatcaagttatcccaatcaacatgctactagtactacctccgttccatattacttgtctttttgagtttttgtttatcaatgtttgatcattcatcttattcaaaaaattttaaaattattatttattttgtttgtcatttgctttattatcaaaagtactttacatatgacttatcttttttttctatttgcactaattttttaaataaagcgaatggtcaaacgttacaaataaaaagtcaaaaacgtcatctattatgatacggagggagtagtatttaagcaggcttctccgattcctacttctcctcaaactgggcatcctggccagatgcgacacggacacggatcggatcgctgccgtgccgccgatgttttcaccgggcaaaccaacgaaacaacgagtagtacagtactagtattgaattctccgtactctctgctctcgaattaactgtggtttgatgtcacatgaacttaggcccgcatcactgcagcggtgtagccactactaaatgctgataaattcagccaaaaaccccaagcagatcgacagtgtaccgtctcattacacttgtaagctttagctccggggcgatcgatctcgaatggagaagatcaagaagagggtggccatcgtcggcgccggcgtgagcggcctcgccgcgtgcaagcacgcgctggagcgcggcttccggcccgtcgtcttcgaggccgacggggccggcgccgtcggcggcgtgtgggcgcgcaccatcgcctccacgcggctccagacgccgcgcccctacttcgagtactccgacttcccgtggccgccgggcgtcaccgacctgtacccggaccacgaccaggtgacggcctacctgcgctcgtacgcggagcgcttcggcgtgctggagtgcgtccgcttcggctgccgcgtcgccggcatggagtacgccgccgccggcggggaggaggaggtcatggcctgggagcactgggccggcaatggcgaggcgttcggcaccggccgcggcgagtggcggctcactgtgcagagcggccacaacattgaggcaagcacaaataactactcctactcggtttcatattatgtactcaagtcactttatttttttagtcaatttttaaaatttgactaaatctatagaaaaatttagtaacatctaaaataccaaattagtttcattaaatatactttaatgatatatgtttgttttgtgttaacagtttactatatttttcaataaattttatcaaacttaaataagtttgaccaagaaaaaaaatcaaaatgacctactctctcgggttgataatacttatcgttttgaacaatggcacggtctctaaaaaaacaactttgactattattttttattataatatgtataaaagtgtaacaaatatagtactttttaagactaatttatatatgtagtcactatatttgaaagacaaatattttaaaaatgatttataattaaatattctaaagtttgacctcatcattgtctaaaacgacaagtattatcagccggagggagtataatataaaattgaagggagtagctgcaagtgattaatatatttttagtatgaaacatcgtgttaataatagtgccggttaatgttgcattaatccatccataataagctaaagattatcattgtgcttcagctgcacgtcgcggatttcgtggtgctgtgcatcggacggttcagcggcttccccaacatgccgagatttccaccggacaaagggccagaggcgttcgccggcacggcgatccactccatggactactccaacatgggcgccgcgaaggcggctcagctcgtcaagggcaagcgcgtcgccgtcgtcggctaccagaaatccgccgtcgacatcgccgccgagtgcgcagacgccaatggtgctaagctctcgatcgacgatccatcaagctagccggccagctttcgcaatttctgcttccatgatcgagagcgaaaatgaccttgtgttttacgcgtgtgtttgtatatgcaggggcgtcgcatccgtgcacgatagtgctacgcacgaagcgatggatcgtgccggacttgtacgcttggggcgtcccggttccggtgttctacatcaaccgtttgtcccagatcttgcttcacaagcctggggatggcttgatccttagctttctagccatcctcttatcaccactggtatttacttcctccatttcatcttgtaatttctttttcatgctatgtcaatataaaacttcgtaatgtccagtgcagatcgttttaataaaaatattataagacattttgacttttctttcctaacgcaatttattttaagtttgaccaagtttataaaacaaaattgcaaaaaatatataacaccaaattagtttcaattttgtgttgaaaatgctacggttttgttacagtttttttatataaatttgaacttttaaaaaattgattttagagaaaagtcaaaatgtccgtgtaatatgaaatggagggagtaatgattaagcataccatggcacacattaatccttttgttctactgctagttatatcatgctgtcagattaggacatctctcgtcatatttgtttttttgttgtgtcctgttattcagagatggctcttcgccaagtttgttgagagctactacaaatgggctctgcccatggagaagcacggcatggtgccggacgaggatttcatggaggccatgtgctcatgctctgtgatgaagctaccggacaagttctacgacaaggtggaggaaggaagcatcgttctgaagaaatcgaagagattcagcttctgcaaggaaggcctggtcgtggaaggcgactcgtcttcagagaccataaagagcgacgtggtgatcttcgctacagggttcaatggcgaccagaagatcagggagatgttcaaatcgccattgttcagagaaatcgtggccggcccaccttccagcatagttccacacttcaggtctataaatctttcattacattcttcttctgaatgcatacgcaggtctataaatatgtcattacattcttcttctgaatgcatatatatgcaatgtgattatggtaactgatgatttgtggttgtgttttgtcaggcaatgcatccatcctaggatcccacagctggcgatcatcggctacgctgaaagctggtcgaacctctgcgtgtccgagctactgtccaagtggctggcacatttcctccatggaagcttcagattgccaagcgtaaaggagatggaggaggacatagatgaatgggacaagtacatgaaacggtattcccccggccgtttccgtcgatcttgcattgggccggtgagcgtgctgtgcagtgatcggctgtgccaagacatgggggttcaacgacggaggaagaagtggttgctggcagattggttggtaccctacggaccagccgattacgctgatatcaacttgaacagctgaaatggtgatggaatctgaatcttgagggcaccggtaatctttcttaaaaaaaaaaatcttatcttgagggtagtttgccagtgactccatttttatatttaggggtgcaaaatgaatgcaagtttttacatttattaggattcaggaccaaaataagattacgagaagcagcgggtgagaagttagcttgtgagaatcccagcttctaacttctagttcattttctggattctacaactatagtttctcagaagttgtgtgaaaaatattggcttgttggggagcttaaaattgtgatagacagctagctggtagtcagcttttgagaatctaggttttccagtttctggctttcagttcattttttggattctacaatcacaacttgtcagaatttggaccaaaagctgaactgtttggaaagtttatgacagctgaaaattctaggagaagctgcaattgctagaagctcccccagacatactctaagaataattcatttgatctgtgcagatgccacagccagccgccgcatgcaccctcccctctcgcgccgccgctcgccggccgtcgaggtagtgctggtacacgtacgagagaaacccccacacggccatgagcatggctaccaccttggtgcccgtcatcttgtccccgaacagcgccaccgccagcaccggcaccatcggcagcgccagggtgcccgtcacgttcgcgaacagcgacgacaccctcgcgatcagcctcacggcgcccagcgtcgccgcctgccaccccacggcgacccccaccacggtcgccgcgtacgccgccttcccgcccttgaacgccgccatctcgccgccgatcgtcctccactcccccgacgcgaacagcgccgtcgccgacaccgtcgcggccaccgcgttcgtggagatctgcatcttgagcacccaccgcggcgtcgctgctccgatcaccttgtcgaaggtggcctcgaacagggacaggatgagcgcgtagacggcggacgcggacagggtgaggacgacgccggcggcgtgcttgccacgctgaacggcgtcgccgccggcgccgccgccgacggaggaggaggggtcgtcgacgccgagcagcgcggcggagaaggtgagcacgacgacggagttgacgacgagcggcgtgaaccgctgcgcgttgatgaggcgcgacgtgaccgcgttgaacgccagctgcgtcgcggcgaggagcgagaacgtggacaccggcaggtacagcatggcgtacgagtacatgaggttgtcgcagccgacgacgagcccgagggccacgcagatggcgaccatcttggatgccgccggcgccggccgaggctccccgacggcggcggcccgcggcgtgaggaggaaggggatgaccagcagcggcgctccggcggactgcgcgagcgtgaccatccataggctgttgccgccggagttgtagtagaggcgggtgaggagaggcgccattgcctccccgacgagcagcatcagcatgtccaccatcactggcacccaccgacatcgtcgaacgcctcttctcctcgcgatcggcggcccaagcgcagcttgccccttgcagatttcgccatggcaggattcctcctgtccgggagtatcttggcagaaagaaagttacagtaatttagcgtacgtggtgtaagtgtgatcgaaccagtgaagtttaattattgtctgagcctgttcttaacgcagacaaattaaaggatgtacgcagtgagacatgcgtacgtacgcactgcgcagctaaggttgccgtgaactgctactactagtgtactacccgttgctttaatttgacaatcaaattgaagagaaccaatcgtgtggctagaatttgcagggcattcatactactgtttttgtaagaggttacatttccattgaagctaaaacgcatttagtctttcgtttagcataattaaacaaaaatctcaacaatggaactattggaaaaaatcattaaaatgtgtaattccaatagtacttttttttaaaaaaaaataacatgcttaccgttgatctatcaaatattacgaggttcgagtctgaaagtgcagaaatgaatcatgacagcatgtactagtttgctactctcccgtctcaatataagtctaactactacgaatatagatagctcttatatcgggacggagagagtacttactaaggtatataagaggacccacgcataagttgaagtagtacaacctgaaccaatcaggaagggttcgattctgaaggagtaccttttatcattagctgaatttcttgatcgtgtgccatagatcagatcactgactgaaactcaaaagtacctggatgatactattccggctcaacaatccctaactacttagctagctaactgtgttttagcactacttgctaatgagcaattcactctaatacgatcctagctcattagcatcttatatatatgtaccgatctgatacaacattatgaggtactatatatagtcccatatatggtgattcctttttttgcgctcctatagtttccaattaatttatacgtcatgtacagtaccctgaacccaacactgcacacaaatggttaacaatcatggactaacgtgttcttcaaagatatgcccaacgttttcagtcaaatctaccatagatctcttgatgtatactactgcgtacatcgttcgatcgcatctatgttattggacttttgacggacagcccctgatttcaattaatttgtggatggctaggattgcattaagatccatgcatgaacaataaccttattttcttctacgtgcatcttgagaaatgtccaggggtcttctgattagcttcataaggtggtgggctagccggtctgagttcgaagtctcactcattctatttatatttgatattaggtcattacctaatgttcacgttctttttcttcgcacgccttctctttgtgaccttggccctatttggatcctccggtctattaaatagtccttcggaatcttgctattaaatagccctactgataaaacccattccataacccctgggctatttgcgagacgaatctaac

SEQ ID NO: 22802 - DNA, 11051 bp, Oryza sativa
tttgcgagacgaatctaacgaggtatattaatccataatttgctacaatgatgctacaataatcatccgctaatcatggattaatatacctcgttagattcgtctcgcaaaatagactagaagttatggaatgggttttgtcaataatctatgtttaatactcttaaatagtaagattccgaagggttatttaataccctggggatccaaacaagacgcttgtttggtagagcgagcgagcttgctccccacctctcctccgatcctcaagccaagcgtagacgctggcccactgccagcctccatccatacggttccgtcgacgctccagggaaagccccctctccccgacctaaactggttgggggtgttgatgcctcgctagagctgccatgactcgttgaagctaaaggaggttggcacggattaatagtccaaattttgatagaaatgctcatatttttttgtggaatgaaggatagcaattccgctaatttatgcttcatgtgcagaacccaacacatagggttaacaatcatggatcaacatttttcttgaaagctatggccaaagttgaaagttctcagtcaaatctaccatacattgctcgatcgcatccatgtatggagaagctgactttagaatttagataccccaaactgctctgtacagttgacttcaaggcatccccgacgactccgaaatcagatatcgtgaaggtaagaaagtacattgcatcgaccatggtatgatctctctatacgtagaggcgacttcgatgaccggaagagctagctcgaaatgatggatctgtctgtagattgaaatacagttgacttgcaaagggtcatacagttgacttggtgattgcctgattggtgtgccacagtgccagttgaccatgacgtatgattgatgaggaggccggaggcatggagccatgcttgcagattgagaattttttttatttataattttttttattaaaagttttacaaaaataatttttcattttgaaaattgacggaaggagtcgcctaccgccttaaaaatcgccctctcagagggcggcgaaaatgacgtggcagacggccgttcgctctcgggcgacggccgtcaacgaaatttgcaggcggcccccttgccgccctccgctagggcgattttatactgtgcggggggccgcctgcaaatgggcggcgagggggcatggaattttgcaggcggcccccttgccgccctgggggagggcgatttttgcctctccccctataaagcccagtccctcctctgtgaaatttcattatattcactaaaaatccaaaaaaaacaaaagagagagaggggagggcagcagaaggggagcggcgaagccctgctggttcgctcaattcatcacaggtatgctcccatacatcttttgcatttgtactaatatgttatgtttgagtatatatgttgcgttttagttttagttccatatattttagcacatctgtagcacacatcacatatgtgtagatccagagcatagaatataatagtatgaattgagacatagacagtagtgttaattgtaagatgtagtttagtttgatctggagaatgtaacgtaattttagaaatttagagaacaatattgtagagaatgtaacttagggcgtagtacagaaatgcgaggttaacgcagttattgttttcatcaggcacaatgtcaagtaaggtcacatttcagatagttcacggtgaaggaaatattagatttggtccagatggtgttgatctgtcagattttgtaatgacatctaagggcatcgataggcctgcggagagaacatttcagtcaatttatagttggttgttgagaggatttagaatagaccaagaagtctacacaatgtcagtgtcagttgtagtgagtcgtgcaacagaaggttatttttgggaactaatgccgatggacagcactgatgcttggagacggtatgtggaaatggcttttgaacggtcatggcccctcgttatatttgtgtcggtacaagagaaagatataaatgtttcaatgcaaaccgaagatgtagagggtcctatcaatgcaggggatgttgttggaccatcgatgcaaaatgaggaaaatcaaccaagggaggagcaggctatgggcatggcggatgagggggagagagtcggtataattgttgatgaaatggagaggaaagattcggataatgaggaagtggacgacgacgcatcatccgatgaggaaggtgatgtaatggccactgattgggcaaatgaggacttctctggacttgttatatcagagggtgatcatgtaccctgggagtataaggagaacgaggtaattgagggtgcaagatatgctcataaggatgagatgaaggaggcggtgaagcattgggcagtttccttgcagagagagtttagggtggtcaagtcaacaaattatgtgtatgaagtgaggtgcatgaaggaaaattgtccgtggcgtgtccatgcatataagggtaaatggaatgattattggaaagttagcattgtgaccgagcacaagtgctacttacaaggggtggagaagtatcaccgaaacatcacttcagcttttgtggcaagtgagatgtacagcagtgttgttggtaacattggctttgaaccaaaatcaattattaggcacatcgcggatgctcagccacaggacgtgccgcagtggagctggggttctgccgtgctagcagccacgtaccgtgccctctgtgaggcgtgcacgaagactgacgcgggagcgatcatcgctggctgccctatgttgcttcagctttgggcagccgagaggtttgccataggtcgaccagtggtggacagcgcaccctacggggttggtcgcagcgcgcagtggccagaggacggtcccacgatggggacttactggtgtcgacgtggggttagtgcaacttcgctgcgttataagtttatcagtcgtcttttttttttcttcacataacatgtctaattccgatcatgtttattgcagcgtcgttacgctcacgtccaggtgagacgtggttacccggacttcgtgttcgagtttgaccgtctccagccgagcgacgtcatctgggagccgtacacagaagaggccgtcgctgcgagagcaccgctaggactttcgtccttgtgcacacgcgaccaggcttactggctcaccatcctgccgatggtgttcgacattttcgttgagcctcactgcccgcagcgtgtgatgagacagttcggacttaggcaggtgtttccgggcaacgtgcagccgaccgtcctccctgccgaccactcgtgagttcggattgttcatttctaaatttttatgataattacttcatcgagccatataatttacctctcttcacaggttgactcgacggggacagctagcaggcgcactttgggctccacgtgtacagcagtacgttgacgactgggtgttagctacagaggaggtgatcaacgagctcttcccacacacggaggagaactaccgtgactaccttcgttggtaccttcctcgcactcgtgcgcgtgtgaccttcactccagacgccccagagccgcacgttgccgctgtcacggacgcgtatcccacgcaccgtgaccgagactacttcgtggcggtacatccaatttgtattacttcttacaattatttcatttatcttgcataatataggacaactactgaatttgttatttccatcttgcataggctgatgccgcacgggatatcagtgccgatatcaccgcagtccaagtgaggttgaacagaggtttgcacttgactgacgttgagcagagggtgaccttcgaccggatgcaggagaagatgcgtgcggtcatgcgcgtcttctcctgtcgcagcgccgtggacgtcgtacctccagctggtccggtacaaccacggcctcgcgcgcctaccgtcggagcaggacctcgacctacggcacctatttcacacggtactgctcagcccagaggtttcttaagttttgtttctgtttttgtacgaaaacatcaccccgtcgtaacttgatgatccatcctcgcaggacctcgtttgccttcgagcgcccctagcttcggatcagtgcgacctacagcaccggtttcgcacggtacagttcagcccagatattagttcatttttgtttcagcttttgcacgattatgtcaccatgttttaactgcacgtttcctcatcgcaggacctcgtctgccttcgagcgcgttcgcaggcacgaccggcgcttccacgagctccgcaggggtgttcgccacctcttcgggcgcgttcgccagctcttcctctcacggagcgtcgatccctcgcccacacggtactttactttttattactactgttaaatacttgtacgaaactgatggtccttgtccagcaggatttgcagccgggatcttcggtactggggcctcttcgtctcacgccggtaggactggtcctactagccagttctacgacgacgacttgcacggtgcacaccaccacgacgtactaggctcctctcagcttggaggagctccagaagcgcacactcaggagcagccagaggtcacacctgtacaggcaggacgggttggccgtgtcgtacccccggaccgactcacgtactcccaggggcacattagggcgcagggtaggagggacaggggtaagaggcctcgtcagtagtgttctacctcttcagtccttatgtgaccgtttcttttggcttacaaacttgtaaagcagtactacttttgctattactactgcagtactacttgtgtttgtctcgtctacatagttcttttcattcatatggtgctagaacaacttatgctcacgacaacacactttcggcgctgcacggtagtgtcagatccagtagcgcgcacagtccacaacagcacacatgaaaagcggcagctcgagttatcactatcaactttcggcgctgcctgtttacataaagtgaatcacgcccacgcgtgatcgtcttgtcacatctaatgaataatgtatctcattgagttcacatatattgcagtgaaaacgacgctatataattgacaatctgaaggcaacctcttcatatcttctttcccactagcacacaacacacgaaaatggaagcctattcattggtaatacgtaatctagatttgagattatgtagaacattcttcactacaattttacattttggcagcaaaccaaatatgatcaaatgcaattttaccttaccaaatatttggtcgtgaagaaaaatttggcactaacaatccaaatatgccctaaaaattaataaaatatttgtacggtaacaaaatatttgtacagtaacaatccaaatatgccctaaaaaataataaaattgtattttaccagtcttggagattttaatcttgtatagttttcaatataaaaagatttgataactattgatatttatacaaaaatatagagcacagtacaaaatcgcccttgcggagggcggcaagggggccgcctgcaaaattccatgcccccctcgccgcccatttgcaggcggccccccgcacagtacaaaatcgccctcgcggagggcggcaagggggccgcctgcaaatttcgttgacggccgtcgcccgagagcgaacggtcgtctgccacgtcattttcgccgccctctgggagggcgatttttaaaaatcgccttcccagaggccggtaggcgactacttccgtcaattttcaaaatggaaaattatttttgtaaaacttttaataaaaaaaattaaaaataaaaaaaattctgcagattgacctatcctgggcttggatcatatgcgtgctgggcgggggaaggcggcgaattgagagtggagagggaacaggcctagtcaaggtttctcttattattgggcctccactaattataacggccttcgttagtgggccttccgctagaattggctaatttgggcaccatattgggcctgattttggtaaacatttcttctcgctttagaccacaaactttgatagggaccaaatgcggctttaccacctccatcatcggccggaagacgttcgctgacgtcgttgccaagcatgttggatcgattcgaggccttgttggccaatccagaatctagcccattgggatgccctcttgatatatgcgtataaattcagattttatcccattgagatgccatgatatttgctcaactttgaaagagacctcacctcacctcacctcattaagcactcaaaacacatccatcatccatttataaaattaccactcccaacctcccactgaacacaaacacacaaaaagaaaaactcacagcggaaaaaaagggacaaactaccagaggctgacagggctagaaccagcaaacagtgaagacgccaagcaagcaagtggtggtggtttggcccccatccaatccccggaaaagatccaccaactccaaaaaaatctaatttaacttatccaaagaatcaatcaatcagcaacattctataacatctacccccatcttcttccttcctcccaagaacctggacgcagagcaagaaaatggacaggaagagggttggcatcatcggcgccggtgtgagcggcctagcagcatgcaagcactcactggacaaaggattcaacccaatcgtgttcgaagcagacgacaccatcggtggcgtctgggcacacaccttggagtcaacaaggctccaggcaccaaccacggcattcaggttctcagacctggcatggccagcaactgtgacagagaagtacccaagccataggaaggtcatggagtacctgaggtcatatgccagcgagtttgatctcctcaagtgcatcaggttcaatagccaggtgcttggagttgaataccttggtgcaaccgagggagagataatgcagtgggagcactggtctggcaatggtgaggcatttggtgctcagaaagatggggtgtggcgcctcaccgtgaaggacttgaaaattggtaacattgaggtatgtgcattcaccttgcatatttatcaaattcacactggtgcataggaatggagtaacatgtgagaaaagacattatctagcaatgaaaatagaacagcatcctcaccctgaacaagaataatatgaagtcagcaaatctgcttgaaccaacaatataatgtatttcaccttttgtgtgaagaaaattgtatgccatactgcaactttgtatgttgatctcctgttgtcacaggtttttctagtggattttctaatcgtgtgcattggaaggcacagcggaagcccaaatatcccagaatttccggcaaacagtggcctagagttgttcaaggggaaaatcttgcactcaatagattactcttacatggataatgcagctgaatttgtcaaagggaagaaggtgactataataggctctggaaaatctgcatttgacatcgctgcagaggtcgccaaggtgaatggtgcgtcaaacagaatcagctcctcactaactggcaataatcagtctaaagaacatatggctaacacttctgttcaaaatgtaggtgaaacccagccatgtaccatgatatatagaacaaggcactggttggtacacaaatctagtatttgcggagttgacctcagttacttctatcttaaccgtatttcacagctactagttcataaacccggtgaaggatttctatattatgttttagccactgcgctctctcccttggtacattagcacttcaatttaattggagtttagaaaccagttcaactttcattcagactaataagcttgagaacccacaaaactgaaaatatttctttccatctgctttttcagagatgggcaatctcaaaagtaattgaaacttacttcaagcaaagcattcctttacaaaagcatgggatggttcctgactacagcttctcctttgccatgtcgtcttgcttgattgcaatgctaccagaggggttttatgataaggttgatgaaggcagcattattctcaagaaatccaagaggttcagcttctttaatgatggaatcatcctggaagatggaaatgaacacataaagagtgacattgtaattctagcaacaggatttaggggagatcagaaacttagagacatcttcacagcaaactggtgcaaagagaaagtggcagggtcatcagctactgcggtccctctatacaggtagaagttcaacatttctttggttagtgtgcatactttgagaacaatacagtgaatagacaggaacaagggataacattatgtccgcaaaattagtgcactgctattatgcatgaaaatgtccatcagctgttgaagctattaaccaatttttacgctccagagcagctaataggtatcattacgaaattccaatggttttgataacaataagccagtagttagcataatttgggatgatgagaatttaataaacttgatacatcatgtttaagttttaatgtttactagttaaagcctgtacgttcatttcccatttaccaaaatatttgaaacttgcagagaatgcatccatcctcggattcctcagttagcaattgttggatactctgagagccttaccaacatatatgcctcagaaaggatggccaattgggttacgcatttcctgggtggtcgcttcaaattaccaagcataagatgtatggaagagagtgtagcagagtgggctaaatataaggatctttacaacggaaagtactttcgcaggtcctgtataagcaccgttaacatttggtttaacgatatcttatgccaagacattggatgcaaccctaaaaggaagaaaggagtactggctgaatggttccagccatatgggcctgctgattatgcgagtctttactgacgactaccctacaagtatattcataggaaaagaacacaagtactgcctccaggatcctactgattgattagaaaggttttatatctttcaagtttgttgttatcataacaatataaaatagaatctaccatgttctttacacacttctactttcagagagagagagagagagagagagagagttagttctcaatttatgtgaatttatgcttgtacttcagttaatatcatgtaaatctacctaaagtccaaaacatttgcaaaagtcaacacaatgctaagaacaaaatatattgaactagtctgttgagtataatgcacctttgatcacttccattctctatcttcctatttatcccctgcagcccaacatcaacatgtacttgagtgtaatctgcatataacaatgtattagcaaaaatactaccagctatgtgcataccctaaagatgcaatcatcactatattttctaccaaaagataacaactagatgccaaaccaatgtggtaatgttacagccaaagaaccttattcagattaaagggttgtctttgtctcctaaaattaaaactaattagtaatctctttgtaaatgtacttctgtcatggtgcactagaaaatatgctaagcgtaatccatgataggttggaaaaggatatcttttttttaattagatgtaccttctttgttttactagtgagaaagatatatcttattgtttaacaacagatgatatcactgtatatgtcaggtatgggaagatggcactagcatgagactcaatttagacttaaattgagccatatgtagattggttcaaaacttcaaattaacagcatctcacgtctagttcaattcttggtatagaagtagcggtaatgattagttacttattattaaacgaatcaataaaacatcacaaccaagaatacattttcactaacttgtatgttggctctttctggtgcaaaaaccaccaaggacctgctctcgaacccaatctgtaaagtagataggtaaatgtcacaacatgatcaaacagcctggttatgatcagcaggagccaaagtttgcaccacaacaatgaaaggtttgcatccattaaatgcttgcaagcatatgaacgattctgaagacaatcaacatatgcaaacaatatatttacaaaccagcacagtaattctgtatttgaaatgactgaaatagagctcaacaaaacctatatgcaaatgttgtaacagctgcattttcaggggaagttaaactctgctatttactccatccattatagtacagaaaagataacaatacatatcaaagataacctcaaattgtctcctacagttcagcaaatcacgagaggaagtcagaaagaaaaacttgcctcaaaaatcctgcagtcatgcgcaaacccatgaaaagagccagcccagcccaaaccccagggaggccaaaaactttgggagcatatagcaaaaataaagaagatattgccccaacagtaatctgtagacaaaagacagtaattaatcacagcagaaaggaaaggacacagtggcaaactaaatagttgcagctaatgcaagatcaaaatattacagatttattatgtaagtgtatataccattgaagaagcagaatatgagaagtctgagacaccgaagtgaagtccatcgaagataaaagctagggcattaattggttggctggcactaacaaacttcaaaaacaaaaacagaacgggtaaagatgacgttgacagtgctgaagatcttattgtagtatgacaaaaaaaaggggcacataccagaacaccactcccaacaatttgtagaaccataggatctttggagaacagttctgcaattctaccaaaagaggcaaacagaagaagggctaaagctgcaccaacaagcagtcctatctggaaaatagagttcagttgtaagttgcttcgatacatgctcaatgaataatatccaacaatagaagataacacctgcgtaatttaataaaggttgttatttattaccttcaagacatagtatgtgacctccttgaccttttcatagt

SEQ ID NO: 22803 - DNA, 3081 bp, Oryza sativa
gggtgacgttcaagacgcgcacatgcgagcgcttggtgtcgtggaagggccccgacgacccgtcgccggggagcttctcgttcggcggcgacccggacacgttcctgcaggtgttcatctggaacgggacgcgcccggtttcgagggacgggccatggacgggctacatggtgtcgagccagtatcaggcgaactccagcgacatcttctacttctccatcgtcaacaacgaggaaaagagatacataacgttcagcgtctccgagggctcgccgtacaccaggtatgtgattacctacgccggcaagtaccagttccagcgctggaacatcagctcgtcggcgtgggatgtcgcggagtggcctagatgggactgcaactattacaactactgcggcccgaacggctactgcgacaacacagcgagggcgcctgctgtcccgacgtgcaagtgcctcttcggcttcgagccagcgaacgcggcggagtggaacagcggccggttttcgcagggttgccggcgaaaggaggcggtgcagtgcggcgaccgtttcttggccgtgccggggatgatttcgccggacaagttcgtgctcttcccgaacaggacgctcgacgcgtgcgccgccgagtgcagcagcaactgctcctgcgtggcgtacgcctacgccaacctgagtagcagcatatctaagggcgacaagacgaggtgcttggtgtggtcaggggagctgattgacgcggagatggtaggcgaaaggcttggcagcgacacgatctacctcaggctcgccggtcttgacgcgggtaagcaccaatttaaattgagcaattttactgttcgtaaggaggtatttaaatttgataccttatgctacctaactactatgaggtaccaaatttttcactaaatttttgatacctgatggtatctcctcaaagactataaaattactcatttaaatttgtttatctttctactatgcatgattgttgtttttcttggagaagtacggattacaatttgaggtattttactgtttgaggtttatacttttagtccttgagttgagaaagtactaccagatacagcgaggtgctaatgaaatataactgtccatctatcaagtaggatcggtctaaatagtacgttgttccttgcctttcgttttgttcatgcaaagcggcgatccatgaaatttttgtacctggaaaaaaatcttggtacatgttggggggatggattctaatagctcgagtggacgtccacccatttattgcatgtcaactaaatggctatgaaaaatgttcaaaaaaatcggcaagataaatcaatatgtaatatatcactccacaaacatacaagttaaaattcaacttctataagttgtaacaaaaataacaaatttaactgtaaatatacatatagtaattttttgagttttgttggacatcggcatcggcgtcagcgtcagtgagaacatggcgctgataacataatatagcatcaccgtctactgccaatggccgctgcatgtagtaccaatatatgctatgtgcaccgcttgggtatattgacaagattagattgtgcctttgccagaggttgacgagattatagtaggaaaatttgctaacaccgagattcgccacccatttcaaagtgcaacgagtttcagttctataaatccaagggtacaaaatccacatataccaaataaaacatccaaaatttcagttcaatagaaatcgaggaggcctgtgagctaaaattcttgctccttgctaactcgcctgtgagctcgaggaggcctttccgccattgtcctcagccatatctggtacctcgatgtcgtggcgtttggaggtgtcccgtggagttcgaatcctgtcctctccaatataaaaaacgattagctttttaacacataattaattaagtattagctatttttttaaatagttaatataatttttgaaaacaacttttctataaagatatttttttgcaaaaaatagaagaacgcattagaaagcgtgctcataaaaaaaagagagagtagaagatgataagagggaatgccgaacacaacccaagtatctctcatgaccagacatgcgaaaataccattatactgtcttaatacctggtaggattgagtgatggtaccacaagaaccctcgtagtactagttggaggccgtctaggactctaggaggcccttcaagctactttttcttacaactagctgggtggcccgcgcaattgcgcggctagcacctaaacaaaatcatatatttttcagtatgattttacctaaaatttattaaatagctatccccgtatcatccccgtatttataattatatagtttttaaaagtcactctaccccttacttctgtcgtatccttttttatttacttgctcggtctatcactatttttattcattctcctttaaaccttaaaaaattggatcttatagttttttgagtttattatctcgttgggtttctttttataatttctcgaagtcccgtcaaacgctgccattatattcctctacggcccgtccaatgtcttttctctttattgtaattaggattttacaaatcgaacataattatcgtttgagttcattttttactttttataagtcccgccaaaccgtcagcggctttgccattgtactcctttattgctcgcccgctgcctcccttctttattgccattgagattttaaaatcgaacaggattatcattggttgtttttttactttttagaagttccgaacctttaaaaattggaccttatagtttttagaaattattgtcttgttgggtttcattttttataatttttagaagtcacatcaaacgatgccactatactcctctacgatccatccgtcgcctactctttattgtcattgggattctaaaaaccaaacataattatcgttggaatacattttttattttctagaagtctcgccaaccgtcagcggctctgcaactatactcctatataccccgcatgctgcttctcctttttattgtcattgagattttaaaaatcg

SEQ ID NO: 22804 - DNA, 6731 bp, Oryza sativa
agcagttcattggatgaagtccagctttgcatccacgtcgggctcttgtgtgtagaagacaacccgaacagcaggccgctcatgtcatctgttgtgtccatcttggagaatggaagcacaacatttctggcaatgccaaatcagcctgcatattttgcacaaacaacaagtgaaatggacaaaatgacagacggtagctctagaaacaccatgactatgacagttcttcagggacggtagagcaactcaaacttaatgtagatgtgtcaggacggtagagcaactcaaacctaatgtagatggctcttgttttaccagaataatgcttgggaggttggagtgcttatattaagaaattctgaaaggaaagtgcttatgactgtatctggcatcttctacattttcaggatgacttacaatcaaagacatattttaagatattccaatcagtgactatgggcagcagttaataccctagagggattatgttgagtattagatgcagataaagttagtattgttgctatggactgagtgttatttgacttgctaaagtctgcaaagaatctgaccagttgaagtatcaggttttcttgtttaaaatttgtgagtataagtcaaactgaaaaaaaaacatattttctcaagtatttatattagtaccacatatttttattacttctgatggtcctggaacgtttcatatatcaagtgcacttgcaaactcggcaattttctgttgaagtccttacaatagttgaatgcagcgaatttatcacttaatcaccagaaagtaactgcaacaatcaaataaatcaaaagcactgaatatcagtatatttctaacctttttttttgactaatgtatatttctaaccttacccagatagcttaacttgttgggtaaattcatgtgcaatccttcctcttagtttttttgcagtctggcctttgattgtggtaattaaattatgtaaaacctgaattgttcctgctgaaagaaatgatattaagcatctggcaggaggagaactgaacagcagcaagaaatatccaatcttacaaggacagtgcagaagcagtctgtgggaggtacttataataagcaattccttgcagctattctccacaagagaaggaagaaaaatagacagcacatatctctctcgtccccatccactctctgcacttcctctcgaaatgcagattccttcagagatcgaaagctagcagtactggaactgctcagtgctcatcaccacataacaatttcaccgcaatgcagttcatggaggcattcatcccagcctttgtgatgactcgaaaaaggaagagtaattggacggagaaatggaaatctatcccctttaatgcgcggtgctagccggcgacttcacctccctctcccgctccggtaaccggtacgacggcggcggggggcggaagtcgtagccgtatggatgaaagaaaacgaatctccgaacatggttttccagtgagggacagaggtggcggcttttccgcctgtaggacgaccatggcgtccggcaaggctgacgtcggcgttggcggaggagaagcgatgaggaggtggtggcagtctggatgggctggcagaggctccagtggagcatcacatatggcgtagggggtgccttcaggcttcagcgacggcgaggcgccgaggcggccgccggcgtcagcggacgagcgcggcggcggcggcggcggcagggggaggggcgaccaaaagtctcggaccgaattgggccagagcaaaggtgcgggccgtgcagcatagcccaacgcaaagcacatactagtatccggtattgggccctatatgtaccggtccatgtaatgggctaatggcacgtacatgcgaatcccgtttcggcccatattgttggcagcacgctcgtcggaatcgggtccagcccacaggttcaacaattctggacgccgcctacccgtcttcttcctcgggttcaaccccaccgagctgcccgtgcccggtacaatgagcggcggaagctggcgagcaccgagctccggcgagcggtatgagagggccactgtcctggatgcttgccttcagcttccccgcgttctccttgagaccagggatcccgctgtccaagtgtccatccctcctcagctcatgctccgcaacatctttccgtgattctttcgcttggtgtcctggtgctcctcttcaccaggaggcatggtcgcatctcgcatgggccgatgggcatgctcttaagcttcctcatccctggcatatccaagccgcagcagatattactttggcaggttgctattctctccttcctcgttggggctgggttcattgggctgtacctaaagttcttctactggtcgtcggaacggaagatcaagaaagcctaagtcaccgatcttctgtagaatcattttgctcgtcacgctctggaggattaagaccggccgaaaccagtttagagaatacagacacaaccttttgtctgatatgttttgttgagaatgttgttggataactactatgatgtagaaatttctgcatttctaatatgagaaactagagtacttattaccacttatgatgtaagaggaggtttgctactccgtatgaaatttacttatttaccacctctttgttgaactttcaattttaagcttattttactccatctatagttgctttgaatttctttccatgctgctgtggataccaaggaccaagctggatttgctagacatcgtcattttctttaagtcctgatactgaaagatactatttttttgcaaaactaatgatttgaattcaggaattctttgtgcacagggtttgagctgtctctgtcctaattacaggttgagcctaacagacataaccgaaaagatgtgtgacattctttacgaattgactgttagaggtaagtgttctccagaaaattttgtgatgtactattcttatctttttgtttccaacaaatatctgttgtgaacaaacattatttacataagtgaaagtagcatttataattatagtagagggtgattgtgaacacacttcagtttgatatgttagttccaactccaaactgtttcatgtaagctttgttgtatgagtgcattctctgacacaagggctcactttctacttaaacatcttgagctcctatctttattcacaatggagcgtctgaaccttgtcgagtatgagatgctgaaattctggccatcaatgctggactttgtttcccctgagtatgttggcaggtgtgtttggctgatcaaggaatttagactacttccatattttcacagtgttaaagaagataaaagtagaggttagcataatctcaattgtttgcgcttgaaatacctggtgtttgatatggtctccttgaagtttacttgtgtgttttacagtttaggaagacagcaagtgtgaatctactctagatctcattgtatttctacaacatttttgtttctgcagaatgaaatattctgcatattttctataagggacaatttctataatgaatacacgtgctcaatcattatgttctcattgaatagttaactagtgaacttttttagaaggaaaattttatcgtccagcacccccccccccgaggtaccaaatctgggccgttcgttcggtgagatctaacggataggattgcacggtacctcccggtaccatttttatccctggcgcggtaccactttgccatgtgcggtggaagggtagcgaggtcttttcacatcatcctggatcgatccctcggctgcggcaacaccggcacagacgcggcttcagctcctggggactccggcggatgctgccgaggctaggcaagactgaaacggcggcagtttgcttccggcgatgtatagtggctgctccggcgattcagaccacggcgcgacagccttcccccatccaggatggaaagcttcgcttcactcaagtcggccaagacggcaaaacggaggatttggggcgcgattttttggcggctagggtttcggatttggggtcgaggtttcttcggcggcgctcgctctcgagtctgaaaagaagacggcggcgctcttgcgggagagataatcgcgctacgggatagatgaggaggacagacaatgcttcttttccttttccaatcctacccacgcgaaatcaacggccagatgggttttggtaccgcgtggtacatgtaccgagcggtacaaaacgcaggacgggagcattgctctttttagaaagactttaacttcagtacaatagagttagattgactgtactattgccctcctgccacgtctatgggatgcggacatgaggcgagtgtgcacaccatgctcttttttagtaaagcttctaatttgatctataggctagtttatataagatgtgggttaatgtacagcagttataaaatttactcctatctaattagcccaccattccaaattaccaaaacgcggattaatttgcttatgagaatctaacggattttcacctttcttcactcatttgcacttccataaaaaacctaacaagtctctcatgctcgcagattcacgaatgcattgagcatcccgtgtcaaatggagtaccagggtggaaggtaatatgcaggctctgaagagagttgctctgccgtttctgaagaactgtcagtcattgtgttcctagagttctcgactaccattttgtctgagtaacaagggcctgcgtctagtattatggggagtgagaaaatagcaatccacttggaaacctggcggcaaatgagtgaaccagtagtccagtataaatcctaaacctaccgtggacccagaaaaggttagcaattacacgaaccaatatgtaaggtaacatcgagaacaggaatggcacttggctggagacatctcactggacttgatgttagtcaccttgtggccaaataacttgctacaatgggttgtttggttgaatttcaacttgccccgccacagcccacatgttcatacgacctatagcctggttcctggcgacttgggaatggggatgtcactgcgtatcctatttattgactttgatgctgtacatggtgcctccaattatatacttgcactccctatcccagaaaaaaaaaatccaatcctcaggatatatctgaacatgcacatgcactttgtttaaatacatctctatgaaattggagccttatcggttgcccatatattagggaataaaaattattttataggtaaaacttttatatatttgttcgtagcgatttaaaaactaatggtacaaagaaattatgttgaaaatattttaaattaagtttgaaaatttaaattttaacttttgctttgacttattaagccaacaagatggggctcttggtttttcacttttgggatagagtacaggtagagaaagggcccacccaaaaaattgaccctggcgacgtctcaacgtcttcatttgccagcgccaggcttctcggtcgctggcgcacggtgcgcccgccgcctcttcggctcaccggcggccacgtagccatgttcggcaccttcatgctcgccagcggcagcgccacgaagtccctgtcgacgctgccgtccttccaccggcactccggcaggcacccctgcgctcgccgccggctcgaactcgtccaggcactagctagcttgcacgttggaatggcgcctttccaggcgtcagagtggccggccatgccgcgatggtcatccactctgttatgctgaagggaaattttagccggccatgccgcgatggttgctgaatggaaattttagggtacctttaagtcgacattttagagcaattcagatcctttgcagtattacagaccgacatgtgggcccgagggtctgtggagcctctgcagtattgcagatcgacacgtgagctcgagagtatgtagagtccacatgttagagagcagtactgtacatagaggatcgcactcatttataacttattagagttgtaaggttctgtttttaaaagatgaattttatatatacctggtagtacaagaaatatgataggatcagttagtttttactgtttttaataaggcaactagcagaaccttatataaaagcgactacaataaatgtaagcaggatctacaaattatctagaagagcggagagagaagaaaaacaagctacaaatttaccatctacagctcatgtcagtggcggacgtagctttaaaacatagatcgggcggagaactgagatgtgcactcaataaaaacaattcaacacaacacatattatatttatatttcaatcgcataactacctcgatcatttcaatcatcgtttgcggcgtgcatgtgttgtgaagagatggactaatctgttgggtgttcacaccttgttatacctaattttgatggcccatgactattataagagggtagggagggccttgggggtatggggtgacacggatcgtagctgggtcggtcgatccaccttgcctgcctaatgattagatccacccctggctccagtatttgtttcaaggcattgtgtgtatgagaggtagatcagcagttaatggtgcgatacgtatatttatacgtacctatagattattggagaattttttttatttataattttttttattaaaagttttacaaaaataatttttcattttgaaaattgacggaagt

SEQ ID NO: 22805 - DNA, 2466 bp, Oryza sativa
tggtgtgtccatgcatataagggtaaatggaatgattattggaaagttagcattgtgaccgagcacaagtgctacttacaaggggtggagaagtatcaccgaaacatcacttcagcttttgtggcaagtgagatgtacagcagtattgttggtaacattggctttgaaccaaaatcaattattatgcacatcgagaacaaattcaagtacaccataagctatgcaaaggcctggagagccaaacaaaagatcattgagatgaggtatggcacatttgaagcttcttatgataatttgcctcgtttgttagccaccattgcccagaggaataataatacgtactatgacctacatacatttacatcggttgatgatcgaacaaagagtgtgctgcaaagagcctttttctcattgggtgcttgcatcaatgcttttgtgcattgtcgacctgttctatgcatagatggaacttttatgacaggtaaataccgaggtcagatattgacagcaattgggtgtgatgggaacaaccaggttctacctatggcttttgcatttgtagagagtgagaacactgaaagctggtactggttcctagagagagtgcacattgcagtggtgcgtatgaggcccaacgtttgccttatacatgatcgtcatgcgggtatgttgcgggctattgactacttgcagaacggttgggatgagaagggacttccagctaagtggcctgatgttcggagtcggtggtgcatgcgtcacatgggtgcaaatttctacaagcaattcaagaacaagcatcttatggagctctttaagaggctctgtgcacagaaccaaaagaagaaatttaatgagttgtgggacaagttggatgagttgacaacgaagcaaacagatgagcaatctcgcagaccactagttgaaggtgacgagcctcccatacctcttggtgcattacatgatgacccaccaacaatgagaaggaggtcagggtcgtccatcagaaatttcactcagtggattgagaatgagcctaaggagaagtggtctctattgttcgacaccgatggatctcggtatggcataatgacaaccaatttggcagaggtgtacaactgggtaatgcgaggagttcgggtacttccattggttgctattgttgaattcatccttcacggcacgcaagcctactttagggatcgatacaagaaaattggtccgtccatggccgataacaacatagtgtttggcaacgtagtgacaaagtacatggaagataaaatcaaaaaggcacggagacatcgagttgttgctcaaggcatacaagtgcatcggtatgaaataatgtgtgttgataggagcaggcgtggtatctatcgcaagcaagccgtgcaggaatgtgtcttgaaggcggatggtggatgtacctgcagttgtatgaagccgaagcttcatcaccttccttgctcacacgttcttgctgctgccggtgattgtggcatatctcccaatgtgtacgtctcaaattatttcaggaaagaagcaatctttcatacatggagtgaggagatatatgggttcgggatctcaggatcttacacaacgctgagtgcccaagttttttatattccagatccatctaagttaagggtgaaaaagggtcgacgccaaactagacgcatcagaaatgatatggatgagtcagaagcaggtgggaggactttacgctgcagcaagtgtgatctgcgcggccatacttacaagaaatgcccgaagaatgcagaagttccaagcggcgcagatgctagtccatctggacaggcaagtgatggtaggcgaccacctggtgaaggaacaacaagcaggcgcgcaaggccaaggcgtcgtcgcgcagcaggcgattccatggtgtaacaatgctttcaatttaggaaataaaatgctgttgtgatgtaatgagtgttcggactaaatacttctatcgtgtaatttcaattcaatgttgttgtaatgagtacctccgactattgttgtactagtattattgcgaactattcggtgttgtatcataatgttatcgtgatgagtgttcggactaaacacttttgtttgtttgtactcttgtttaatatgtgttagtaattcgcttatgaacatttattacttatgttgaactaattatttatatgtttctgatcaacctatttgatgcaggtatggcgtacgacacaccggcgctgttgaaccgtgggattgacaggaaccaccgctcgttcctgtcagcagtcgagggtgcacagctcggcaccttccgtccacgcacgtcgtgcgagtggttgcgtgtcgacccccgtcacgttccttggtacgcgtatgtcgagggtgcacagaagaagccgtcgctgcgagagcaccgctaggactttcgtccttgtgcacacgcgaccaggcttactggctcac

SEQ ID NO: 22806 - DNA, 7298 bp, Oryza sativa
tttgtctcgtctacatagttcttttcattcatatggggctagaacaacttatgctcacgacaacacactttcggcgcttcacggtagtgtcagatccagtagcgcgcacagtccacaacagcacacatgaaaagcggcagctcgagttatcactatcaactttcggcgctgcctgttgacataaagtgaatcacgcccacgcgtgatcgtcttgtcacatctaatgaataatgtatctcattgagttcacatatattgcagtgaaaacgacgctatataattgacaatctgaaggcaacctcttcatatcttctttcccactagcacaccacacacgaaaatggaagcctattcattggtaatacgtaatctagatttgagattatgtagaacattcttcactacaattttacattttggcagcaaaccaaatatgatcaaatgcaattttaccttaccaaatatttggtagtgccaaaacttgcttatattttggcactaacaaaatatttgtacggtaacaatccaaatatgccctaaaaaataataaaattgtattttaccagtcttggagattttaatcttgtatagttttcaatataaaaagatttgataactattgatatttatacaaaaatatagagcacagtataaaatcgccctcccccagggcggcaagggggccgcctgcaaaattccatgccccctcgccgcccatttgcaggcggccccccgcacagtataaaatcgccctagcggagggcggcaagggggccgcctgcaaatttcgttgacggccgtcgcccgagagcgaacggccgtctgccacgtcatttttgccgccctctgagagggcggagggcggtaggcgactacttccgtcaattttcaaaatggaaaattatttttgtaaaacttttaataaaaaaaattataaataaaaaaaggtcattattggattggtcgtagctaccatcgtagtttatatccaatctttctttaggttggcatagatctaacttctaagagtatattttactcttaacaacatcgtattacacctaatatacatacaatagtagcaagtagcaagaagtttctcgttaatgttaaaccaacacacattgttatgactcctgagaagaactcggcgtccacggcgtatcagaagaccagagatgaactggatagctttcaactacctcaccacagccatcttcctcctcctccttccggcgtgcgtagctgatgaccagcttgtccccggcaaacctctgtccattggctccaccgtcgtttcgaacggcggcgccttcgccttaggattcttctccccgaccaactccacctcgtccaatctctaccttggcatttggtacaacgacatctcgccgctcaccttggtctgggttgccaaccgaggaactccggtgaaggacggcggccatggcagctcttcctctgcaccgtcgctcaccctgtcaaactcctctggcctcgtcttggccgacggcgacggccgcgttctttggactacggacatcaccattattgcggcgaattctccggcggttgcagtgctgatgaacaccggcaacctcgtcgtccggtcgccgaacggcgccacgctgtggcagagcttcgaccacccgacggacacgtacctccccggcatgaagatagggatcaactacaggacgcgagtcggcgagcgcctcctctcctggaacgacggccccggcgatccatcgccggggagcttctcgttcggcggcgacccggacacgttcctccagctcttcatctggaaccagtcacgcccgtactggcgctccccggtttggacaggcaacccgatccccagccagctgatggtcaacggcaccaccgtgatctacctgtccgtcgtcgacgccgacgacgagatctacctctccttcggcatctccgaccgggcgccgcgcacgcggtacgtgctaacaaactccggcaagctccaagtcctctcatgggacggcggcgacggcgcgtcggagtggagcaagctcggcgagctgccgaaatacgagtgcgaacactacggctactgcgggccatacggttactgctactattcggaggtggctccgacatgcgagtgcctcgatgggtttgagccgaggagcaaggaggagtggagcaacggccgtttctcgcggggatgccggcgaacggaggagctgccctgcggcggcgacggtggcgacgccgtcttcttggagatgcaggggatgcagttgccggacaagttcgtgcgcgtcaggaacaagacgttccacgagtgcgcggcggagtgcgccggtgactgctcctgcacggcgtacgcgtatgccaacctgggtggtagcggcagcgcaaggaaggacgcgacgaggtgcttggtgtggctgggagagctgatcgacacacagaaagttggcccggattgggtgccttggggcatagttggtggtgagacgctttatctcaaagctgcaggtttcacaggtaaaactttatcggactatcttttcacttatactttatactttcaattttaaatttaaagctgatttaaggtatttttattaaaatttattttttagtctttgcttttagatcgttaagaacatctatataaaagttttatttataaattatttttcatttgtaaatatgtgatagggcttaagtctcgcagaatatcaggtcgcagtttgtatgtttcattcagagttgcttgacatcacccgctgaacattctttttaatgtcaaaacatctcattatagttcgtgcaatattcccctcctagattcctttagtctccgggtgaaccttccacgtatgtttctttagcgacaggattcagcgcgcaatggtaaaagaaaggagctcctatatcttttgggtcaaatgaccgaatgatcaacggtgtgtggacaaactctagataagattactgacgagttaatgtgacatgtataatattgtaaagactaacccttcattccattcccctgacaggccgttcctaacccttataagctgaacttgctatttaaatgccagaagcaggactatttgccatggattcgtggaatgtcaatcctaggcatttcttaattctcaaaaactgttgctagtctgctgtaaatcctaaacatctgcattatttacttgcatgtcacgacccaagctgcagctcagcaatttcttactgctcctaatgcatgtctaaagaaattaaggaatggctatatatacgagcgaaacataggtgatctatctccttcaggccacagattgacagatggattggtcatcatctgctttcacctgcatcgccgccttcctcctcttgtcgccggcgttgtgcgccgccgacgaccggattgtctccggcaagccactctcccccggcgccgctgtcatctccgatggcggcgacttcgccttgggcttcttcgccccatctaactcaactccggcgaagctgcacctcggcatatggtacaacaacatcccacggcgcaccgtggtttgggtcgccaaccgggcaactccgatcatcgttaacggcagctctaactcctcgttgccttctcttgccatgaccaacacatctgaccttgtcttgtccgatgccagcggacagattgtttggaccacgaacctcaccgccgtagcgagctcctcctcgttgtcgccgtcaccgtcgacggccgtgctcatgaacacgggcaacctcgtcgttcggtcgcagaacggcaccgtgctgtggcagagctttagccagccgacggacacgctgctccccggcatgaaagtgaggctcagctaccggacgctcgccggcgaccggctggtttcatggaagagccccgaggacccctcgccgggcagcttctcctacggcggcgactcagacacgttcgtccagttcttcatatggaacggttcgcgcccggcgtggcgcgccggcgtctggacggggtacatggtgacgtcgagccagttccaggccaacgccagaacggcggtctacctggcactggtcgacaccgacaacgacctatccattgtgttcaccgtagccgacggcgccccgcccacgcatttcctgttgagcgactccggcaagctacagctccttggctggaacaaggaagcatccgaatggatgatgctcgccacatggccggccatggattgcttcacgtatgagcactgcggcccgggcggctcctgcgacgccacgggcgccgtcccgacgtgcaagtgcctggacgggttcgagccagtgagcgcggaggagtggaacagcggcctgttctcccgtggctgccgacgaaaggaggcgctgcgatgcggcggcgacgggcacttcgtggcgctgccgggcatgaaggtgcctgacaggttcgtgcacgtcgggaacaggagcctcgacgagtgcgcggcggagtgcggcggcgactgcaactgcgtggcgtacgcttacgcgaccctgaacagcagcgctaagtcaaggggtgacgtgacgaggtgcttggtttgggccggcgacggcgagctcgtcgacacgggcaggttgggtcccgggcaggtctggggcaccgtcggtgccggcggcgacagccgtgaaacactctaccttagagtggcaggcatgccaaattcaggtacaggcctaaagcatcatacttcatgttatgataaaaaacggttcaggtatacgagtgccaaatgcaagtatgatccatatgcatttcacgaaattaggagagaatatcatgtgcaagattctttaaaatgaaatattggtcgaaaatgaaatgaacagtgtgtctctgtgcaggtaaaaggaaacagagaaatgcagtgaaaattgcagtgccagtgttagtgattgtcacctgcatttccctttcatggttctgcatcttcagaggtaagaacagaattcttgtttttcccctcaatgcttctgtacatacactacaagagcagaggaacataatggtcataaacttttacggcaggtaagaaaaggagcgtgaaagaacacaagaaatcacaagttcagggagtactgacagctactgcccttgaacttgaagaagcaagcacaacccatgaccatgaatttccatttgtaaaatttgatgatattgtggctgcaacaaacaacttctccaaatcattcatggttggacagggcggttttggtaaagtttataaggtaacttccagtgatataattttaaggatttttagagtccatgagcaggactcgttaccacaaattagcactagaaagtctataaaatattatacctcttcaaggagcataaaaatctaattatctttttatgtgcattaacatgacactgctatttctcaaaaggggatgttacaaggttgtcaagaggttgctgtgaaaaggctaagtagagactctgatcaaggaatagtggagtttagaaatgaagtcactctgattgctaaactacaacaccgaaatttggttcgacttctcggttgctgcgttgagggacatgagaaattgttaatttacgagtacttgccaaataaaagcttggatgtcgccattttcagtatgttcaaccagcatatcacaagttcaaagaacaatttaatgaatgtttatttgcatttcacacatagcatatatgttcttttgcagagagtgaaagaggtgtaacactagactggccagcaaggttcagaataatcaaaggtgttgctaggggccttgtttatctacatcatgattcaaggttgacgattattcatagagatctcaaaactagtaatgctttgctggactcggagatgaggcccaaaatagcagactttggtatggcacgcatatttggtgacaaccaacagaatgccaatactagaagagttgttggaacatagtgcgtaattctttgtgccaatttcatagcttaacatgcagattaactcaattcaactttcataacttttcaatgtgaaattttctcaacagtggctacatggctcctgaatatgcaatggagggaatgttttctgtcaagactgacatctatagcttcggtgtcttactcttggaggttatcagtggtgtgaaaataagcaatattgatcgcattatggactttcctaaccttatagtctatgtaagtattttgcttctaagcttatatagctcttagatccttaaggtatatggagttcttatgcaatctgaagatgtaatttcgtttttctgttaggcatggagcctttggatggaagggagggcaaaggagctggtagacctgaatatcaccgagagctgcactctggatgaggccttgctttgcattcatgtagggctcttgtgtgttcaggaaaatcctgatgacaggccactcatgtcttctgttgtgtccatcttggagaatggaagcaccacactgccaaccccaaatcaccctgcatattttgctccaaggaaaaatggggcagatcagagaagagacaatgtcttcaactctgggaatgagatgactcttacagttctggaggggagatagagcaactattcagttttaattgcagaattgttgtctaacaaaatgccaggaatatacttgacatgcatttttttttgtaagttgtattagcctaatcttgacaataatatcttgtaccaggtatataaaggtcatcttctaaaaatgaaagctttcaactctgagtctctcacaaatctctgaaatgaccacctaaaggcccttaaagtttcccttatgcataccttggctagttgcaagacgttcctgtaacgctccgcttttcgtgaggcgttaaaaactaatttggcaaaatcctaattgcgaaaatttttgttccttgtgtgcaagtctaagttgtgccgtggatctcaattcaaatctgtccttgatccctctcgtcgccatcaaatccttctcctcgaagtccctattccgatttaagtattcgaaattcaaatcctttcttgaaaaccttgccaaatatcttcccgactccaaaatatccaaattcccattttgcattcaaatccaaactccatatcaaatttctctccaaatcagatttcccagtaaaagtctacttcgcctcctcttgttttggatgggccggatttcctcccatcagcccacttctctccctcagccctcctccctcagtcgccttcccccttctaacgtgcgccgcacgcgagccgctcgggagagaaag

SEQ ID NO: 22807 - DNA, 2485 bp, Oryza sativa
gtgcacgccgcccctcccggttcgccgccgctagacggtacgagccgctcgccgccagccgtcggatcggccgcccggcctcccctccctttcctccatccaacgaaaactgtccacgtgggcttgaccgggtcaagctgacgccccgccagccagcccccccccccccctttgggcctcgccagccgttgggctgcgctgctccccggtccaatggactaaagtccacttatactccctcgtgccgagcccagtaccccccacccaaaagctaaagtccatctttgctcccttcccaaacacagtgaccaaaagtccatatctgttccctcccaattcacctctctctcaccatatgttggccccacatgtcaatgagtgataaaagaatattcttgagaatattcttttccataaaattcataaatcattgcctgcattccaaaaaaaaaagattcgacaaatcatttccttgtccagaaattccaattaaactcccaaaattcatatctcccgatccgtaattccgattaaccccgttccacttccagtattcccgtaaaatcgagatctatttaatggcaccattatctagtctaaataggatttttcttttggtcttttgtttaggtttttgattgtttgcgtatagttgcggttaccggattttcgtcgatcgcgggttttctcgaagattcgtgaagctccgtgaagaccttgagcaaggcaagtcaccctttgatcaattgctcctataattggaaaatcattattattttgtttgcaacttgcattagtagaatcacacacttaatttgcttggcctcggtttgcatgtcaaatcgacggacctacccagtagtcgcactaattcctgtaggttgtactaccctgattccttgtcgctccacccttgtggtacttcggtatttgtactctctgagtgcgtataccaaatatcccacatacaccgttgattgtcgaaaatttgggaaatgggtttgagaagccttgaaaacccgacatgtggtgtcggtgtgtttaaaaataaaatgaattatgaaaactcgcgatgcgggggttgtgcctatgtggcactgtcccgtattcgcatataaggaccgattcctgtgggaaactcatcgagcataatcaaagtgcaaccacaaggtggaatgggacaccctggctaagtaactagtcggttcagggaaacctcgcatgccaatagttgggaacgccggagcggggtctgttggagccaaaccgggttcctggtaagcaaggaagagaagcttgctgaattaccgatcgaggtggttggagtttgatttgtgaaaactaaaatggcctatatttatgtgaggattcgatccttctatgtggcatgaggtaaccctgggtcggcttgggaaaggctttgttgcgaacctccgataccgacgggtgttcggaataagttcgtatcttgtgggtaaagtgtacccctctgcagaggttaactaactgttcgaacagccgtgcccacggtcatgggtggatgtgaggtggttcccgttgcgtagatttgtttgcctgtgctttgtgaaaagttgttgtggtgttggaatcgtaaccagaatcagcctacgtggcagatggatgacctgagtggtcagaaacgaatctgtgtgattcgggatgtctgcgggcatcatagactaggcttcccgagtggaagcggattgctttgctgctgggcagctggactctgggagtccgagaaaatgaaaaaggctctgggagccgcttaatcaagtgaaatggctctgggagccgataagtaatgatatgacccgggaggtcggtacattaccatttgacttgttgaaaagcatctcttaagtcgaatcgagacacaagtctcttttcgatccaaactcaaaaagaaataaatcacttagtgttttcaaaatgatttcaaacaaaggatttgcaaaacaaccttgcctctcttccaagcttgcattaaacacctaaattcccgtgacttgctgagtacgaaagtactcacccttgctctatataaatatatatagttcccccgccttgaagtgaagtgaagattagggtttcgtcctggttcccagccatcgcctgtggtgttgggtgttagtccgttggttccgctgctgctgctgttgttggtgtttcctcgtccatgtcgtcggttgcattctcgggctgttctgagctgcaacctaagttaaggtaaataagtcatctatttattttaaggattttcaatgattcatatttgtcaccatggataccagcactatggtcctgggactggtaccgagatcgcggtttcgtaggaagcggttcgcgccgttattcctacgacacgctcctatcaggtgacgttgtacggcggtgccggattggggtgtgacagttcccctccaagtcaacacatgttggcatcagctgcgttgtgttttag

SEQ ID NO: 22808 - DNA, 736 bp, Oryza sativa
acggcggatggcgacggcggctatcgccggcgagcaaagaggggtttctcgccggagcgacgaggggtcaattcgccggtgctggagcatctacgcgaggtcgcgaactcattccaccggtcgagagggcacgggcggcgccgagagaggccggcgacggcgagttcgtgcgcggcacagagcgactacgcggcgtcgagcactctagcagcctaaggaggaggaaaaacagagagaggggcggagggagtcaccgcgacggggagaggcggcgggggacggccggtggcacgagacgcgatcacggcgacctcgggtcgggcaagggaagaagacggcgcccggagtcccgcgtcacgcgcccacgcacgcaccggctcccccggtgctcggcgacggacggcgacggcgagaacagcgggaaggcaacgatggcacggtggaggtggagagtgaagcgggagggattgtgaggaggggctcggctttatagcggaggcgaggtcggttcgaggcgggagcgagcggcaaaggcggttcgtgggcgacgtggggacggcgacggcgtggatgcaagggacgatggaggcggtggatcggacggcgaagaatcgggtcacgagcgcgggaggagcaatatggcgcggtcaaggtgggggcactggcgcggcgggacgtcgtcggcgtcctctgcctccgcgcgcaagaagacaaggacgggagagagagaggccgg

SEQ ID NO: 22809 - DNA, 1964 bp, Oryza sativa
attcctgcagcccctaattttaaattgtattcctacttgaactcttcttttattttttttttctaattttggattttatttttatttttattcccaattttaattaatcgcgctcatattgggttcttatatggactcttcttttaatattctttatttttaattctaaattttaactattttaaaattgttattcctacttggactatcattttcttttataattttggattttatttaatttttatttcgaattttgattaatctcatattgagttcttatatggaaacttctttcaatattgcttatttttaatcctgaatttcagctatttttaaattgtatttctactgggactcttttttttctaattttgaattttattttatttttatttcaaattttgattaatctcatattggttcttatatagaaacttctttcaatattgcttattttttaattccgaattttagctatttttagattgtatttctactcggactcttcttttcttttttttctttttcttcgattaatgtgggaatttctagcccccacagcgaacgtggtgcctcctttcaaagctgttttaataatataatagatagatagatagatagatagatttgctacttcctattttttaaaaatgtgtttactagttggattgtaaaagtttacacccttgtgtttgttgcacaggtcataggaggaagagcaatgcggtcaagattgttctagcagtgttaagcagtattttggttgtcctatgcatttcctttgcatggttaaaaatcaaaggccggtatattcagtgctcttttatttacttagatgcgtatggtatactcacaagaaaaattaaagttggttacatttgattttgtgagcaggcaagaaaagaaaacgcgaaaagcacaggaagctatttttggatggtgcgtgtacatctgaagagattgaggatgggagccctatccaagatcttgaactcccatatgtaagatttgaggaaattgctttagcaacccacaatttctcagaagaaaataagattgggcaaggaggttttggcaaagtttatatggtaattcgttccctagtaaaacttcctcttatttattatagtttgttcactaattcattttgtatgacacatgctcaaatacaaatttcttctcaacttttttaaggcaatgctaggtggtcaggaagttgctgttaagaggttaagtaaggattctcgacaagggacagaggaattcaggaatgaagttattcttatcgcaaaattgcagcataggaatttggttcgccttcttggttgttgtgttgagggagatgaaaagctgctaatttatgagtacttaccaaacaaaagcctagatgctaccctttttggtatgccctggtgacatatcaagcataagctactaaatcgacttgacaatagattgcttacatttgcttctttctatagatgtttcgaggaaattgaaactagactggagaacacggtttaatataatcaaaggagtggcaaggggacttctttatctacaccaagactcaagattaaccataattcacagagatcttaaagctggcaatgttttgctagatgcagagatgaaacccaagatagcagactttggtatggcgaggatcgttggtgataatcaacaaaatacaaatactcgacgtgttgttggaacatagtgagtttctatttgaattaattgttcaaagtaagtgtgattaatttaaatcatgtttagtaactcttgcaattgaaatggttacagtggttacatggctcctgagtatgcaatggaaggtgtcttttctactaaatccgatgtctatagctttggtgtgttactattggaggttgttactggtataaggagaagctcgactagtaacatcatgggttttgcaaacctcatagttttggtga

SEQ ID NO: 22810 - DNA, 8319 bp, Oryza sativa
  unsure (1)..(8319): unsure at all n locations
agcactgttgtgtgttcaagaaaaccctgatgatagaccacttatgtcatccgttgtgttcttcctggacaatgggagtaatactgcacttccagccccaaatagccctgcctattttgcacaaaggagttctgaaatagagcaattgagagataatattcagaactcaatgaatacttttacgctaacagatatagaggggaggtagctaaggataattctttgacttaggatgtaacaatcactgtccaaagaaaaatgcagacagctgatgcatgatttgtggtttggaactcaatttgttgctattcttttctagccctttctttggtctttctcgttatatcacaaaaaaaaatctaaaaaaatctaaacaacacattatacttaaaaagtaaaagccaacatctgtacaagtgtaggatgtcactcagttgaacagacagaacgttgactgacacgaagggtatgcattcatatgaagctaagtcaccttcaactcgttcccgaatcccgacgcaccagtgcagcacgtacggcaactgcgacatcaccgacgggtgccgccgccacgcgcaagtgcctcgacggcttcgagccggcgagcggcgaggagtggagcaccggcaggttctcggggggttgccggcggaaggaggcgctgcccgtgcgacgccgccgatgatttcttggcgctgccgcggatgaaggtgccggacaagttctctatgctcgtcgctttgcaatgaaacagtagaccagtttaccaagctttgctcctgctttgagacttgccgggtcttcacctttcctatacataaaagctcgtcacgatctgtagcgatcagtctctttcagtacacaagatggggaacaactggatttaacggaccaaggttttcatagccgctgaggtaaagagttttccttttcatcccttgtcaatgagggattgaggggcaggaagtctattttatgatgtttcattgtgtgaagtggtaaaccaagtacggaaagttgccaacgttgccagggaagtgggccaagttgttgaggatggattctaatatctcgggtggacgtccacccgtgtgtttaaaacagtttccccaagttgttccaaaatctatatttcacacgcaggcaatgatatagcattgtagcctgctcacttcacttgctcagtgcaagctcatactgaaaaggaagaaggttctgatggatcgatcagctgcggctttagcctgcatcaccagtgttctcctcctcctgccgccgccatgtgcatccgacgaccggcttgtcaccggcaagccgctctcccctggcgccaccctcgtctccgacggcggtgccttcgccttgagctttttctccccctcaactgccactccggagaagatgtacctcggcatatggtacaacgacatcccccagcgcacggtggtgtgggtcgccgaccgaggaactccggtcacaaacactagttcgtctgcgccgacgctgtcgcttaccaactcctccaaccttgtcttgtctgacgctgacggccgcgttcgctggtcgaccaacatcaccgacgatgcagcgggctccggctccacggcggtgctcctgaacaccggcaacctcgtcatccggtcaccgaacggcaccatcctgtggaagagcttcgatcaccccaccgactcgttcctccctgggatgaagcttgggatgacgttcaagacgcgtgtctccgatcgcttggtgtcgtggaggggccccggtgacccgtcgccgggaagcttctcgttcggcggcgacccggacacgttcctccaggtgttcgtccggaaagggacgcgcccggtttcgagggacgcgccatggacgggctacatgatgttgagccggtacctgcaagtgaattccagcgacatcttctacttctctgttgtcgacaacgacgagaagagatacataacgttcagcgtctccgagggctcgccgcacaccaggtatgtgattacctacgccggcaggtaccagttccagcgctggaacatcagctcgtcagcgtgggcggtggtcgccgagttgcctagatgggactgcaactactacaactactgcggcccgaacggctactgtgcgacaacacggcgagggcgcctgccgtcccgacgtgcaagtgcctcgcagggttcgagccggcgagcgcggaggagtggaacagcggccggttctcgcgtggttgccggcggacggaggcggtgcagtgcagcgaccgtttcttggccgtgccggggatgaagtcgccggacaagttcgtgcacgtcccgaacaggacgctcgacgcgtgcgccgccgagtgcagcaacaactgctcctgcgtggcgtacgcctacgccaacctgagtagcagcatatcagagggcgacgtgacgaggtgcttggtgtggtcaggcgagctgattgacacagagaagataggcgaatggcctgaaagtgacacgatccaccttaggcttgccagcattgacgcggnnaatgtatgattacaattttcttctgcaaaaaaaaaagtggttacaatttcagtgattatatgagaagtggattcttgtcccttaagaggacatcttctcgttttatgcatgacatttaaaaagttatcaaaataattgaaaaaaaatgttaagatagatcaatatatgatatattgtttcgcaaacatgcaaattaaaattcgacttatacaattcaaaaaaataacaaatttgactgtgaattacacgttcttttcataatcaaatttattatattttttttctacttatataagttgaatttgaatatacatgttcgtgaagtgacatattacatgttgatccatcataataattttttgatgactttttaagtgaaatgtaaaaacgaggggatatccctttaagggatgaatatagttttccgattatatgctttagtactccactactcggtaccttttaataccacctttttagtttatttttattagcttaggtaccaaaatttacaatagaaaccgtgccaaggatcgctatgttacaatttactacttcctttctttcttaaaaaatacaattgctagttggatcgtaaaagtttgcagcgttttgtactgttgtaaaggtcggaggacgaagatcaatgccgtactcaaggttgttctgccagtgttaagcagcattattattgtcctatgcatgtcctttgcatggttaaaaattaaaggtatattcagtattcttttcttttcttagaagccccatggtacagtcatcagaaaattaacgttggatacttttgattttctgagcaggcaagaaaagaaaccgggaaaagcacaggaagctaattttcgatggtgcgaatacatctgaagagattgggcaagggaaccctgtccaagatcttgaacttccatttgtaagatttgaggatattgctctagcaacccacaatttctcagaagcaaataagattgggcaaggaggttttggcaaagtttacatggtaattcgttccctagctagtaaaacatcctcttatttattatagtttgttcactaattcattttctatgacacaagctcaaatttcttctcaacctttttaaggcaatgctaggtggtcaggaagttgctgttaagaggttaagtaaggattctcgacaagggacagaggaattcaggaatgaagttattcttatcgcaaaattgcagcacagaaatttggttcgccttcttagttgttgtgttgagagagatgaaaagctgctaatttatgagtatttacctaacaaaagcttagatgctaccctttttggtatgccctggtgacatatcaagcataagctactaaattgacttgacaatagattgcttacatttacttctttctatggatgtttcaaggaaatttaaactagactggagaacacggtttactataataaagggagtggcaagaggacttctttatctacaccaagactcaagattaaccataattcacagagatcttaaagctggcaatgttctactagatgcagagatgaaacccaagatagcagactttggtatggcaaggatctttggtgataatcaacaaaatgcaaatactcgacgtgttgttggaacatagtgagttgccatttgaattaatttctcaaagtaaacatgattaatttaaatcatgtttagtaactcttgcgattgaaatggtaacagtggttatatggctcctgagtatgcaattgaaggtatcttctctactaaatccgatgtctatagctttggtgtgttactactggaagttgtaactggtataaggagaagctctactagtaacatcatggactttccaaacctcatagtttacgtgagtatatatatcttttctgtagatttatctcagattaaaaccagaagatttgggatcttttttcttagttctataaccaaacattactttttattgtttcagtcatggaacatgtggaaggaagggaagatgaaggatttggcagactcatcaattatggatagttgcttactacatgaagttttgctatgtatccatgtagcactgttgtgtgttcaagaaaacccagatgacaggccacttatgtcatccgttgtgcccaccctggagagtgggagtaccactgcacttccaaccccgaattgccctgcttactttgcacaaaggagttctgaaatagagcaattgagagataatattcagaactcaatgaatacttttacgctaacagatatagaggggaggtagctaaggataattctttgactttagatgatgtaacaatcactgtccaaagaaaaaggcagacagctgatgcatgatttgtggtttggaactcaatttgttgctattcttttctagccctttctttggtctttctcgttatatcacaaaaaaaatctaaataacacattataattaaaaaaataaaagctcatatttgtacaaatgtaggatgtcactcagttgaatacacagaacattgactgacacgaagggtatgcattcatatgaagctaagtcaaatctagagtcgtcaacatgacggtaatcaatacaataccatcagaagtacgtctgcaataggataaattcaatattatttgtctaaggctggtttgagccgcctaatagtgtcgttgatcacgttttcctgcagctctctcctgatcctaataaaattcagccgacgatcttcacctgtccaaaataaagtcgatttcatcaatcatcagaagcaagtctggaaggtgactttcaggtttaagctctgaagtttcggtaaccaagacaaatgcaaaacgagtagagactttaaacatacctgaaaaattcacaacctacaactctggtttgatttcatattttcattgttctgactaggactgtacagaagagaacaccattggacggacattcacgcgcagtatgaacaacacgcacatgcaggaaaaaaaacacgcttccacaccaaatagtactagtatttacctaccgatcctcttgttcttggtcgcaccatcgtgttcacctcctaagaagaaaatcttcagttgttgttgaatattgcattgtgcgtaacagaggagactatttcttccgtccatttgttaggccttgtttagttccaaaaaatttgtctcgcaagacgaattctttaagtctaattagtccatgattagctataagtgctacagtaaccccatatatgctaatgacatattaattagacttaacaaatttgtcttgcggtttccaggtgagttacgaaattagttttttcattcgtgaccgaaaacttcaaccgacatccggtcaaacgtccgatgtgacacttaaaaattttatttcgcgaattaaacacgccgttaatctacctggcacaacgtcaccgtgtactagtaccaactgtcagacttagacgttgtctgaaactcttgatgctggaaaaaaaaaaaactcgcccaatgaaatttcattcagactgcaattttcagagtttatgtatctgattgtgcacttcgaagctgctcctcctgattctgtaatcctgtagagtacagaagggaatacaaatcttggtgatggatagtacagcttgtactaccatcgtcgtcttcctcctcctcttgccgcggttgtgttcgtcggccagcgacaagatagagcttggcgagcaactgttgccggggcaaacaagagcttcggatggcggggccttcgtgctaggcttcttctcgccgtccaattccacaccggagaggcagtacatcggcatatggtacaacatcaccgaccgcaccgtggtgtgggtggccaaccgggaagctccggcgatcgccgccggcaggtccatcgccccgaggcttgcgctgaccaacgactccaacctcgtcttgtccgacgccgacggccgcgttctttggtcgaccaatgtcaccgccggcgtcgcggctgggcgctcgacctcgccgccggtggccgagctcctcaacaatggcaacctcgtcatccggtcgaacggcgccatcctgtggcagagcttcgaccacccgaccgacacgctcatacctgagatgaagatccagctgaacaaacggacgcggcgtggcgcgcgccttgtgtcctggaaggacgccggcggcgacccctcgccggggagcttctcgtacggcatggacccggagacgtcgctccagctcgtcatgtggaacgggtccaggccgtactggcgcaccaccgtgtggacgggctacctcacctccggccagtacctcgccgccaccggcacgaccatctaccggacgtggtggacaacgacgatgagatctacgtgaagctcagggtctccgacggcgcctcgccgacgcggtacgtgatgaccagctccggcgagttccagctcctgggctgggacaagagctcgtcggagtggatcaccttcagctcgttcccgacgcaccactgcaccacgtacggctactgcgggcgaacggctaatgagacatcacgacgggcgccgccgccgcgtgcaagtgcctcgacggcttcgagccggcaagcggcggggagtggagcgccggcaggttctcggggggttgccggcggaaggaggcgccgccgtgcggtggcggggatggtttcttggcgctgccgcggatgaaggtgccggacaagttctcgacgctcgtcgggaacatgacgttcgacgagtgcgcggcgaggtgcgccatgaactgctcgtgcgaggcgtacgcccacgccgacctgagcagcagcagcgcccggggggacatcggccggtgcttggtgtgggccagtgagcttatcgacatggtgatgatcggccagacgacatggggccgcgccggcgagacgctctacctccgtgttcctgcaagttcaacaggtaagctaaattgataaattttgaaaccagatttcacaagcatatgcaggttgtatcatttgctgttggttaaaaatgagctgaaaactgtcaaagagacaaaattcaaaccagtttcgtattgcatttgttcataatacattgccctgttttggtgcaggtagcaggggaaggggaaatgttgtgaaaattgctgtgccaatactggccagcgctttagtgctcacctgcattttctttgtatatttctgcaagtccagaggtacagtagtacttctatccttgtttttatgtttagattatatgctctgatcagtcatgagagaagacaagaccttaacttaaactttacagagaatagaagaaaaagagatagccagaagacgttggttcctggaagtaggaatacttcaagtgaacttcttgaggaaaatcctactcaggatcttgaatttccatccatacgattcagtgatattgttgctgcaacagacaacttctccaaatcatgtttgatcggacgtggaggatttggaaaggtttacaaggtaatttattctgaattaaccttttgcagtttttttttctgaattgaattatactcaattcttacttactcttttataatttggaaggtaacattagaaaatggtcaagaagttgcaatcaaaaggctcagcaaggattctgaccaaggaatagaggagttcaaaaacgaggctattttgattgccaaattacagcataggaacttggttcgacttcttggctgttgcactgagggatctgaaaagttgttgatatatgaatacttagctaacaaaggcctagatggg

SEQ ID NO: 22811 - DNA, 1341 bp, Oryza sativa
gaattactaggagagtcgtcggaacatagtgagtaatgctcgaaccatcgcgaattaacatttgtttggaccctgtgcacggactaattttttgaagtgatatgatccaactagtggctacatggctcctgaatatgctatgggaggtatcttttctatgaagtccgatgtctatagctttggtgtgctgcttttggagatcgtaagcggttctaggataagctctactgatttcattgaggacttcccaaatctttcaatatatgtaagtattccattctatgaatttgtaatcacttcatttacttgcagaaggatttgaagagaagcaagttatacttatataattaacttatcaatatgatggattcaggcgtggaacctatggaatgaagggaaggcaaaaaacatgattgacccatctattgtggcaagttgcctattagatgaggtcatgctatgcatccatgttggactcttgtgcgttcaggaaaatctaaatgataggccactcatgtcatctgttatgcttattttggagaatggaagcaattcacttccagccccaaatagacctgcttactttgcgcaaagggatatcgaaatggagcaaccaagagatgacactcagaactcaaacaacacagtcactcttacagttatggaggggcgatagagtactaagaggtggtcaaatgggctcgattacgtcaacagcattcaagaagttggtagtgttaggtacttcagtgatgtcttcatgtgaaagacctgcaggagtgcccagtgcaaagatcccaataagaaagacactcctcaacatcaactgttttcaatatggctcaacattcattgaatttgagatcagaagacatgagtcttgataattgacggtttgatatgtattgttgtcacagaatgtgtcacttttggagagaagatagaaattggggatttcaactattgcaattgacttagctcaaagagcatataaatatgtacaagagaagtagaaatgtctataataccctcaatactcttaacagaatgagcatgctacatatacatgtaaaagagtagaagtaagggacaaaccgtttccaagtatcggatgcttcatgttttcaccatgccagctatcagatggcattccctggcacatctgatgacaattgacaagtacctcattagtcctgataatgtctttgtactaatgagcgaactaaaacatctgaataaatagtaagaacctgttttatgtctcaggggatacagttttcacatgctcgatgtctaggtaattagaccacaatccatcaccttggcttttagcttcttctt

SEQ ID NO: 22812 - DNA, 6260 bp, Oryza sativa
caactgatgaaacatcaacatatccctacaaatcgaagtaagaaaaaatatgtaacatcaaaagaatttatacataaatattttgatataatacaaagaaacatgtaaaacatatatgggatgaaacatggaaaaaatgacaaaaaaatatgccaatccaaatctaggtccttcttactctccgatggctggatctaagattccttcgatgaactcgtgcctatgacgacccagtgctccttaccttcgatgatcttgccttcctcattgtcggagtccacagcaacggccatctccttcattgctggttcgccacgatggggtcatcccctcctcctctccactggtgacctcctagatgtcttcttactctgcccgccacaacagtcgttctccccgtcactatcgccaccaggcggccatggaaacaacaataccatcatcaccgcaaccttttcatgtatgtggtgtgaggtttagagagagaagagagagaataaggggatagagacctagaaagagagaaataaggacatataagtgagtggtgcgggtattcgattttttaaccaggatcggatgcccaacccagtgtttttaagaaagtgttccaattttaagaactagtgagcgtgcacgtgcaaggcacgtccatacatacatactctctcaggaattcatcttggctctagctgttgggcgcgtggctccagcgacaagttggaggcaatagcaacggtgattcacgacccatggcgcagctcaccctctgccgttgatcatgatccatcctgttcataaataatcgcacaggttactaatgcaatgaacaaagatatctaaaggaacaatatattcttgcagtgtgtgctatagtccttccataatttgtccagctcatatggcccaaagcaaagtatttgttcaaaatatatgtagttctgtgaaatttactttgaataaaattatgtctgactaccttcaaatgttttgcatgcctcttgttcaagcaaaattgggtgacgtaataagaaagtaggtctcaagcaccatagatgcttgcctgcaaaatagcaattgacataatattggaatatttcctgtgcgaaatttgttatctacggccagtagcccttatgtgaagaaatatcagattgatcttaaatataagaaaagaaaaatattgattttcagttgcttatccagtgtgtagcagcatggcagttactgaggatgacaatatgcattggttggcaggaaactacaaatgcattgcaagcaaccaacacaagtgctcaattcatagcaaatactgcccatacattgaaatgttaagaaaaacagagtggtctgttaaaccggcctgcatttgtaataaaatcattaatgaacagctaaagtttggactatcatagtacatgttgaacagtatgaaattcatatttgacaccacacatttatataggctcctagaacacaattcatataccgaataaatcaatcaaaatagattatacatgcaaaagaaattgcaattggcactaaatttagctgggtggcataattttcacagtactatattcactaattccaagcattcatatttgtacaggaccatctataattttgttttgaacatgtaacagcttcgtggattgcaaaaaacagaaaatgtgcagcacaaaaccacaaaaagttcaatgattaggagtaaatgagaaaaccaatcttaaaacgtgaatataattacacggaatgaagttgtgtatattgaaaatgcaaggaaaacgctgattaacttgatcattacctttatgtcttgttctaactccatcactaacagcatccccttcactgatcaaaacagtggatgagcacttccaagacccatagaagacctgctccaacagagaagaatataagcacaatagagctatgtgtttttccttcaattcagtgagtccaggtttcatcagtcaaaaaaaattaatgcaatgcatcacgtaaattgctacctacaacagtgtctcgaatcaaagctttggcactgcacagtaggcagcatgcatttttatcaggaaggctgaaattaagggaaataaacagctccaagcctccaaccaatctgaaaatgcatcatttagcataagtagtgatctatggccatttcatggtttgtcaacatgatttcttttgggcagcatcataggaggcataactctctttgttctaaataaacatgatgtctattttaatgtatatatccagaaattttaggaacaaacatgttacctttcagtatcacggttcctgaataggtttgggtagcaccaaagccagcataatttgtgatatctcttatgggcacccttcctatttaggaaaaagaatgaaacattaatagcatgcccaaacaatagttactaatgaagtaaatagcagtggcacctgaataggcttggtagcaccaaagccagcataatttgtgatatctcttatgggcacccttcctatttaggaaaaaggatgaaacattaatagcatgcccaaacaatagttactaattaagtaaatagcagtggcaaagaaagcagaatcattacatagcagtgatccctacctgtgacgattgtagagggagtgcagcatacctctctgtcacgctttctcctatccttggcagcagttaagtttgtaacatcgaccatggcaggtcgtcctctaatgtgtggcaggaaagagtcaaatcaaaccattttgtatcaataacatgttgtggctctgttaaaaaaaacatgtgaaagcctttttacgattaaacagataaaaaactttttaaatagagaagctaaataaatataggcacattaatctggaactgtaaaaattgaaaatgagagataggcactgaattactgcatgttagtagagaagaaaatgtccaggcacttgtgatgtccctgcaatgctgcaacagaaaaaaaaatgttcagagaacaaattgtccagctaatgataaatccctgcaatagttgaacaggcataaaatttcagatagttacccagcagaaaattaaaaatcaaatcaagtatgctcaagcatcaagttctgttttagtttgtaagtagatgagaaaatgtccaggtacttgtgatggtccctgcaatgctgcaacagacaaaaatgttcagatgaaaatgtctagctaattatgataaatccctgcaatagttgaacaggcaaaaaagttcagataggtacgcaggagcaaattacaaatcaaatcaagtatgctcatgcatcaaagttctgttttactttgcaagtcatatccacatgagaatggtagctgttgtaggtatatgtgtgcggatgactgcaggtcaatgggaacagtaacctgagaaagaattagatcgcaaacttttttgtttacagaaagagcaaattattcctcgggcttgctaggccgaaccatgatacagttatttacacaacctacactattaccttcagcagttgacattgcacgacacaaatgtaaatggaacatataaaggactggcagagatgcttctaattacacttagaatcagaatatgtgtagtctaacaccaaaatttgaaggttactcatgtccaatccttttgctcagtgctcaaggaactgtaccagttgtttgctctcttccttttaaggtcagtgctctttgaatctgttactatacgaagcgaaggtataagctgcgatgccagcaagtataaatacttgaagccatataacagagtaggtagggtaatatctcaattcatttctcaaattggatatttcctataataaaaataggaaattcgactaaaacagacttatctcagaagtaagacacatacatggtcagcagggagagccactgtgttggttgcaatagatccacttggagttgagaaagctcaagagtggtttatacagagacccctactacaactgcagcactttagagatatgtcaattgatcccaaagtcagacctacaggagatagaaaagcagacgaatcaattccatttaatttcagttcatcctatgtgtaaagatacttcttaattttcaaatagatttcagtaaaaaaaatgactgtctatactaccaaatgcaggggaatattttgttttaccgaggattggaatcagctcttcacaacttcgccgcccttttcaacccttcaatccaattttcatcaaatcagtcaaaattatgaatccaaccaaataaaaaaattgaatactatatattgaccgaaagcacctaacctaacctattgtgcattcaaatatagaggcaaagtaaaaggatatacatttcattagagaatctgataatctatcaataccaacataaacattcagaataacatttatgtttatacctctaatttactcgcacatcccgacatcaggcatgatccgcctctgccccacctctcacctggaaggaaggtctatggcaatcagggtggagagcagctgaaaacggcagccatcgtgaggaagacagacgaattgatccgtggcatttaacatctaaaataatacagattgcatcaacggggaattttacccctttccctctacctcttgcgcctaattagcttcattagtactacatgattcggtgctaaccaccacagagcaagttgcgcatcagcctgcttgtctggaggctccaaatctgtcatacactggaatatatataaatagaaatttaaaaacataaaaaatgttccaccttatgtagcaaaagaacaaaagtgaatcacttggtaacaaaatcaattgtctactgcttcttcaggctccatttctcggagagaccactcaaaactcaacatgatgttttcggttatctggcgtttaaagattaatagtatgattatgtgaaccatgttaacgaattatgtttgagtgaatggatgcaaattaacagacaaattaacagagagagaaccacacctgagaggagaggtcggtgccggtgatgatggcggcggcggccacgacgccgttagtcagcatgggagaaggtgcaagcaacctgaggccacgacggctgtgcgcggcgaaggagaatcggcgacgacgactgaacggcggcggcgcggaggagatcctgaggcagcggggagaggggaggtgggcgatgcgagggagaggggagtgcggcgaggggaggtgggcgacgcgagggagaggggagaggggagtgcggcgggtgaggcgggcggcggaggtacgacgtggggagggcggcgcggcgcgacgtggggatggcggaggttagcggcgcgcttttttttctatttttcttggtgcgtggttactttcttagggatgacaggtgggtcccacgcaacaacggatctgaaaggggattgcaggattaagaatgaactcgtactttatatatatatatacacacacgttaagctacttgttttatgtggggataaaatccagaatcaagagctaaaagaaattaaactgatcctaataaatggagcagaagagaaattaattctttccgtaaaatggacaacctctataatactagtactcacacctgtctgtagccatcaacgcggactcccctgacagagtggccccacccaggcgcgtacctccctagtaaaaacgccgcgccggaacccgtgagaaaataccggcgaaactcgaagaccaattaaattcgaccgttgccgttcccccgtttaaaaatcacttgcccaccgcgatcccttccatcgcctccccatccatccgaattccagtcaaaccaacaaaccaatcgaagacatcacgcgaggagagaaaaaactagccgttgcgctactcctccgccatggacgcgacggcgccgctgctcagccccgcctccgacgaccgcttctgggaccgcctccgcacccgcgtcgacaccatcctcgaggaccgccgcctcgtcgctccccccgccgccacggtgagccgcttttgctgtcccccgtttgtttgttggtttttcttcttgcgtggggagttggatcttgatgtggcgcgatctttgcagtgcggggtggaatccgagcgggggaagcggctcagggaggactcgctgatgctggtgcgtggcctcgactccgtcgccgcctcgctggcgcagctctccgacaccctcaccgccgcgcagaaggttcgggatccacgccgccggcgtcgcttgcttctt

SEQ ID NO: 22813 - DNA, 2494 bp, Oryza sativa
tgctcaggaagtgaatgcgctcgccacgtgctcttcccaggcgagggaatgcgagagaggtgatgaggaggaggagccgaaagccaagcggcgctgcagcttggctgagacggtgagcttcgacggcgagactccggtcgccggagcagattcaggtgaaggttcagagaaagaagaattagctgcggatgcgaaactgcgtcaggagaacggcggcattcaggccacttcggaggtcgccaagagcaccaatctgaagcgtgccagaaatgtcagttgggagattaacagctcctccacatgatctttttccggttggtttgggttatttcagaaagctgatttggatcaattttgtgcgaactgtctatgcagctggcggtctcgatggccggaagagcggctgctctggcgagggagctgaagaacatcaaatcggagctgcacttcatgcaggagagatgcggtttgcttgaggaggagaacaagaggctcagagaggggtatgacaatggagttccccctgaagaagatgacctggtaattatggcttcgtgctggcctcagttcttgatttgtcagaccacttgggtttcacatccaacaatttcaacagcctgaaaaaatttcagcatcttggatcacataacttctcttgatttctgtttaatgagatttgttagtctgtcacactacttgggcagcccccagcatttcgcagtcaagattgagcaagacaggctgaaaaattcagcatcttggttgacattatttctgttgatttttgtttaatgatactttatttgttagtatgttaacaatttccggacaaaattttcaggtgaggctgcaattggaggctctgctcgcggaaaaatctcgactggcgcaggagaacgccaacctgtccagggaaaaccagagcctgattcagctggtggagtatcatcagctgacctcccaggacctcgctgaatcttacgaggacgtaatggaggggatgcggctggacttctcgtcgccgctaggcaagatcgacagcgatgaagaaggcgagcgtgagaaccgaagagttgctgtcactccatctgataagttggaagccttggagtcatctgatgagtagataaatctgaggagaataagctgggtcttctccagtggtggatttactgatcagtaacagtatgatcttctatttctgctgttgtatgatgcttcaatttggccactctcggtggcaatatttatgtgatcaattccacttcgtaatgtgacaataacaaatgtggttctgaatcttaattctaaataaaattttagtctttggaaagcagatccctctaacttaactgcacatgcagttgattcattggcatgtggatcccgctttgctatgtctcacatgtcagtggctcaatttaaatgtagttaagccagaggatccctttcttatgaaaattcatcaacaatgtgaatgccacaaaagcaggcatgagtaatttacagatttatgaacttgacatctccaagacactctgatattctatctcctgcctgactttggtgctagtttttcattgtttataattatttattcatttcttgtttgtaattatatacacttcctaagacaaaactatcttaactcagaaatttgttcaactataagagaatgttcatgaaaataagccaaaaaaaaaaagaaaaaaggggtcaaatttcatcccaaaatacccctgaaaattttcatttaacaggctttacaattcctgcagtaaattcattttctgcccattattctgctttaaagaaaagagcttcatcggagtaatctggaacttcaaataagttagaacaacaaccttttcatttctacacataaatcagaaccatcaaaattgggcgttaatagtatacactttatgacaatgcgatgagtattgataacgaaaacacaaaggctgaaaagggaacttgtacagtgagccatcaacaattggcatcacaaattaattgctttcgacacaatattgttgatccagacaaaggagataattttataaggaaagatagtataattgacaaggaaaaaacgaagaccgaaaacggaactcgtacagtgtgagccatcaaaaatcggcatcacaaattaattgcttttgacacaatattgtcgacacaaaggacggtatttacaggacgtgtatacagtactgttctctatgttgtattctctagtcagcttctagtgcatctacagtaatcgtgataactaatttacattcaggtcatcccgaaacaaattagaagaggatcagagcggccaaattgaccaaaagaaacctgaagactaaactatcataccacattactgggttggaattactaaggggtctcaactgtgtaacgcttgctgggttcccaccctttgtttcctcgggggagtaattctcaggtgctgaaggggagaaacctgaagaattccgtgaat

SEQ ID NO: 22814 - DNA, 5816 bp, Oryza sativa
aatgctttagaaaaccaaatagttgacctgttaattctttgatttgtatatatgagttctggaatcacatatccaaagtaacatgttctttgatcccgccatataggagctgcatcaatcgaagttagattgcttaagattggtcatgggtgtggttttttgaaactctaggaccataacactagaggttatctgccactgccacatgccaaaatccctatggtttcgagcaacttgaaatttactctagtaaaaaaaagaaattgctcactgttgtgggttaacatctagtggtgtctcctcttgatctgagctgccttgatctccaaagctaattctcccaataccatcacggctaaagcacattgcgaaggaattagatgtcagacctttttgtgctagaatgctaggaattgatatcatatctatcccaagtccaaatagaccgtttggagcagcagcatccagaaatgatcctgtctgaacctgtccacatctgataaatgtagagaagattttatcaaaatgctgaacacagtctccttcacccattatatgaaatgtaaaaattacccaaatagtatttgcgccttgagaatttgaggaatggcatcctctgttgacaagtagagcacatcctctactagaaaaccagaagaagatgtgtctgcagaaacataaaccatcttgtatggacactgtgatgttgtagagcattcctttctcagctcacaaaattggctgttgcaaggaactgcttggcttgttgacgacatactagggatgtaaaaggaagcctgaaacccaggggcagccagtgagtaactgagcaatatagttacccaaatcttatcttgagagagaacatacatgtagcaaaagtgccacttggaagaaaaataaattgtaatttttcagagtaccaacacaatcaatatgacaatagaaaatattactttgctatagaagttttaagtgtgagaaataaaaaaacaagcaggcaaaacttttgtccaaaaaggagatagactaaggtatgtatgagaagttgagaacagaaacaaaggaaataaaaacaaaaaaaaatcatagaaaaagacaatcaggtacactcaagctacatatatgcacaacaattatatcaagtggtacagttatggttggataaggctcaagcacttgagtctcggcctctactagcttccggcagagctccttccaacacggtaggaagtcttcagatcataagaagaaagtgagactagcaactttgttacatctagccaaggatgacaatgtcatactatatagagccactccctaaaagctcaatctaatatttccaaataggcaactgataagaatgattgccctaatttctaaatttcaaagtacaatcataaaaataacttggtagccaaccaagcttattctcatgacttaattatgccaggcagcaacgaagcttcatggctgctgtctggctggaggattacgaaccagccctactatagaggtattaaatccatcagaggaaggcctgaagtagaatggtttgaggtgaaagaatgcaccggtttggtgatggaaggatgtagaaaactggtccaggataagactttaggccctatacagtgtttattcataacatcaaggacagactatcagtatttatactcattggctacaacaaacacactagagtaacatccaaataatgagcatattatcattgtgtttatttgttacatgacagaatagtggcccatgcacaccagctatagtaacccaccacaagttacagcaaataacatcaaggacccttgaatgatatggtttaagagatataatgtataccttcaaatttttcctgatgtaatattaaagcatttctactcttggaagctaaaacaactaaacaagtattcatttactggaaaatttgaaatcgtgaaagtacacacacaacacaggcttttaatctagaaggcaacagctgcaacaaatgtacaggtactgacatatgttgcacaaatgtacaagttcgatggcattctcacaaaccaacatgtttcatgccttgcgttccacttagtctgatttctgtcttgctaagttgactcacccttgcaggattaaagagaggccttgtgattaagtattctgtacccacttgctgcatcagcccttgcatcgtagtcatcacaaacatgtacaatgagacacatatatctcattgtagatgccccattcaagggccagttgatgggggtgatacagaaatcaagctaataccgcacaaaacatgtaggtgtgtgagaatatccactgaacttgtattttgtgaaacatgtgtaaaaatgcttgcaatttgtgcaattcactcaaaagaatagaaaaagaaatgaaggtctatggcattgtagttatagcggacatatttggcaaccttcatgcccgctatatactctgcaaacttgactcttgatgctaccgaaaggatagaaaaaatggtttacagcctaaaacaataaatgtcatgtttccttggtaaatctctatattactgtttatgtgaaaagcatagcagtaaggtgaccacatttaggatctatgagaacggccaacaaggctttaaatgggtcattgtttagaacagtgggaagaagaaaataaaacagcagcaagaaacaacattgaagattgaactgaagtcaacaagatttcagaacggctgatctatgcagtcaatgttgttttatgcgttattgagacctgtcgattcataagattagatgatcactcagatattgtacttcaatttacaattttacaggacaatacataccatttaaacacctaattaggacttcattatgaaaggttacacaatttcccacaacattcgacactagttatagattatgaccaagcccatgcgtttttgacaaataaatcaagagcaaactaaaggccagaaagatcagatattttcatccaactgaacggcataatgccagacatcttagcgaatcgacatctcattcaatttttactaagctgtgtaattagtagcaaccatcttctggcaccataagtccattcccacatgcagcatatcaccaaatcataccgtatatcagcaaaaatcctaaaaagcattgcacagtttaaaagccactgaagcaacatgaaaattcttgcagcatggatcgttgtatagctctgaattatgcaccaacacctaaatgaacaaaggatctatcgaattgtcaagagaatagtgctcttaccgatccagaagcggccgaagccggcggcgtacacccatcacactggcacggcagccagaagaggtcactcccggtgtccagcgccaccatgaacgtctggcccggcgtgccgaccgtcacaagcgcatagtgcaagcttttacatatccacaaaaatgcgactcttcactaaaactctcaagcaccaaaccactacgaagagggagtgagagacggggagaggccttacaatccgaggttgctgaccttgagggtggcgtttccctcagaaaacgtgagcggcgggggcttgtctcctcctcctccaccgtcgccgccggctgctgagagcgcgcggcggcggtcgtgcccgttcagggccgcaacgtaatcggcgctgccgtgctccggccagcctccggggagcacgtgcccgcgcgcctccgcccaccgctgcaccggagaagagaaccggtggtggaattccagcgaaggcgccctcaggcgaccacctccgccgccgccgcccgcgacgccgccaacgacgagaagcaagagcaaggagtggaggagaagctggaaggatgacatcggggtagtggccgcatgtgatccggggccgaatcggggagaggaggcgtcgcgtccgcggcggcgggtggtcggcggcgtgcgctaccggccggaggaggcggcggaggattttgcggttttgtgggcgctgtgtcgatgaaatggttttgctttttaattttgagtattttttttctttcggctttggtttagtacgggaagctagttattgggtgtagcactgcactgttgggctttcgctttttactcgtgggttgttaaagactagttgggactttggtctgtccagtttccatctttaatctgctgctttttttctctcctttcgttaaagtggcacgatgtgcatgtgatatctgaaattggacggagaaatgagaattactgttttttttttctttcggttctgggaatcaattccaatcgctatcagtcataatgaccacaatataacattttgataccttggaaacaaataaagtacggtctagtaagcagaatattgctccgatgttcattctaaataattttgcggcttcatcttttcgcttatacttatgctcatcagctaaaatttaaattttcaaccttaaatttaaagttgattttgtgattttttttatcaaagtttatttttcagtccctgcttttagatagctaagaacacatattttattaacaaattatttttcatttgcaaatataccatttggtttaatccatgaataagccaaaataatagggcggtccatattattgtgaaaccactgcaaagttgtgatgaagataaagattttctaaaagttgcatgccgaaagttgaagactacggttatgcaactttgtagtagcgtgcaccacgcaaggcacctctgatcaagcgtcctctaagctccagcgtgtgccgagtgccgacgatcaccacctgtattaggccattcccaacccaatgactaggatagtgtccatagcattaaataagctgtcacctaggatgaaaaattatgtggcaagtgaataaatgaggaaagagaaggaaacatgtcttgcatgagacatggtttctacacaacatataagacatcatgtgatataagtagcattaaatttaagtatggaatagtagtatttgcattgaaagagtaatatctagtactagtttcttgatgatgtggagcttatggaaactatgtctagtgtcttggattgggaatggcctgatctccaccacgccgctagggtgtcacgccctgaaaatcgcctaatttaataattcatcttttaaatcatttttagaaattattttaaaagcctatgagttaaactagaataatctaggaaaaatttcaacgtaaaattccattaaatactttgcttgtttatctattttctatatttttctgagaattatttgagcaagaaaagtatttttaataaatgaaacatcatggcacgaattattttaattgaaaaattctttaaatcctcctctaagttgttgggccgtttccggcccaactctcctctcagccgcgcgtggccgagcggcccagccggctgtcacgccctgaagttcccctcccttgctctaaattcataaaataaatcgtccgaagaaattgtttaatttaacctagagatgaatccctagttaataaatgcaaataataatcggaattggcatgtggaatttttcttgagttctacatgtcaaaatatgctaacaggatttttagtggaattttcagagccttggaaataattttaaccaattaaaataagcaaagtgcaatattaaatccctgggaaaatcctttttcctttttatctttcctttttcccctctttttcctcctttgggccgccggcccatctctcccgccccctcccgaagtccaggtcgcctccccctcactccctcgggcgctgacaggtggggcccacctgtcag

SEQ ID NO: 22815 - DNA, 13234 bp, Oryza sativa
cccctcggtgagaatcggtctccctctcttcctctctctccctttgctgcgccgcccgccgtgtagcgccgccgctagggtcgctcgcgccgccgcttcggccgccgccgcggtctttgcgccgtccgccgccgcctcccgtcgccggttgccgtcgctggcaaccgtgcgcgcgcgccgccgccctcgccataaccggccggccggcttgaagccgagccgagccaccagccgcgcccctcccgccttgtgccactgcccggtgggccccgcctgccagtacccctccctctccccttgtgccgctgaccagtggggcccgcatgtcggcgccgccccaccccttgctgacgtcagccctgggatgaattattgcgcaataaattgattaagggtttttctttattagtaaaaacacagataatcttctaaaaatcataactaattcatccgagctccgattaaatccattcaagtctcagtaaattcataaaaatgtgtagaatccattaaaaatggttttgttctctgtttcagtagtcttatagcatgttttgcttgtgtgctttgtttgtcgcgtagatttcggccgtttcgtcgattcgtggtttctcgaagacgttgctgtgggtccatcagtgcgagagcaaggcaagtcatacattgcaattgatcatattgtacctaatttacaaatgtcccgcatttctattaaatattgcattgttttacaatatcatgtgggatgggtcctattactcagctatatgttgtttcccttatgccattgataacttgggtattaaaatgactagaggttggtttaggagatgcttagccatgcttagttcaactagtacacaaaaggggccacattaaagcatagactttgattattggcaatagctttggattagtgccaccgcaatggtgttggttaattaaaatacactacatggtgggctgtgggtgcatggttttgctagacgtgcccatggcgattaaggaccggttcgcgggatgccctggaagaatttatcgtacttaccacaagccagcgtgggcaacggctgggcttgtagtgtagcttttctctagccgacgtacccaggcgagggtgggcgtgatggagttgggtcggccggggtgtccggttgatcggcttccggattcaccgcggcacgaaaggggggctgcccgttgcctgctggggacgggggcgaaccctaaggtgtggtgcgatcggttagagagggttatgcgaagggtcctgtcacggcctctttccggtatgtcgtggtggcatgtcggcgcacgggaacgtgtcgtggggctgtgtcttgtgggtacagttgtacacctctgatcagagtaaaactattcgaatagccgtgcccgcggttatgggcggtcgaccagattcaccgtgattagtttcaccctagttagcttttggaactggttagttcaggtggtggtttgggcctgttgcaacgtggtgtaacgttggacagtgattggttaatatggattaattactataactgttttactgctttcaactactgcttgaaatgccggctttatgcaaaagaacctttagcatcccttggatatatcttgcatcatacctcctcttccggtgtgacttgctgagtacagtgggtagtactcagtcttgctctcttttccccctcaccagagttgaagttcttcccagttggagatgtcttgaagaggttggtttcgtcgctgccgtcaagggttgcctgtggaatggagtcgcccgctgcaggagtcaagtcttcaggcttagctcgctttaccttttccgctgcatttgtaatcttttatatttttgtaagacgtggatctgtatgtcaacaattgtcgtttgtgtaccctggctggtcctggacaggggtttaatacacattcagcttagaaattctggttcgtgaatttctgggcgtgacaccggcccaagccgccgccccgcccccccacctctctagccgccgacatgtggggtccacatgtcggggcctttccctacctccagccggccggccgagccgagtccgagcgccgctgcctttccgccaaattcgcctcacccggtcgcccccgagtccgattgcttgagggtaaatcatctcctccttatcctctccctttcccctaaagtctcggaggccaattttgctcggataaaccaaatcgagttcgttttgagtttatccatccaaactaactttagatttttccggcttcgattcctctcggttggagtccgatctctctaatccgagcctataaatagcatcccctaatcgtcctcttccgtttgccccaagtcccgagctccctcgttgcccgtagcgccgccgccgctttgccctagccgccgccgccgccggcgaccgtccagccgcgccgcgccgctgcggtagccgtcgccgttgccgtccgtcgccgccgtcgggtgcgcacggaggtgaggaacctcggccgcccctttgccgccatcgccagccgccggagagctgccgccgccgccgacccgagccgagtagccgtcggagctcgtcgccggtcgccgttcgtcatcgtccgtcgtgttttcttgtaccggtgagttcgcgtcgtcgttccctacgtctagatgtccttagattgcccggccgacccctctagagccggtggtcgcgtcgcccgcgccatggccggtgatgatgacgtcatcatgacgtcataaatccctttttcttagtttctttattagatgaaaatcgattaaacttcggaaattcataactaaatcatcgtaactcggattcgagtggttcaagtcgctaaatttttctaaaatcaagatctacatgttaaaaatatccacatgtactgtttatgcttgttttttactgttttgttgattttgttcttttgctttagtttccgacgttccggaggagagcgttttcgttgaggaaggttcggaagcgtttgcggaagctcaaggcaagtcacacagatcccaaagaaccttttgagcatgttgaacccgtttaaagctaatgttttatttcaacttatgcattattttcgaatgtcatcgggtggtgagcctttcccaattaattatggccaaagatgactttattttcctatgggttataatttgattagcttggaccttatatattggattggttcagctaaatgctatatatatatatatatatataattgcttagccctgcttagaaacattagctcattaatgggatgaattatattacattgttaattatggttatatttaatggtagctcacgatggttaatcgtgtatgataattaattgataattaaaacctgattaaaggtgggttgtgagcatatggtttcgatggttgtgctcatgacaattaaggaccggttcgcgagctactattgtgaaacatttaccgtgccaaccacaagccagcgtgggcaacggctttactttttgtatagcatgattcattacggagtgccagactgtgaagcgacgagaagtccgtgggggtcgctggggagtccattgcctctggttttgagggggagattatgatctaggaacggagcactgtggtgagttatgttgtgtaaagggtattgtcacagttcctttccgaggtaccgtggtggtattgaggcgcatggtgacatgttgtggagctgtgtcttgtgggtacagtggtacatctctgatcagagtaaaactattcgaatagccgtgcccgcggttatgggtgagtttaacaatgtttttcgtgattagtctcacaccactcattaatgataatattgtgttaattaatttgactcctggtttggaatggtatattccaggtatggaggtttgatttgtacaaccgggggttgattgtgcagatgaggttgggcctatgcaacacaggtgtgttgtatagtgtttatttaatactgattaattattcaattgttttattattctctaaaatgtttattgtttatgcaaatgagctttactatgccatcctttgttatcctgtgcacttgcatatttgctgtgtggcttgttgagtatgtcatatgctcattcttgcaatattcattcatcagaggaggggtatttcagtgaaggtgatgatctggaggactaggctttgtccgggttaagttgcttttggagtggagtcgctatagctgttccgtattcgttttattttcgctacgtagaattttattctttgagaggaactatccacctctgtaataatttactattttgcgaatattaattagctgtttaagagtactctattatcaattcgttattgtgtgcctcggctgattcctggacgaggatttaacacacatgtaagcgtttggaattttggatagaaattccgggcgtgacatggggccacgtgctgatgtggcaaaggcgtgtgatccaatacgacaatacatatatggagacttcaataagcatcatgaacctgctagtatacgctatgcaatcgcatatgcagatgagctaactttacaaaatgagataagttatcgattccatctattctaatttttaagtaatagcgagattaacaagctagatcatgtctctaattgtttttaatttggaaaaagtacgaattaccccctgaacaattgcggtcgaccgaattaccccctgaaccacaaaaccggacattcttcaccccgaactttgcaaaccggacaaataacccctggctcaatccgcggtggttttaatcctacgtggcagtccagtcagcaatttttctaattaaaaaatggtgggccccacctgttagttctcacccctctctgtctcttttccattcactttctctctctctcttctcatcttctcagatgaacgacggcggaggcagctggcgacggaggggagccgaggactccgacagctacggcggtcccagctaggggtgtcggagccgaggatagcgacgcgcctctgccttcgctgcgggccgaacgagccaagcgaccttcgcctctgccaccggcgcccgaccgagatccgcctcgtcggcgctcgtgcgacctctggctctaacgctgctgccagcgcccgagcgagcccgacctccgccgccgctgccagcgccctagcgagttctgcctgcccccaccctcacccgtcgccatccgtgaggtggtgttcgtcggagatgcggcggccgttcacgacgctggagggggagagtcgcgggaggacctccaccgccggtcgcggagaagaaggaagaaggagggtcgcgagggagctcaagacgtggtgggttcgtcgattgaccgcggaaacgaaggcgatgcggtcaaggatgagcggcacaccagtggttgcgagcctcctcgcggcggacgtggaggcagggaagatggtcgaagagccttcgtgtcctcctcctcctccgtctccggtgcacgtgacaacagcacggcgacgacacacaccaccatgttgaggatgacgaatcacgccgcggttgatcccagcatcacccatgccggcagcggccaccaccaccaccatcgcggagtgggcggtggctggcgccagtggagggcacgacggatgttggcacggctcctcgtgtgcaactggtgctccctccgccggcgccagaacatagctctggtcgtcgtcctccacgaactcgcccgctgccacattgctatcctctccccctggatgggcctcgctgccggcactatctgctctgctcaccacgagaggcagagaaggggagagagaaaaaaagcagcagtggcaagtggggcccaccgattttatttgtttttgctgactgtatcgccacatgtgtgccacgtaagcttgaaactgctccagatcaagctagggggggtaattagtctggttttaaaagtttggggtgtcaaatatctggtattgcagtttaggggggtaattcgtactttttccttttaatttcacacacgattagatgtattagtccagcatgttagcatgctcttcttgtgtttgttgttggcacgaagaccggcattatgccatcccagaacaatggttataggtgattactactagagaattgatctttttggtcggccgaaaaccataataaccgcggttctaaaatgaactgggactaaagatcatcgttagccccggttgaaatgctcataaccattttatgataccaaccaggactaaagatcatttttagtcccagttgaaaaagtgtccgccctcctaatctttttattcctggttggaaacaccaaccggattttcagtcccagttgaaaaagtgtccgccctcctaatatttttattcccggttggaaacaccaactgggactaaaaatcgacgcatatatagtatataattccttgcactaatcctctagcaaccacctcttcccttatcctcctcctctctttttcttatcctctccctttcctctctctattcttttcctctcaagcaagcacagcagagtgtgagcgagcgagtagggcggacttgcggtgatagagggaggcgcagcgggcagcggcgggtggccagcacaaggaggtaggaggcggcagcggcattgccggattgtttttgttctttctctttttttttttgagaatttatgattcattgcatggatctgagatatataatctgtgatgtatttgatttgtgtgtgatgtataatgtatttgcgatgttttttttttagaatctgtgatgtaatttttttagaacttgtgatgtatttagagatgatccttttgttctgtgatgatcgatttggggatttcacgatttggggatgtagtgaaggatttcacaatttgagaattatttggggatgtagtgaaatcaatattcaaagttgaaaacaatgaaaattcaaaaaccaactggacctagcttggctccatctttagtcccatttggtaacaccaaccgggacttaaaatggatttttaatcccggttattttaaccatctttagtcccagaattcgtagtcctagttgtataaccggtactacagggggttacaaaccggggttaaaaaccctttctccagcagtggattgtgtcgcatatagtgcctccgcctgaatggagacacgttgtcgacactgccctgaacggcgacatcactacctcggtacttacgagacgccactcaaagaatgatcgacatatacctggcctaaagcggttgcagactccgaacgaatcagctcgcacaccctccaccgcacgatatggtcaacgctagcatgaccatgacttgccaagcacatcattttcctaaagtcgatgttgatgagatcgagaacatgacgcctgtatgcgccagagactccttgctgccgcctccacacattggcacctcgatgatgccacacacattgtttacgtgacccactggatttccattgttggtctgccatctgaaacgccaaacgatgggtccttcgtgatcacccgctcttgcaatcgacagctgcagcctggagtgacgacgtggagctcacgccagcctaccctcgctgttggtacgcccgacatgcctcctacgcaactgcacgcggccgggacgcaggtcaaagccgccgtgagcacccgccgccgacccgtatggcaatccgagtttctttggcacgtagcatggagctacaaactgccggacaccgatcatggactgatgccaacgaatgccaatatcggtgttgcccgatgtcgcaccgccactccacctttgacctcaacaccttgtctttgttgtccgtctccgctggtaggttgcttacatgcttgccattggttctatccttcgcctctaccaaaaaaacggaattggagcggatcttgctctccatttgtggaacaagaccgtaatggctcatcgagcgagcacataagatgggccaactggtttttcaatctggtaagtataaggaggtgggctacgaatcttaatttgtcctcacattggcaaatggcatgaagatctacctcagtgccggggtacaggaacgtaccttggaagttggccacgaattggtggcaatggtcctcctatgagtacagagagccctcaggtaggtttgtcttccaggatcaagcctgggccttgaggatgatggggaaatagtttgccatcatattatcatcgcctttgtctgcctggatcgcaatggtgtagatctggaggaactccactaggttgacaaagacatcatatttctctgttaagctcggtaggaacttggcataccactgcacttgatagaggcccaaagagagagcatgacacccagaaccataagggcgacctcccaagggcacctcagcgagccctcgatattcctccttaggacaattcgtgcctgaggacgactagacctcctcgcgtcgtacattgttctcacgcctctcgcgctggtcctcgaggttgacaggggcatccttgtgcagccacagttcgttggggcaagcacaaatatacccatgctcgttccactctcggggcaaaccgcctcgtacaatgccctgatgaggggccggacgagccgcatgcgatcgcgatgagctcagggcagcgtgagacatggacccaaagcgagaagcgaggcctgcggccactgcctggaggtgggtagcacccatcaagtcggtaatcttcttgagccaacagcgctcgggagcaccactgtcagcttgacgttggggaaggcaaagcaacgcttctgtcatgaatagcgcagccttggtgtagtagagtcgaagttgagacaacgccacatcgtaagacagcgcgccttctctcgtcaaatggtcgaggccgccgcagaactagctcctaaacccccttggtgatagagggagtagaggttgcacgctttgcccgcctgtggtgaagatccgcccatcaagtgcaagcagtgcacctcgatggagattgtggagggtgcgatgtggtgtgaatggggtcgataaactcctccgctggcagttctgccactgcatgggagttgaagtcatctcgatggtgacccgccaagcgcgggaacacaaactcataaatgtgcacccctacctagatcgccagctgtcggcgtaggaaacccctatagcaggaaggcaaggtatccccactttgaagtttggccaaggtgttcaggccacttggaagtgtaataccctactccggtgtccttactatatgagatcaagtgtacaaagtggttttacagttgttctaagtattagatcatgaacacttcttcgatgtatgtggctagagcctaactcagtccagagcatgtgaactcaaacttttccaacccttttctcagtggcattggtcttccgtttaggtgctaaggaaataccacagcgcctatgcacgcacacaatggttggggcgagctaattggagttggtaaactggtcttgtcgatgtccttccaaacttgttagctggatgtgacaggctcaccaattggctaacatgtggatcagggtagacgaagtccttgttctagctatcaacggggccaccagtcggtctctaaagccaataaagagggggcccttgggtgtcagcagagtacgtgccacatcacccaccatttctctagggtgacatgggcaaacaaggggtgacatgaacagccacatcccccacatcgtccgtgacctgtccctagtaatcatatcacgccgcatttaacgtggattgaaagggtaaagcaacatacaggcctaagtaaaatagcctgaataaagcagattcgcccgttaagacctcatggcataacgtctatctcgaacccctagcccaaaaggagcaatagtcatagtctcgagcctgagctagctcagtcccgagctaacattgacgtcaagtcatcttcctcggcttcgaggtagcattcgcgactatttactattcttgctttaactatcatgggccccacagtgcaccaagaacctgataaagaggggaccatcattcccactttaccgacagtagccccctaccgcatcattgtgccatgttctgcctaagggaaacgaagaagactaagggggaattttggtgaaacaaattttgataatgcttggaaggggtatgtagtggcacgtctcaaattcctgtaaaatcataatggcatggttccaatttgaatgagggaatgtaatcttaacacatagttttatgcaaccagccctgtttcttaaacaaatattcttttaagggacaatttgaaccatgccacataaattgttttaaagcagaaattataactttaggctatactaggaactatctccatagagatatgaaagcatagcctaaaatttcagttacagcttctaggataagaacacatacatttgtattttatccgatcatcttagctatgattacggtattgaattgatgccttatctatacacaccttaaattgattccaaaattgtgctggcaccaatgctataaaaacccatgtgttgccaagtaagcatcttcatcaaacatcaatattacccaccagtcatctagtatttgatgtttgtaaggaaaaagatgaagaccaatcaccttgcactgattgcaatttccctcctggtgctatgtttaggtatttgagtacttctcagacataaggaagcaaacttccgtgcttacattgtctttacgatatctatttaatttgttatgtaagagaatttcatacctccaacacatactaaacccgtatattttccatctacatgtccagacatatcagggaaggtttcagctactgaagagtgtcatgctgcaccaatcacagaagtaccaaaaccttgcgttgatgcaacctgcaaagcgatatgctcagataagtaccaaagcaaaggcgagtgcttcagtactgatgggctttgttactgcaacttttgtgcgaatagccctccacttccacaaattgggctgaattgaagtactgagtctcgttaacacaaaatggtgtgatgtgcagctcattccaagtgcttaatcaataattacagaagatttgtaatttgtcttatcagcggaactgtttgaggcatatataagggtgataattggttgcagttcattttcttcgatttcattgggaccagaaatgcacctatgtgttctgactattgccagatgaataaactacaatatctaaattgtatgattcagaaaattcttactactgcttctaaaaaaacacatgcatcactattctaggtcaataaaaaacatacacattggaattttaagacactgccgtcgttggcttgtcaacgtataagccatcgccaagcttaattttagtgttgattttgagttttgcatcatagttaattcagtattggtttttaaatagctaaggacacatataaaaagttttactcgtaatttttttgtcgttcataagccattatggcttataatcagcttatgccaaactaagtatggcacacattggggaggtatgtatggacatatataatgaccaagttgcggaagaacaacttcactcaacaagatctaaaacttagaatatatgattttatatattgctatgaagttagtttgataatcgatttatgacagacctccatctcaagaacatgtcccgagctgagtataggtatttcttaacgacattaataaaaataataatcctagcaatggcgctggaaatggtcctggtatatggtttactgaagcaatccgcaagcgcacagaaatagcattctagcatttcacctgggagtattccaaggtttcgtatttatttaatcccaagagaagattgtaagagagaactatgctaataatttatacatgccacttgtataatcaaagtctgtgcagggttaagatatttatatcggtagcgtgacacgaagcacatcactcatgtatctcatttaatcattcctaaactaagtggaagaagaaatagaaaaacaatcaattcctataattctaatatacactaaactttagtctacatctgctagtatacaaccatatagccaataccccctaacagttccatcctggtgcatcgagatattgggaaaattgatctctcggtttgaaaaaccgggaggagatcatgcttcgaatgcagatcattgcttagattgttttaagggaacattcactaagaaaattaagaaatgggctaataggagcatgtgtccattagaataatccacacggatatatgtggaccattcccagtaacatctgttgatggatatgactcgttcattaccttcacagatgatttctcccgttatggatatgttttccccattaaagatatatctgaatcactcgataagtttaaaatattcaaagccgatgttgaaaatcagcataatgcaaaaattaaggtagtgagatcagatcgaggaggagaatattatgggagagatactccttatgggcaatgtcctggtccatttgtccaataccttcagatacatggaataattgcccaatattccatgcctggagaacaaaaaaaaatggagtggctgagcgtcgcaaccgtacacttatggatatggtacggagtatgcttagtcattctactttgtctatgaatattgttggtatttgatacggttacagataaaatccgcaagcgcacggatataccgatgtagcacttcccctatggagtattccaagggtatcgaatccaagggaacgtgtgtgatcagagcttcctccagttcatccaaggacaccaagcaaatgataggccaggatagagaggatttactagtcagaaacaatgcctaggaaaagcttaattttaatcctaacgcaatacttcaggcactggcatcccgttgttcccagatgtcgctctactacgtacccggacagggaggacttaagtgatctcgagggctgtcaccacctctacacccacctcaaacgtactatgggatatgcagcaattactggataataattatctaaacaccacctctaagcaactaatatctactttagtgtttataactcaccaaagtaatcacggatgcctccggttggggttcattagactgcgtcatgaaggaagtgttttccagaatgcgatcc

SEQ ID NO: 22816 - DNA, 21242 bp, Oryza sativa
  unsure (1)..(21242): unsure at all n locations
cacaatcttggccacctaaatttttccaacaaccagttatcaggccaaattccttcttcactcatacagtgtgctgttctattgtcccttaacttggaaaacaacaacctaagtgggagtataccagagtcattaagccaactgccggcaattcaacaaattgatctctcggaaaacaatttatccggtgttgttcccaccggaggtatctttggaaaaccaaattctgtaaacctgaaaggaaataaagggttgtgtgcacttacatccatatttgcattgccgatttgccccacctcacctgctaaaaggaagaagaacaatacacgatggctactgatagtgattctcattccaaccgttactgttgctttattctcaattctatgcataatgttcactcttagaaaggaaagtacaacccaacaatcttcaaactacaaagaaacaatgaagagggtatcatatggggacattcttaaagccaccaattggttctccccagtcaataaaatcagctcaagtcacacaggatcagtctacatcggacgattcgagtttgatacagacctagttgccatcaaggtatttcatcttgatgagcaaggtgcacataacagcttctttagagagtgtgaagtactaaaatgcactcgccatcgcaacctggtcaaagcaataaccttgtgctcaacggtggattttgacaataatgaattcaaagctctaatatatgagttcatggcaaatggcaacctggaaatgtttgtacacccaaagctgtaccaaggcagcccaaagagggtgctaacgttaggtcaaaggataagcatagcggcagatattgcttctgctctagattatctccacaaccaattggtacctcctctgatccactgtgacttgaaaccgagtaatattcttttggattatgacatgacctcacgcattggtgattttgggtcagctaagtttctatcatcaaattttactaagccagaaggatttgttggttttggaggaaccattggatatatcccacctggtcagtttttccattccaacaactggttatttgttcagctttacatctatctttttgttgtttttagcatactttcattaatattgtcttacagaatatgggatgggatgcaaaatctcaactgctggtgatgtgtacagttttggggtgcttctacttgaaatgttcacagcgaagcggccaactgacacacaattcggcagcgacctcagccttcataagtatgtggactctgctttcccaaacacaattggtgaggttttagatccccatatgccccgagatgaaaaggtggtacatgatctgtggatgcaaagtttcatcctaccgatgattgaaattggccttctgtgttccaaggaatcaccaaatgataggccaggaatgagggaagtttgtgccaaaattgcatccatcaaacaggaatttgacaaaaccatgtgatacagcgatttgggaaaaatgggagatgcattctatgtacgctcatcaatgttccaaaaaactgtgcactgatcaatgatgtagcttcctgggcatccgcagaaaagcataagccctcattgtacagagaagccaaaaacacttctctaccagcttcttcctggatacctaattctaaaaacatgctaaaccaatgtaaataaagcatagcttttattagactaatagctcctcagaacattgttttttcttgaatatgcaagagagttgcatatcattgcattaatagaagaagaaaggcgtccaaaacacgcctcagaacatagctactttatggttaattgaaaagtgatgaaaacgaacggctgttgtatacgcttaattgagaagaaatccatattcagttgaatatttgagtggtatatacctctcgaatattagttttgctatgggctaattaatgaagagaaatttcttgatatgccttaccacttactttgcttgcccccttgtggaagtgaccttaccttcaatgcctcatctttctttctccttcctcactctgcacgacacctccacattcatggaaaaccatcagttctggcacaggcacaggttgccatcaatgagacatggcgagcacattaccggtcagaggagcgatggcgggaggagcccaaggccatggcgacgacgacgacctggggacagtgttgtcgggggcaagtgggcaacaacctggggcgagggagagatcagatattcagattggccatggcgacgaactcctgggtgctccaggatgctccatcggcgagaaatcgacctggactgcagcgtgcagcaaatggcggctacggcggcgcggttttggccggatccagggaagacgacgtctccgacgagctcttaacttcctttttcacacagacctcagcactgaaacgaacaagactaggagagagatctccgcgggcggatccggcagcggcggcgatgcttttgagaggaggaggtcacccgcggcggtagctcgcggaaggaggttgcgccggcagcagcggcggcgccccacgcggaggtgcacggatccgacggcagcgctcgcgggaggaggtcgcgggcgatggcggcggcgcttgcgggcggactccgacggtaggtggggcgacgcttgccggcgaaactccggcatccggcaacgtcagctcagagcatccccagcagatacggtaaccaatcctccatcccggttttagcgtatagaggccaaaaaacgccctccagcggatacgctaacccacacgccaattttggcggatacgccatagtaggagagagaagcggtaaaaatagcgtatctctctcctcacgccatttcgcccgagcgcctctggatcgagatcccgcccccatccggacatcgtcaaccacctcccctccggcgcgagctcaccgctggcgtgccaccccctccatcaccgtcgtccccagagttccccgtgcccgtattttgccatttttcaacgatttgtggagcgggacttaccagatctggggcgctgtcgccgtgcgcccgccgccttcctcctccgtctccctgcacgtggccgccgcccggcgccccttgcccgtgagccgccgccgcccctcgcttgccgccgtcgccccttgcccgtgagccgccgccggccctagccagccgccgccacccctccgcatctcgcgccaacgccgcccctgagcagccagcggccggcgcccctcaccagccgccgccgccccttgccagccgccgccgcccctcagcttgccgccgtcgcccagcgccgccctgagcatcccgccgccgccgccgcccctcaccatctcccccgtccctctgcctgcggctgtttgaagagaagagctcagagcagagaaagcagataatgagaagatctcatttttgtatacacaatgtaattgatttatacaccacacacttgaatagagaaatataaatatagtatgttgatttttgtgaatttatgtttattgagcagatatatacaataggaattgagtacaaactagatttatattgctatattgcttgcttttatgttcgttttatttaataaaatgtaaggttagttgtaagatattaataaaatataggatgatggtatatggatgatgtagtatggataatctgttggagttggaagggatatggatgaggaatcttttttggatgatactccatatggacatttggaggaccaaatatagatgagctgccggggatgctctcagggccgtcccgtcaaattcgggggccctgttcaaagtttaaggggccatgtgcaaagtttaagtttaaggataaaaacttaattgataaaatactataaaataatttatactccgtaatatattttatagtaatctagaatggtctaaaataataatccaaaattagggattaccggattagaaattatcagaaagaattaggtcaggggcgcagcaggcattaggcggcacgaccgcacgagagaaagaggtgaggcgtcgtttactcctctcgtttgttgcaattggcgattggcgaggtccacagtgggaggcgattaaagattgcgaaccggcgcaactatgcgaaccggcaaaggcgtaatcgaagccgaaacgataagaaaaataacagattctcgagactagttagactacctaattacttattgagttgtatatccagtgttgaagttttgggcctaggggcccctgaaaattgggggtccctgtgcgggtgcgctggccgcacgcccctagggacgcccctgcgtcagcttcgtgtcctctccttcgacggtggccagcaacagtgtgtattgaagagagagagtagcgatgaaaatgtagcggatacagacgacggatattcgcccatagcatatttgttgttatattttctgtcagatattaaaacaaatatgaatagtacggaaacaaatacgaattatcttgaatgcgaataaggatcgaatatgatcggacatgaataaatttttttctcagaacacgaaaatcacctcaactttttatagaaacaaatatcatcatatatataattagcttgttttatatggaatatagtataatttataaaaacatataaatgttcaaataatattaaaatctaaaaagatatatgaaaggtcgtagagttataaaaaaaatggagtgtgtctcatggtctcagcgaatatccgaatatccgtattattatccacatacccatcagaaactctgataccatattcgtattccgggataaaatatcagtatccgtatccaaactatccaagaattatccgctcccaaagatatccatattcgtttttttagagcggacgaaaactatcgcttcgttttcatccctaaaagagagatgaagaatatgtttttttaaaaaaaaaattgaccagtcctcaagtagggagaaaaataccattataccatcgtcataacggggttgcgctataataccattctacaattgggttcgcccgatcgaataccaccttaaaatggaaccaaccctctgtgataccattccacatcgttttcatctaaatcaaaagaatttagtactaccgctggaatctttttcatcatctaaattagtcttagttggctcggaggctagggtgtccggttcccgtcgcgccaatctgggcaccaccctcctctcgcaccgtcgggctgtgccaccctccccttgcaccgccgcgccacacctgggcactcgcctcgcgccgaccaggtcaccgccctcccctctcactatcgcacaacgccgcagccctcccctcgcgccgacccggccgccgcccttcccttgcaccacctggccatggccgtcctctcgcgctgacccggctgctgcccatttcccaagtgcagacaacgaggaggagaccagccacgtcgccttcccttcacgccgccatggcgtgctacggcccttccgtcgcgctgtctaggtcgtcgccctcccctcgcgccaccgagccgcagccgtcctctcgcgccgacccggtcactgcccgttcccctcgtggtagaagacgaggaggagagcagccatgctactacccctctccacatgccggtccgttgccgccctggtactctagctcgctggctagcttcttcgatggtgccacctctcacttcacgctagttgaggtgaagttttgtcatcaaagttgggagaaaatggacaaaattattttgatttactagaaaggaagaaaatggcatttcatcagcgaactcctccatgttaagagtggtattcggatgaatcccaattgtaacatggtattcgagcgaagccccgttttgacgatggtataatggccattttctcttacgtaggagtataccactagcttaacctcaagacctttataagaaccaccacttatatttcggaagaatcttcccatcaggcgtctgatgcctgccaaaaaaaattgtcagtcaaatgttcaagttgacaaacgaatgaaacatcaagttatatatgataaaacaaaaaaaccggcaactgaaatatttaaaaattttgtgaaacatggtgaagatacacattgaaacatgttgtgatcgcatatgaaacaacaagtgttaacaaattgaaatgtatgtttttctttcaacatatcttgttataaagatttaattataacgaatacaacgatgttatcggattatagattggataagtaatttaggagaaaaatcattttgaagctcaataaaatgtatgcatgcatggatgaatgaggtggagagagagagagcagtaacaagtagtttcgggaattttcgaaacacgttgaagacatacattgaaatatatcactatcacatataaagcattgagatttaacggtttgaaacccatgtttttcttttaacataataaaatcaaatgatattttgttgtaaagatttaattgtaacgaatataatgatgtgatcggataaatattttaatagaaaaaatatttaaaaagaggaagaaggaagcagaagaaataactagctgcctactttggatgcatgcgacagggcgtccgatccatcggtagcctgatttacaacattctcgcaatatttctacatattagtgagcatgcccctactagcaaccagtggcaaacctacatataccttcctggatcacaagaccccggatatattactcggacaaacacttgttcaaatttattactataagttgttatattctcggaacaaggaagcaatttttttaatttgtttaatcactgctaacaacaacatatgcttcgttggttagcagagggaccttactatggccctgtattgatgggattaaaagttttgatactaattataaatattaaacgtagactattaataaaacccatccataatcttggactaattcacgagacgaatcttttgagcctaattaatccatgattagcctatgtgatgctacagtaaatattctctaattatggattaattaggcttaaaaaaattgtctcgcgaattagctttcatttatgtaattagtttttgtaagtaatctatatttaatactctaaattagtgtctaaatatatggactaaagttaagtcactggatccaaacaccacctatgacagggtgaggtcatgagatcgattctccatctatgtttacacgcctaaggccctgtttagttcgtgaaaagaaattttttttgtcacatcgaaggtttgatcggatgtcggaaggagttttcagacacgaatgaaaaaactaatttcataactcgcatggaaaccgcaagacaaatcttttgagcctaattaagctgttattaggacatgtgggttactgtagcacttatggctaatcatggactaattaggcttaaaaatttgtctcgcaattttccatgcaaactgtgcaattaatttttgtttttatctatatttaatgttccatgcacatgtgtaaagattcgatgtgatgtttttgggaaaaaaattaggaactaaacctggccttaatgtttaccggtcctaatgcaaattgaacacataggcgtacgtgccaagccattgactaattatagcaagtttaatagtatagccaagtattagcttcaaatcatttatagtcaatttatacaatagttacctataaacatattctacataattaatgtttggtcccacctgtcatacacacatacatcttggaatctatgctacagctggctacaaatttatagtccgttgctcttatctcttttcttttatctccttaaaatatgtttatagttgacttatagggcttgtttgggaagcagttggtggtagctagcttctgagaatctggaaaagttgggttttctagcttttggcttctaggtcattttttggattctgcagctacattttctcagaatctgtactaaaagctacactatttgggaagcttctgatcctgagaaaagctgcagcagctagaagctcccctaaataagctcattgtctactattgtagctgctcttagtcgattgctttgctctcctagcacttcctcacttctagttgtataaaaatttgatgtcaccagtatatgctaatttttgcctattgtatttgctcttatgcccacctaggtaggtcttaagaaccgttgttctcctagcctacggcgcgccatcatcatcatacattgccgtgggttgtttgtgcagtagccactcctatgaacgctccaaaaattagaatcactggcacgctttaattatgctacgttcgtttgatcttaattatatacatgtctaaatcatacacgtataaaatgattttggtcgtttaagtatttaatgtcatgattaacactgccggagaaacccacgtcactcccggttcgcaacctcctttagtcccaggttgcaaaccgaaagggagaatccggtactaaaaatggcgatatttagtcccggttggtaaagatggctgagccacatgatctcaaatgtctttagtcccggtttctatcactaattggaactaaagaggtgatctttagtccctgttggtgttaccaaccaagactaagttcctgatgaggacatcaacaccatcgatacatccacgtccccccatatacagcatgatggtcctattacccgcgctcgtgcacgtcaactaaattatcaggtgagttctttcttgagttcatattcctcgtctttatacctcggagacgcgtgcactcgtgttttactcaggaacgatggagaggatccaaagggaagaggattcgcgcggggtggattcggactgcagggcagcgccaacttctaacggccgccacgacttcatgcgaactccgatttgggcgtgcaagtacttcatggaaagcttatcaagtctactttcaaatggatccagccacatgtccatatctgttctggagcggccgcaattgtcattttactcccgactattttttgtccatggtgctgcgtcacctcttttggcccaatgggctgtgtatccatgttgggcccattaggggcgcgtcctagggttggagcacgaccctatggtcgttcttcccctctttttatacctctagtcgccgccaagaacaggcgggttttgatgatagagatagcttcttgctaccggctcgcagcgcgcgtgttggctaaaccgcccgtctgcctgtaattggaaccccaccatattgtgtttgatagtgaaactttcatctttatctagcaatctcagtgcttgtcctacttgttcttgcttgttcttcgattgcttgcaggacgagtgccctcgtggctaggttgacgcgcaccacaagttcgcggctaccattggagacggtgtatcggttgctaaggtgcagcgtctttagacagttgtagtcgggccgtgaatgtcgacttcatctaatcgagttatcccttacctctcatcgaaagatcgggccacaaaccctagcgggttcgcatcagttccccagccccctgataggggtttgacatgccctgtcaaggggcgaaccgagactaaagatcacttagtcccgtttgagttataaaccaggactaaaaaaacctctttagtcccggttctttatggaaccgggactattgtgcttttcgtccgacccaataaagatcagttctccagtagtgttactaaaaagagtgaagtatccctaaactagtgcgagtgtgtcatgtaggtacctgaactcttaaaatgtttttttttcaaacttgtcgtgatcgatatcatataggtccaaacgaactcaaacccactctatgcgctgacgtggcatgccacggtgacgcctacatgttagtcgggcccacgttttatatcacatagaaaaaaataaaattagaaaaatatgttttcttctctctactttagaattattttttttaattttatattttttcctctctacctaagagggaaaaaatatgttttagttttttttatatatgactaacatgtgggttccactgacaccatggcatgccacgtcagcccatatagcgggttagaaataacgtctaagattagttcataaacccaaagatgcaatttttaaagtttagagatctagataacacacccttacaagtttagagactactaatgtattttactcaagaacaaattaaatctatgtgcgtttgcttatgctttaaacgcatacgagaatcagaattttgaccacgagttatagcatttttcttctagaaactagtatgcctcttgcgggagttgcttattaactgtttgacactactaagatcaaactcatcttttatcctcaaaccacgaatacaacggatgtattaagaaccggtacttattatcggttctaaaagctcgagaccaaaaaaatatctttagtcctagttagtgttaccaaccgctattaaaaatacatccttagttcctgttggtaacaccaaccaagactgaagatcgaggatctttagtccttggtggtgttaccaaccggtgttaaagatacacttttagtaatgcttggtaataccaactggtgctaaagatacttaccaaccagtactaaaaatgcctctagagttagttaaaaagaaaacatatctattcaaatcacatgtgtgtagtaggtgggatggtaacacgcatgagggttgaggtgagagatcttgagttcaaatcccacatattttatgacttagtatatatctttagtaccgattccttcaaccgaatcaagaaattcagtctcagtttcttcgtctcggttgctacaaccggattaaataggagtttagtaaagatcatatctctactagtgtgatgaacccacgaacaatatagaaagaaacatattttagcaacatctcctcctagtataacgatggtccagattaggttagcttttttttttttaaggacggagggagtactattttttttattgcttccttccattcactgggaaagcctagaaacaggctggggttacaccgttctgcgtggaactatagatgcccaaatgggccgtccggcccgacatggcccaggcacaaccaggcctgagccgaggtcgggctgggcctacccaggggctgcatccatggcccaggcatgacaacccatcgtgcttctccatacaataagtatatttttccttcctcatctctctagacattgccttataaggctaggttatgtctattttgggtcccgtaattattttttctttgaccgtgtcgtgccggctaaccgtgccaagacatcggcccaactatcaggccaggccggataggtctaacacccggcacaggtataagaccagtagtgccacgccgtgcttgggcctggccaaatggctgtgccatgggccaggtcgtcgggcctcgggcctcatggcaatcgaacctcgtcgctatttcgatgccgttgtcacaatgtcctggttagtcagtctgttggcttctttggaaggttctgaatgacaaacaaaccgtgttgtcgttcctccaaatttgtaccgttttccctcttcttaacaaaaaattgggtgttctaaaaaaaaattgggcggcaaatttgttcgccggcggccggcccgaagcggcgaaaaaagaaaccgagactgttttcccctctgctggacgacgacgacgatttgatcatgtcgaacttccatgtgatgtcatcaacacgtactcacctggctaccttcggtgatcaccatcacaacagcatccagcactttgccgcgccggaatacccatgaagtcgttgggaggtagccgtcagcacccaccctcactttcggcgaattgtccaggcactcatcaggcatttcagctaacaagctgcatatacaccattatatatcatcctcatctgcttattgtaatctacaagcttattatgcacattcgaattgctagctagctcgtcgaagaaaccaaagtgcgagcgatcggctagctgctgcaagaagccttgaccatggaggccagacaccgtgtgatgtcgctgctgctggtgctggtgatcggctgctgcgcctggggctgccgccctggcgcggcgcaggtgcccgtcccggcgaggacggacgggttcgtgtacggtgggaaggcgccggcgctgggggagacggtggtggtggaggcgtacttcgaccccgtctgcccggacagccgcgacgcgtggccggagctgaagaaggcggtcgagcactacgcctcgcgggtgaccgtcgtcgtgcacctcttcccactaccgtgagtatacctatatgttgatatatactaccgttcactatatgctatatgcaaaattcttgtgggacaaaatctcaaattagtgcgaataatgtttagtatttataaatatcttagtctctaacaacataagttgttagtatcctgaattccttgttcatagtatcaggtactacgtacgatcctaccgaatcaaaacgatactaattatgtctaatatactaattttctctatatccaatcttagtttcatatgatcctaacggatcatacacatgtcgtatcttggtcactatgatcactatttaaaataatatggattgaaaataatgtcaaaattaatgttgtaggatttaatttatacaacatattacaaatgttttatacaaatatgtaatttttaaaatttgataggaaattttttttacgttttatcccaatactaattactagcatcccgtttttgaagcatcaatatatggtagagttgtaattttcagacttaactgaactatgacgtacggtaaatcttttcaaaatcgcgttgtaactatgtgaaatttagctgaaacttcatataggggaggagtgaagcgagtggaagaagagtctgtgcatgaatgtcatccgagacttgaccaagttgtggttatccatgtattaaggacatccgaaaaactaaagttagtcttgctggtttcattatcaagaaagctactcttgtgacttctcctttttgaaacgggccagatggagacacgttaacattcaaacaccacttattgtttcgtttgaaaattaagaactccatagcagtgattgataacaatctgcaactaaacttttacacagaataatcaagctgaactgagctgtagttacctgagtatattatcctaagggtaattttaccatctttagacaaaattacccttaggagaaattatctggaggtatcatgtttttttagtgtaaaactttggcacctctaagtactaggtagtagcctagtaggtgtctcaaggtaccaaattttagtgtaaaatttagttaccttagatattttatcaaggaccataaaaattctcttatcctatccaaacgggctattagtatttcctttcctttttcaaatgcctgagatacagccagagaacagataacactattggaaaattcataataatatgtaaaacagaaacatgggaaactagcaaaatatattgttttgtcaccgccatgtaatggcaaattaattttgtggattaatttccatcgttgagaaaaacggataccattggaaataaattaaatgcccgaatatatgctccctccataaaaaaaaaacttaatcaatatcctaggattaggtttttttttatggagagagtaaggcacaagcaaaggtagcaaaattgtttcctcgccttgtaaatggcagttttttttgacaggccttttgtattttaaatgtgaaattatcccatcttatctttttaaagttacagcgcccaatccatttttattatcaacatgaatagactaattacaatcgaattgctttatgtcagttgccgatctttataattggagattacacaattctaacaatgagaaactcaactcaaagtaaaattgacgataagaaaatcttacaatcaagaacgattgccaaccaaaaagttgcctgcggatgggggaaaaaaataaaagcaacaaaacaagtagcgctttgggcttggtattagtctattcgttcggcccacttcttttctatttgcacaccgcactcaacaaattgtattggctcctctagaaaacctaattatttaggcaaaagaaacagagagataaagaattggttctgctttttcctagcacaaagcgcctttaatcttttgtaaggaatatattatataggaatatatatgttatgaagaatcattcggcggcaaacttatgaagccacaatttggtttcatttttattttagataaacaaaatttcatctggaaatatcccgtcaagtaacatgtaataatctaaacgtttcagccattaaactaggctttgttctacacctatattcaattttgaactcacagaagtacaatttactgaagtgatacgctattatattattcaacgaatgtggaccactatatctagacatgataataattctaaatgaaattccaattttcatcttttacgagaaagaaaaaatgtttagtgcaccctgcaccaggcattttgtccctcgttttactacgcatcaagtttaatcaatatttttattttacaccactcttgacgcactgtgttgtttgacaatagctatttaattaggccatgtctgctaccatttgtatgtattttcagcttgaataacagttaatcgttgagtagcatagcatgcccaagacacattgccatggtaaattcatcacaagtcattatttcgtaattattttctggttcgttttgctctttgcaatgtgcagttatcacagcaatgccttcatttcctgccggtcaattcatgccgtgaacaagataaatccgtcgtttgtgtatcccctgctcgagagattcttcaagtaccaggttatgtcctctccattcatcattccgatagtgtcattacggatttacataatgccgagagattgaacagttaaatgtcagaaagaaagacatttaaacagttaagttgagatattaaaataggtaaggtaacataaatatttatgtggagaatagatcaataccagactcgatagcagtttggttacagtcccggccgatattaatttcctatccagccacaattaaacttccacaagatagtaattttggtaactattatcttaaaactacaggagaagtaatatttccaagacggttgtgatagttatcagagctaatcttggtccgatcaattccattttatatctgttttttttttcttgttaacagcagaattttttttgaatgtttaattagtttattacgtagaaaaaccgccaaatgatcgatcagacagcatgattactgaatatcacaacaaaatataatcgtggacttcttgtctccttgcaaactatagcatgcttaacttggtgacccacaatctcacaagagatcaattggaaaagaaatatgtccgcactcttccttttgtaattttacatttaagttatctcaaaatagaatattgatttcctcatagttttcttttatttcggaagtcactacttccaattaacgtcagattattattgatcaggagggttattacaaccagccaacgtatgggaaaacaagagctacagtggatgcagaggtagctaaaaaccttgttgcccccgtcattggggaagccaatttggcagcatacaaagcaggtttcaatgattcaaaatcagatcaagccacacgaatttctttcaaggttagaatccatgtgctcccagagaaaactaatttcattcaatcagattgttcatatatactccctccatctctaaatatttgacgccgttgattttttttttaaaatgtttgaccgttcattttattcaaaaaatttaagcaattattaattcttttcctaccatttgattcattgttaaatatacttttatatatacatgtagttttatatatttcacaaaagtttttgaataagacgaacggacaaacatgttaaaaaaagtcgacggcgtcaaacatttagggaaggagggagtattatttatcctggtttaattatgtaccttttccattttatcttcttgttagtatggttgcgcacgaggtgttacgggaacaccgtacttctttgtgaatggcatcccccttattagtgactctggttccccactggaatacaacaagtggaaatcaatccttgatccattggttggcaagatgtagagagtgtttcaactaaagtcctctgcctggtgttaaatacaagactcaagacaaataagcttggcgcaaaaacagtatgatttcgccaagatatagatggaacgatattgatcacaaagatcaagtttagttaggcaaataaaagggcaaccctactctaatgacatatattgtctttaccttgtattatgagacagaaaagaatttctataatacaaaagagatgtagctctcacatacaatggtatcccagtgtgctaccaacaagacttgtatgaaatatagtatgcattttaagatttcggatgttatgccaaactacattgataaggaagcagtgttacattccttggttttcattatccatatatcttttagccaaaaaaagtaattatcagaacaacacaaagaatataatctgaggtgagcccacgccagtacagaaatgggccagtagggaaattggcaccgatatgggcaaagctgcaaaactggcagtattctgattttttgttttacaggcaccaaaaaagctctaagtatattctgaagggctatccctgctcgctcttaatgagaaggggctagttacaaacccatttatatacttgtgatagccaaagacaaaacgtactatagggcaagccaaagacaaaacaagagagtttgggaagaaggtagtcctgtctgacatgaaaacgcactattagttatctacttcctccgccctaaaatatcgctaggatgggatttgaaatgggcggaggtagtaattcataagcctttctagaatttaccttcaaatccgtgtgtctttcaaaattttccactaaagatacgaattgttttattccgtaccattccatcaggttgatagggccaaccgtcatccatctactaccaccgtcatcctagctgccaattccaccatagctgtggacaagccaatgggccgactagctcctggtgttaggaggatgaggttgtcgccgtcatcttcaagcccaacattaagtggctgacctccgtctccgtgtacgccgatccctttctatcgccttcaactagttcaaggtcgaaatctcctcccctctcaagtgctttgtcagactcccgcacggtgctgtgcagccactttcctccacatcgatccctccgcatcatgctcctgcagcagcatgctctcctgtctcccacactcccacaagcgaccacttcctcatgctctcctccttctctgttgtgcacctctactccgcatggcactagacgtcggggatggtaggacttcgcaacagccacacctcctgccattctagagcttgagcaggtggtcctcgacggtgcaaagctctaggtgatactgcacgccacggttccaaggggaagactgctctgcacatggcagccacagtggggaaggtataggtttggggggggggggcactggtcgatgcagatgggtgacaatgccacgactaatgattcagtaggaccactcatcccctctcaacgccacatgtgtcatgacgagtgtcctgagccatgtcatggagctgactataagatcaatgtgtgttttgattcttattctgtgatgaacaattggcatctgtgattattggttttgatatttggagattactatcgaagtggtttttggatatagctgttttgtcggttttgttgggactggtcagaccgggcggttgttgccggtcagaccggctcatgtgtagcggtcagaccggccggcccgcggtctgactagccgacgctgtgtcgatttcggttttgggttgtttctttggatatccgtgattgtttcatggttatggcttctagatggatgctatacgtatgtaatactattgtttgctaacaatgagtcaagttggggatagcttggtctcggaatatggtttctttgtttgtttcatatgtaggtgactcgatgcctcgggagagtatttgcagtgatggaccgggagtcggcttggtggtaagacgatgtctgtggtggtcagatatcatgcgggatactaaggctagagttgatgcacgtggttggtgaagattccatatggcatatgatggaggtattgtgtgcgtatgggatgcggagtcgaatttgaaaggagtccaaattaggtatgattggttatgtaaagtttatgtcttgtactagagggtttcctaaggtgtttaggactcttagtatagtntggttcgggcttaaggctgcctacctcatgtataaatagagggggagcgtgaggcttcccggtatcgcttttgtatcgcttttgagagcaattgagttgctagtttagttagggtttcgagtttagtcgagatttttgtaaggagtgctgttggtgcactttgtaaacacagagagaagcaataaagttgtcatctacttttagagatcttcgatttgtgtttcaccgggtttcggcggtctaaccagcaactcaccggcggtcagaccggcggcaaggcggcggtcagaccggcgggagcacggcggtcaaaccggtggctgcaacaggcgcggcaggcgacatcggcggtcagaccgggtgatctatactggtcagtccgggggcatccactcggtcagaccggcagatcaatctcggtcagaccgacttccgtcgaattcgagggtaacttttatttccactaaaagttttcggtttttggatataccaaccattcacccccccttctggttggcttagttcttgtgattcaatcctacaagtggtattagagtcttgttttcttctttggattttaatcgatctagagtttttgccatggctactcccactaggttttcaactaagcctcatgttttcgatggaacggatttttctcattggtgtagtaggatgcaatcttatattatggctgaagattatgatatttggagaaaagtttctcatccttatgtgattcctgaagctattaatactgatgctgaaaaaactgcttttgaataaaattgcaaagctcgcaatattcttttgagtggtatttctcgttcagattatgatcgtgttgctcatcttcaaactgctcatgagatttggactgctttgagtaattttcatcaaggaacaaataatattaaagaacttcgtcgtgatctttttcaaaaaggagtatattaaatttgagatgaaacctggagaagctttggatgactatctttctcggtttaataaaattttgagtgatcttagatctgttgattcttcttacgatgctaattatccacaatctgagatttctcgtcactttttgaatggtcttgacatgtctatttgggagatgaaagttacatctattcaggagtctgttaacatgtctactttgactttggattcgctttacacaaaatagaaaactcatgagatgaatattcttgctcgtaaagttgattctaagtcaagtgctttggtttcttcctcgacttctttggatgttggtggttcttcatcgaagtcttctgttcttgctttatttaatgccatgtccgatgaacaacttgaacaattataggaggaggacttggttttgttatctaacaaattttctcgacctatgaaaaatgttaggaataggaaaagaggtgaaccaaatcgttgttttgagtgtggtgcacttgatcatcttcgctcgcattgtcctaagcttgggagaggcaagaaagaagatgatggtagagtcaaagatgatgaattgaacaagaagaagaacatgaaggagaaggagaagaagaagcattgcatgcagtggttaatccaagaactcataaaagtttttgatgaaccggaatatgaagatgagggcaaaggtaagcaagttgttgatttagcttttattgctcgtaatgcaagttctgatgttgatgaatctgatgatgataatgaagaaaagcttagttatgatcaattagaatatgctgcttacatatttgctaggaaacttcaaacatgttctattgagcttgatgagaaggatcatactactgagattcttaatgctgaaattgctagattaaattctttgattcctaatgatgataattgtcaatcttgtgaagttttattttctgaaattaatgctttgcgagatgtcaattctcttaattgcaaaaaattggaatttgagattgaaaaatctaaaaagttggaatcttcttttgctcttggatttgctttacatgcttgtgttgttgatgagttgattttgacaaagaacattttgaaaaaaatacaaagttgctttttgtgcaagttctttggtcaatgcttcatgtgcaaataaggcaaaacaaaataatggtgttttgatttctcaagattgttcaaagtgtgttttgaatgagttaaagttgaaagatgctttagagcatgttaaacacatggaagtaattgttaaacaagatgaggtgttttcttgctcaacttgtagaaaacaaaaatgtcttttggatgcttgcaaaaattgtgctattcttactcaggaggtttcttatttgaaaagttctttgcaaagattttctgatggtaaaaagaacctcaacatgattcttgatcaatctaaggttagcatacataatcgtggtttaggttttgattcttatgcttatcatgctagacatcctcctaatgttttgggtgttgctaggagaggtgaaattttgattgaaactgagcctaagaacactgtgtttaaatctgctggcatcatgtcttctttgaatgcatcttcttcaaaatcaaatgttgtgaatgcaaaaccttctgttgctgcaaaaccatcaatttcaaaaccatctacttcacaagtttgtcgtgagaagtacacttgttctttttgtggaaaagatggacatttggttggtttttgttttaga

SEQ ID NO: 22817 - DNA, 18790 bp, Oryza sativa
tttttttggatttttgggagaagcaaggtgaatttttggagaagagaagagtttttgagaagagcatgtttttggttcaactgggaatttctttcttttaaaaagagggagaagttttcttttggatttttgagcacgatgtgtacgtttgtacgaagtgtgctttttaccgcttttgtttttatttttccaaacacgaaaacatttttaatgggtttgccaatgtgttcatcaagggggagattgtaagattaacgtgtgttttgattcttattctgtgatgaacaattggcatctgtgattattggttttgatatttggagattactgtcgaagtggttttttgatataactgttttgtcagttttgttgggaccggtcaaaccgggcggttgttgccggtcagaccggctcatgtgtagcggtcagatcggccggcccgcggtctgaccggccgacgctgtgtcggtttcggtttcgggttgtttctttggatatccgtgattttttcatggttatggcttctagatggatgctatacgtatgtaatactgttgtttgctaacaatgagtcaagttggggatagcttggtctcggaatatggtttctttgtttctttcatgtgtaggtgactcgatgcctcgggagagtatttacggtgatggaccgggagtcggcttggtggtaagatgatgtccgtggtggtcagatatcatgcgggatactaaggctagaattgatgcacgtggttggtgaagattccatatggcttacgatggaggtattgtgtgcgtatgggatgcggagtcgaatttggaaggagtccaaattaggtatgattggttatgtaaagtttatgtcttatactagagggtttcctaaggtgtttaggactcttagtatgagtttggttcgtggctttaggctgcctacctcatgtataagtagagggggagcgtgaggcttcccggtatcgcttttgtatcgcttttgagagcaattgagttgctagtttagttagggtttcgagtttagtcgatatttttgtaaggagtattgttggtgcactttgtaaacacagagagaagcaataaagtcgtcatctactttgagagatcttcgatttgtgttttaccgggtttcagcggtctaaccggcaactcaccggcggtctgaccggcggcaaggcggcggtcagaccggcagcggcaacaggcgcggcaagcgacatcggcagtcagaccgggtgatctatactggtcagaccggcggcatccactcggtcaaaccgatttccgtcgaattcgagggtaacttttatttccgctaaaagttttcggtttttgggtgtaccaaccattcacccccccttctggttggcttagttcttgtgattcgatcatacactgaccaggtccatcaccaacgtcgtggcggtagcaccatagtcaccgatgccgttgcctaacatgggacgaaaccacccatttcattctccacatcatgacacaggtgtgagtcagtggatcaatcggtatccatggtgcagtggcaatggtgctgagtggcgccaacggtggtggttcttggtgacgcgttgcaatgtggtgactgtagatggatgttgaacgtgtggcctggtcaaatggatagagtggcacacaacaaaacaatttgcatcccttatgagcattgacaatcaaactttcatggccaagttaaggataacataaaatcatttagacatgtgaaaagacaatggagttataacattggattacatcaaaacagttggaaatccggcaaatccctttagtaagagactataaaataatacgagtgatactgcatcgaaggaggtgagttatactatggtggtaacacaaccaatatgatgagagatcccatggattaggacctgagaagtacaagccaatattcaattagagaacaatatcttcgttaaaccttattaagtgaagatgcagatgtttcggttacacgtcctgatatctccgtaggttacgtgcaactcattggttttggttacgcattatggagatcatggaggcatcatgatcacttgtcctaatatcactataaatactgagtcgttgaatccacgcaacgcgcgtgaaaataatctagggtttcccttcttctctgtacaacatcgtgacacgtagtctactccatcccacctagcaggttatggtcttcgtcatcattgatgaataagatttttgggaagcgctttgcgcaattgctcactatttgtctgcgatgacacgtcttcctctatgttcaagtgatgcacgttgtcatcatcatctggtacttcacgatgtatgtgcactaagtgttgcatgtaccccatccaataaaaaatagtgggtacgtttcaactatattttgtatatttgacctattcatgtttagtgatgttgtatatatgttttgatcatatccgtgcgagatgatcacgttagtttatttgttcaatgtcatgatttatttataagataaattaaacaccaacatatgtgcttatattttcaacatgagaagctatcatggcggccgttgggtgcagcacacatgacaagtagcacgacgggaagtgatagcagtagcgtgttggagaaatgggaactaggatacccctttctccaggtcttagggtaacatttgccatgtcatcacattctacggaagcagaatacaatactagcagaatacaatactagcacaaaaatcaagcagaatacaagaccgagcgagtcaaccaaatattggaggatatgttgagagccagtgcgcttgactttggtggagcatgggaaaaaagcttgccgtatgccgagttctcctacaacaacagttaccaggctagtctgcaaatggcaccgtttgaagcactgtatggacggaggtgttgcactccgctcttctaggatcagacaggggaacgccagttgtttggtacagaagttttaaatgaggcagaagagaaagtcagagctgtcagggaaagattgagaatcgcgcaatctcgacagaaaagctatgcagacaaccgccgaagggagctcgttttcgaagcaggggattatgtgtatctccgtgtcattccgctcagaggagtacacctcttccaaaccaaaggaaagttggcaccacgctttgtgggaccatatcggattttggaacgtagaagtgaagttgcttaccagcttgagcttccctccagcatgcttggcatccataatgtgtttcatgtctctcattgaagaaatgtttgagagttccagaggaacaggcaagtccggatcaaatcgaaatccaagaagacttgacgtatgtggagaagccgactcgtatcctcgaaacaagcgaaaggagaactaggaacaaggtaatcagattctgcaaagttcagtggagccaccactcagaggaagaagccacttaggaaagagaagatgagttgaaggccgcccatccgcacctcttcactagctcttccgaatctcggggtcgagattccatttaaggggggtaggtttgtcacgccttgaagtttccctccctttttcttgctttaaaaatttgttgaataaatcgttcgaagaaatggttcaaattaacctagagctaatttcttaattaatgaatgcaattaataattggaaatggcattgtggaatttctcttgggttccacatgtcataatacattaacaggaattttagtggaattttcagagccttaaaagtaattttaaccaattaaaatcatcaaagtgcaattttaatacccggaaaaataatttttctttttctcttcctcctttttctcttgatgggccgtcgacccatctctctcccgcgcccctccctcttgctgggccggcccaagccgcctcctctcctcccttggggcgccgacaggtggggcccacctatcgatcttcttcctactccaactggccggcaaccgtcgtagaaccgcccacgccgtcgcctttcccgcctctcccacgcccactccgccccgcgcccacgtcaccgcccacctcctccacctctcccgcacgcgtgcgcactcgcttggaggcgggattcgatttgaatcccacccctctctctctctccctccactcccccacgtcgccggcgcaataggggccctcctcagccacgtctgcccttcccgtgcccataaaatccttcccccgagccccctctctcgtttacctcactcgctgcgctcccccgtgcctcctaccgccgccgcaccgcgctcgccaagcttcgccgccgttgccgctctccggccgtgcatcgccgccgctgccgcgccgtgaaaccgccgctgtcacgctcgccagtgccgtccgcacctcggccgccgctcgcttaccgtgcgccgtcgccgtaccgctctccccacacaccgctgcctactgccaccttcattcgccgctagccgccgctagtcctaccgtcacgccactccgtcgccaccatcagcctcgcgaggtcgaggactgcctcgtctgtcacaccctgattttcgttacaggatttataaattatttaataaattattatcagaatttatattaaatgttcattaatttactagtgaagttaaatgtgggaaataaaaatataaagcatggatgtatttaatttttattaaattcttcatggttaattatactctctagaactttctcggatttttcggagctcaattcctaattttaatcatacaaagagaagttcagcaattatttaaatattaaattaatcattaaatggtctgattgtaattttgttaagtactttgagtgtccaagtattttcaggatttttcttgaaattatttgagcataggaagtatttttaacaattcaaagatcatttcattgattaatttaattggaaaagtaataataatcctcctcctcagcttgggccgaatccagcccattccctcctttccctctcccttcctctcagcccggcctaaagtctgtttgacctccctggcactacagtactccatcttcctcctccagacagagccgagccagccgtgctcgtgcacagtgccgccgcctccgccgtcgccgtcgcttgccgtcgccgccgttggtttcgccaagaggtggagaagctcggccgccacctctccttcgccgccggccgccgtagcccgtccccaccggccaacccgagccgccgccgtcgcctcctcgtcgccggccgtcgtcggtcgtcgtttggcacgagggtgagtatcgttgggttcgtctcgtcgtcctctacgtgtacatgtcctccaaaatcccggccgatcaccctagctccggcgaggtcgctatccgagccggccgccattgatgacgtcatcatgacatcaacatcttccccttttccagttatttctaatagattaaatcttcggaaaatcataactaaataaccgtagatccgtttcaggtggttcaagttgctaaatttttctaaaatcaagatctacatgttaaaaatatccacatgtactgtttatgcttgtttttgtactgttttgttgaattttgttctttcgctttagtttccgacgttccggaggagagcgttttcgttgaggaaggttcggaagtgtttgcggaagctcaaggcaagtcacacagatcccaaataaccctttgagcatgttgaacccgtttaaagctattattttatttcaactatgcattattttcgaatgtcattgggtggtgaacctttccccgttaattaatggcctaagatgactttattttcctatgggttataatttgattagcatgaaccttatatattggattggttcagctaaatgctatatgtatgtgtgcttagccatgcttagaaacattagctaactaaaggggttaattataaactatattatattatattattattatggttatatttaatggtcgctcacgatggttaatcgtgtgatgttaattaattgataaataaaatctggttaaggtgggttgtgagcatatggttttgatggttgtgctcatgacaattaaggaccggttcgcgagctactgttgtgagacatttaccgtaccaaccacaagccagcatgggcaacggctttaccttttgtatagcatgattcattgcggggtgccagactgtgaagcggcgagaagtccgtgggggtcgctggggagtccattgcctttggttttgagggggagattataatccaggaacggtgcactgttttgagttgtgttgtgcaaagggtactgtcacgatttccccctttgcaatgccgtggtggtatttcggggcatggcaacatgtgtggaatcgtgtcttgtgggtacagtggtacacctctggccagagtaaaactattcgaatagccgtgcccgcggttatgggcgagttgagcaatgtttttcgtgattagtctcacactactcatcaatgttaataatgtgataattaatttgactcctggtttggaatggataattcctggtttggaggtttgatctgtacgaccggggttggttgctcaggtttggttgggcctgagcagcatgggtgtgctgttcagtgttgattaaaattgatgattaattactctactgttttacttatcttaaatctttgctaaacgctgcttttgcaaatgagcctatattatgccatcctttggaatccttgtgcacttgcatatttgctgtgtggcttgttgagtatgtcatatgctcattcttgcaataatcatcaaacctcagttgaagataaaggatccagaaggagaagacgtttggcttataccccagttgagctgcctgtgggagtggagctgaagccatcgctagatcgttattccgctgctgttttcttttcttttgtaagtatgtaacgttattattaagatggatttgtatattaaattgtcagtttgtgtacctcggctgattcctggacgaggattttatgcacaaattagttcggaaattactagtgaatttccgggcgtgacatcgtccatcccgcgcaccccgccgtttgctgctagctgccaccgtctccccccacgtcggccaacccacggtaagaaccccctccccctgtcacatcctgatttttgtttcaggatttataaattatttaataaattattattagaatttatattaaatgttcattaatttacaagtgaagttaaatgtgggaaataaaatttcctaaatataaagcatggatggatttaattttcattaaattctccatgattaagtctactctctgaaattttctcggatttttcggagctcaattcctaaatgatacaaagaacagttcagtaattatttgatcattaatgatctaattataattgttaagagcttttcttgtttaaaaatccttaaattataaattgttgtttaaaaggagtaattagaaatgatcttaaaagcctaaaagagaagatctaattttaatttgctaaatctcaatataaaattgggctagataaaattttgataaatacttctcttgaatctttagttcctagatttttctgggatttatttgagccaaggaagtatttttaatcaatggaatatcatttcatgaataatttaaatagaaaaaggttttaaaatctttcttttggttttgggccgaaagtcagcccaagtctctctttccttctccctctctcctccccggcccagtcggcccagtccgcgagccgccgctctcctctctctctctagtcccacctgtcagtcttcgtcttcctcgcgccgccgccgctttccaatccggtcgatcctttccgtttccggtgaaatcgttagaggggaaatgatcttctcgatctcctccaccttttctcttttggaatcatcgtctttttcgctttggaagttcgtggattcgaggtcgaatcggatcggtctctttcctccgaaccctaacctttccttctcgtcgccggtcaccgtgggcctccgtcgccgcacgctagcccctttaaaaggacccccgagctctcctctatccgccgccacctttgccttagcccgccgtcgcgtctagcgccgcctccgcgtagccctagccgtcgccgtcgttgccgtcggttcagccgcgccgcgccgccgttgcagccgccgtcgtcggtcgccgtcgccaccatcgggatcgcgaggtcgtcgccgtccccgtccaccgcttcgccgccgccgaagaccgccggagcaccgccgtcaccgtcgacccgaagaccgtcgccgcctcttcctcatcgccggcgccgtccgttgctcttccgccgttgttttggtcaccggtgagttcgccgcgtcgccctctacccgttggtgtcctccgtttgcgtcgtcgcgctgtcgttcgccggcgagcatgcgttcccgagccgccgccggtgatgacgtcatcgccgacgtcatcgttgccatccgtcgtagaccggtcgtggaccgttcgatctcggccgtccgttttggataggatcgatctcggccgttcgtttccttagaccgtcccgtgcacccggaccgcctttgatgacgcaataatcctccttttccttttcaaaaataattcattattgcgtcataattcaattaaaatctatataaatgctttaatctgatttaatctttgaaaattcataactaattcattgtaactcagtttaatgtggttgaagttgcaaaaattatacaaaataaagatctacatattaaaattatccataaattgaattaaatttatttaattctttttaaatgggctttaattagatttaatcttgtaaaattcataataaattcatatgaagtcagaatgaggccattcaagtctcataattcatctaaaattatgatctacatgtttgtttactttttatgtactgtttatttggtttttattagtctttttcttcgttttgcgtgttagcttgtcgtttccgtcgttgcgaaggttcgcgagtgcgccgaaagtattcaagaagattaattgaagaccgattattgcaaggcaagtcacacagatcctaaacacaatcctttgagcatgttgatcctatatttaaattctctatttatttcaactgtgcatttattttcgaatgtcactgggtggtgtgaatctattcctttgttatggcctgtttgcattgattactttattccttgataccttgggttattataacttgactagttgagctttatatattggttcagctagatattagatatgattgcttagccatgcttagaaacattagcacattattgggataacttatgattcactattacttaatgatgatttaatgatagttcacgatggtcaatcgtgattggtaaattaattacttgccaactaaaacttgataatggtgggttgtgagcacatggttttgagagtcgtgctcatgacaattaaggaccgattcgcgagctactgttgtgaaacattaaccatgccaaccacaagccagcgtgggcaacggctttaccttttgtatagcatggttcattgcggagcactagactgagaagtggcggagataagcccacgggggtcgctggggagtccatgccttgttttataagggggtgattatgatccaggaatggtgcactgtggtgagttgtgttgtgcagagggtattgtcacagcctctattcgggtactttccagtatcgcgacgcatggtagacatgatgttgaggctgtgtcttgtgggtacagtggtacacctctggccagagtaaaactattcgaatagccgtgcccgcggttatgggcgggttgagcaatgtttttcatgattagtctcacacctctcacaataattatggatgttatacctggtaataatttgcttagctcctggtttggagttagatctgtacagccgggtatggttgttcaagatggttgggcctgtgcagcatgggtgtgttgttcagtgctgattaaaatttctgattaattactccactgttttacttctcttaaatgttttgctaaatgctgcttttgcaaatgagcctatattatgccatcctttggtatccttgtgcacttgcatatttgctgtgtggcttgttgagtatgtcatatgctcattcttgcaataatcaatcaacctcagttgaagaaaaggatccagaaggagaagacgtttggcttataccccagttgagctgcctgtgggagtggagccggagcttcgctagattttattttccgctgcagttttcttcatggtgaggacgaagtgcctcttaagtaagtatttatcgttttagttaatttgatgaatctgtatattaaattgtcagtttgtgtacctcggctgattcctggacgaggattttatgcacaaataagttcggaaattactagtgaattttcgggcgtgacatcccctcctttcttctcccgtgtgtgccgctgccttggccacgccgccgcttcagccgtgcgccgccgccttcgcaccgaccgctgctgtcttccacgccaccggtcgtcgccggtggccgcgcgctgccaccaccccgctatggccggccggctttgaagccgagccgagcccggcgactgcctccccgcgccgtccgattggctttggcccgatctggaccgtcggtccgtggaccggcggtggaccacccgcgtggtcccggttgacggtggaccagcgccctttgagccgctgccaagtggggcccgcttgccggcgccgctccccttgggtgacgtcatccctgggtttattgcgcaataaaattgattaaggatttttacttattagtaaaaacatagtttatcttctaaaattcataagtaattcatccgagctccgtttaagtccattcaagtctcagtaaatcaagaaaaatgcaaataatccattaaaaatggtttttttttcctgttttagtagtcttatagcatgttttgcttgtgtgctttgtttgtcgcataggtttcggtcgtttcgtcgatccacggttccttgaagacgttgttgtggtctcatctgtgcgagagcaaggcaagtcatgcattacatttaatcatattgtacccaatttacaaatatcccgcatttgtattaaatgttgcatcgttttacaatgtcatgtgagatgggtcctattactcagccatttattgtttaccttatgccattgataacttgggtatcaaaatgactagatgttggtttaggaaaatgcttagccatgcctagttcaactagtacacaaatggggatcatattattacatagactttgactattagcatagctttggattggtgccaccgcaatggtgttagttaattaaaatacactgaatggtgggctgtgtgtgcatggttttgctggtcgcacccatggcaattaaggaccggttcacgggaaaccctgggagacttaccgtgcttaccacaagcgggagtgggtaactgcttgatctgaagtatagctcgaccctttcctaggcaccggtggcgagggtgggcgtgatggagttgggtcggccgggttgtccggttgtccagctgccggattcaccacggcgcacgaggggactgcccactgccttttgaggggtgggggtgaaactttagcgtggtgtggatggttagaggagggttatgcgaagggtcttgtcacgatttccccctttgcagtatcatggtgatacttcggtgcatggcgacatgtgtggaatagtgtcttgtgggtacagttgtatacctctggctagagtaaaactattcgaatagctgtgcccgtggttatgggcaatcaaccaaattcactatgattagtctcatccctagtttagcttaatgaactggtgtagttcaggtggttagttgggcctgttgcaatgtggtgtagcgttggacagtgattcgttaatcttgcttaatctattgcaactgttttactgctttcaactactgtttttaaatgcctgctttattgtaaatgaaccttttagcctcctttggttatatcctgcatcatacctcatcttccggtatgacttgctgagtacagtgggtagtactcagtcttgctctcttttcccccacaccagagcggaagttcttcccagttggagctgtctcagaaaggttggtttcgtcgctgccgtcaaggatgtctgtggagtagagtcgctccgctacagaagtcaagtttccaagtttagctcgttttatcttttccgctgcatttgtaatcttttctatttttgtaagacgtggatctgtatgtcaacaattgtcgtttgtgtaccctctcactaacaagagcttagtaaccatgaagtacactggcagaggggttagagagcacattttgaagatgagtggcatcgcttcaaagctcaaaaagatggacttggttctccgtgatgagttccttgttcaccttaaaattgcctccttgccttcagtttttgaggtttttctgttgtgaactacaacacactgcccgaaaactgggactttgagaagctcattgccaagtggtgcaagaaggggcactatcagaaggattgccctgaattcctaaggcatctcctaaagatagggattctgtacgaggaggactcttcaaagagtagaaagacgcaatagtaatgtgaatgttgtatgcaatgaagtgaatgttgcgtgcaatagtgtgtcttcctcgtgtaacaatgtaagaagtgagcgcaaacgatgcaatgaggaaatctcagcgaaattgtggcactgtcgtttgggccacatttcgagggggagaattgaacgattgattaaagaagtaattttgcatccgttagattttgcggatacaaaatattgcatcgattgcaataaagaaaagtatgttaaacaaataaagaaacgagccatacgaagtttaggaaaattggatagttatgattcatttataacattcacggatgattatttgtgttatggctgatgtagaaagtcagaatgatctaaagattaaagtagtaaagtctgaccgtggaggagagtactacggtcggcataccccttatggccaaatacctagaccttttacaaggtttctacagggaaaatggcatagtagcccagtactcaataccgggcgagcctcagcagaacggagtagcaaaaagacgcaaccgcactctaatggatatggtgcgaagtgtgctaagccactccactttaccgataagtctatggatggaggcattaaaaaccgctgcccatattcttaatcgagtaccaagtaagtcggtgtccaaaacaccgtatgagctatggacaggaaagaaacccacgctaaattacgtacaggtgtggggctgtccagctgaggcaaagttatttaacccaaatattgggaagctagatcccaagacagtcagttgccatttcattagctaccctgagtaaaggggagcatggtatcccgagaaattagtcttgaagagaagcgggtatgtgcacctactccgatgattcaagaaccttctttctcgatacctgttgctgctgcaccgacaacacagaacgttgcgatgcaagcacctgttgttagttctcctgtgacaacaacgaatgagcaagaggaacctaagattcaggatcctacacaacaagttgtcacacaaaaggaagagcaacatcagccccaagtagaagatgtaccacaactcagaagatctcaacgagaaagaaagacagttattcctagtgactatcaagtctatgctagtgaagaagttcaaacagagggtgatcccacatcgtttgaagaagccatgagaagtgatcgttcatcgaagtggcttgaagccatggaagatgaaatgagataaatgagtgccaataaagtttgggacttagaagaaattcctaaaggagccaaaacagtaggctgcaaatgggtctacaaaacaaaatgtgactccaaagggaatgtagaaagagataaagcacgacttgtggcaaaagggtttactcaaagagaggcaaaggaacttgtatggaagagggtgtttgtaccatagtttgcaataggtagtttattgagtagaccagattatttagattagtctttatgtttgagagtggtttgcttgagagttgattattttagccttgcagtcaaggaggtggcatgcaggggcattggatggagttcagtgcagaaccagcgtcggcagcaggtcattttcatgaggccaaacgcatacgcagtacaaggatatatggtggtcattctacttctacatggccatacattggcccatgcatgatcgtgcaagaggtttcgaatagcttggtttgcaatgcattcgtggtgaggaggctgagcccagttgcacttgtagacgaacagaggtttaaaataagatatgatcatttgatcgatttgtttctgtattcggtcggataaggaaaccatgagtagtttggatttgtatacataccactaccggagaaaccacctttgctgggttggccaaaaaccacattagtcctggatccaatatattcccttaggacacgggacaaaacatcattttttgtcctggttgaaaagcacaacgccaacaaaacatcattttttgtcctggttgaaaagcacaacgccacttttatgaagatcatttttagtttcggtttaaaaagcatccggtcccttactacctttcgtccatgttggtattaccaaccgggactaaaattcaacgcgtcgtatataatcccttgcacttatcctctcctcctagatcccaatctcttcctcctcatcttttaacttcctcctctgtcctctctccctttcctatctcttatcctctcgttttctttttctcgctgctctctcttatcctctcctttttctttttcttgcagcagccagcagagagcggcagcggcctgcgcgtggcgagcggcagcggcagcccacatggtgggaggtggcagcttggcgcgggagcaagcagcggcgaagaaagtttatttagttgttgatttatctgtgaatttgttgatttgtgatgtttttggatctgtaaatttgtgatgtgaattgtgaatgttgatgtggatgattttgtgatgcttatgtgaatattgatgattttattgttgagtttggttagaaaacaatatgcagacaacaaaaaaacaatgaaaataaaagaaaaaactttagtcccggttggtgttaccgaccaggactaaagatgggcatctttagtcccagattaggggtcccggttgcatacccgggatgaaagggggttgcgaaccggaagtattgatgcattccccagcagtgtgcatacgctagtcggatacgtctgctccaccgagactgccggtatatacacggatagatggccgtctaagccccgaacaaattatcaatatactattttctcattcttttacttttatgtgttttctattttgttttcatggctgagtcctagcaaccataaaatttccttaataaagcaaggaagttatcctttgctaatttggttggaaactagtcattcgttgtcacgtaaatacgatatttatcttttttgctaatttgttcaaaattagtcatttgattccacaaaagtgaactaatctcgaaattggcaccgctagccaattttgatctaacgattttggcgactccattgattataccataaaccgttaagtgattttgtgttggccacgaaaaaccatcagcagaggtgcatatctggcaacagtcagaacacatagccaattttctgaatcattcaatttagatattgtagtttattcatctggcaacagtcagaacacatagatgcatttctggtcccaatgaaatcgaagaaaatgaactgcaaccaattatcacccttatatatgcctcaaacacagttccgctgataagacaaattacaaatcttctgtaattattaattaagcacatggaatgagctgcacatcacaccattttgtgttaacgagatagctaactcagtacttcaattcagcccaatttgtggaagtggagggctattcgcacaaaagttgcagtaataaagcccatcagtactgaagcactcgcctttgctttggtacttatctgagcatatcgctttgcaggttgcatcaacgcatggttttggtacttctgtgattggtgcagcatgacactcttcagtagctgaaaccttccctgatatgtctggacatgtagatggaaatatcgggtttactatgtgtaggaggtataaaattctcttacataacaaggtaaatagatctcataaagacaatgtaagcacgcaagtttgcttccttatgtctgagaagtatttaaatacctaaacatagcaccatgagggaaattgcaaccagggcaagctgattggtcttcatctttttccttacaaacgtcaaatactagatgactggtgggtaatattgatgtttgatgaagatgcttacttggcaacacatgagtttttatagcattggtgctagcacaattttggaatcaatttaaggtgtgtatagataaggcatcaattcaataccgtaatcatggctaaaatgatcggataaaatacatatgtacatctaaaggcgtgtccttaccctggaagttgtaactgaaattttaggatgtgctttcatatccctatggagatagttcctagtatagcataaacttataatttctgctttaaaacaatacttgtttaagaaacagggttggttgcttaaaactatgacttaagattacattccctcctttttcaaattggaaccatgcaattacgattttacaggaattcgagatgtgccactacaaaccccttccaagcattatcaaaaaaaatttcaccaaaattcccccttcatcttcttcctttccctcaaccggaccatggcctgatgatggggttgggggctactgtcgctaaagtgtgaatgatggccccctctttattgggttcttggggcactgtgaggcccatgatagttaaagcaagaatagtaaatagtcgcaaatgctacctcgaagccgaggaagatgacccaacgttagggatgaaaatggagcggatacaaacggataaagcacataccatatttgttttcatattttttgccggatacagaaacgaatacgaatagcctgaatattgaaacaagtacagattatctcgaatacaaataagaataaaaaatgatcggacatgaataaggaaacatctttttcttggaacacgaaaaacaactcaacttctaatagaaacaagtatcaacatatataattagctcaatttctataaaatgtagtataatttataaatattattaaaaaatttaaataatattaatagtgtggactagtgttaagagatgaactactattaaaatgtaaaaaggtatattgaaggtcatagagtaataaagaaatggggtatgtctcatggcttctgcgaatatccgaatagcactgttcaccggatattcgaattattatccgtatccaacggaaaccccagtaccatattcgtattcgtatctgggagaaaatatccatattcgaactatccgaaacttatcccatccgaaaggtattcgtattcatttttctccgaagcggacgataactattcgctccggtttcacccctacccgacgtcaatgccagtgttgacggtcgttatagaccaatttcgaccgtcaatatgactaaaataaaggagagctagctatgcttacaatgcatatttattttagaataatatacttccacttgtacttggattttatttgagtgcaggaattgagcaaataaaataaagagaaaatgaggaaacctcaatcctaagcaggcttatggataagttgggcccacttgtcaggagtaaccgtctcggaaaccatcataactgtcacaaccgtcatagggacccacctgatagtggcccaggagaatttggaggcctgctgggctggcccaggttcggccgaaccaccctggcaacgctggctcaggctggccttacacatggacgtccaggatcacttgctaaaggcggttgcggggcattttccgacatttcgcatgctctacaaccatcatcacttgctgaaggaggagctcattcgctctctcaacacactcaaccaagctcaaatatatcttctacactttagtttagttttctagtgttaattggagtagaatagaatagctctcggagtcctcggaagtcttcggaggaatttcggtatggttgtagtagctttccttcttccttttgtaagactttcggaattaataaattactatttgtaatatactctcgatactttagtatatctaagtattgtctttactttatacctgtatcggtacagtcttatagctagcctaacagagaggtgcagtggtgtaggtttagtgtccgattattcggttgctctatgtcatctcgggggatgtagagtagtatttaataatgtgtatgtggtgtctagattattaagtatcactatctgtgcatatatgctacgggtcagtcgaggtgggccgctgatggtgacagctcagtacgggtattcctccatgatagtatatgttcctaagaaactt

SEQ ID NO: 22818 - DNA, 3022 bp, Oryza sativa
cctgctacgcctaaacatgatcacccttaatgcagaattcctaggtttcacttaccgttgtttgaagccattgatgcggttctccttttgttgtcaaccaaagtggaagtagaggatggagaacctcggaccacctcgcttgtcggtgtagaggatgtagtcatagtagtgaggacgccggcttgatcctgaagggctcgctggagatcacttgcagggtagcaacgcccttccggtcgccacctacactgtcccagaaccaccacatgtttcccctccagtgccaatgttgatcagggtttagggttttgttgtcggggagattgagacagagagagatcgtcatctactcttgggccggcctccccttttatattttgcgctgtagggaatcgggggtgactaaaaagaaaaaaattgggcgccaccgatcatggcgcgtagttaatcgggaattaacagattgaatcactgtgattgcgcggagacaatgggtggaacggtctagcgtgatctcctcccggttttttcaaaccgagagatcaattttcccaacattttcccctttgatcttgaaaagaggttaatgaattcattcttaataaaatagttcactaaggcaacgtgtcattgcagttatcatatcctaccaagacctaactatagtacctatagtttactataaaatttcgaaagaactctatctaatcttagtgggagttagttgagactaatgtccctatttccaggatcttagtcttaatcaaaggcagtcagttattaccatgccggctatatgatctttaattaagtcgggaggtaagcctttggtaagcggatccgcgagcattgacttagtactaatatgctcaatcttaatggtttgatcctggattctatgtttcacaacatgatacttaatgtcgttgtgtttagcaacactactcgacttgttgttacttgaatagaatattgcagctttattatcgcagtataatgtaattggtctagaaatgctgtcgaccactcttacactcgggataaaattcttaagccatacggcctgtcccgttgcttcataacatgccacaaattcagcctacattgtcgacgatgcagtcaaggtttgtttagagcttttccatgaaatagctctgtttgtgagagagaatacataacctgatgtggattttttagtgtatacacatcccgcaaagtcttcgtcagaataacctaggacttcaagttcttaagacttcttatatgtgagcatgtaatccttagtgtcttgcaaataacgaaagacctttttaacagccttccagtggtctactcctagattggactgaaatctgccatgcatcccggtaacaaatgctaagtctggacgcgtacagactggagcatacattaggcttcctatagctgaagcgtatggtaccattttcatctgatctgattttaatttatttttcaggctttgaaataatccaaatttatcgcccttaactattgaagcaggtgttgcagagcacttatattatatctttctagtactctgctaatgtatgatttctgagataatcctagtactcctttagacctatctcggtgtatttcaatgcctaaaacataagattcctcaccaagatccttcatataaaaattagatgacaaaaaatgtttagtctgatgcaacatatcaatgtcgctgcttgctaacagtatgtcatccacatagagtactagtattataaattttccacccttagtcttaatgtaaatgcaattatccacctcattctccttaaatctgaatctcttaattacttcatcgaatttaaggtaccattaccttgacgcttgtttaagtccatagatagatttcttaagtttgcaagccaaattgtccttgccttccataacaaaatcctcgggttgtgccatgtatatacatgctcatgcaggtcaccattaagaaatgcagtctttacatccatctgatggagctctaaatcataatgagcaacaagcgccatgacaattctaaatgagtctttcttagagataggagaagatgtctcattgtaatctattccttctctttgtgaaaaaccctttgctacaagcctcgccttgaacctttcgattttcccttttgagtcaagcttagttttgtaaacccacttatagcctactgttttggctcctttaggaatttctactaagtcccagactccattatgactcataaattttaattcatcttccatagcttcaagccatttggatgaatgttcactcgttattgcttctttaaatgaggtgggatcatctatcttcccaatatcttcacctaaataaacatcataataatttgggatagcagatcttctctcctgttgtgatcttctaagtggttcattttcgatcaccggcggttgagaagattcttgtggaatttcttcattatgtgcctcagaagtctgttgagtgtcattatttaattcattattattatcaactgagtcggtatcaccagaattttcatctggtgctaccacggtttgagtcacaggtacaatatgaggtaccaaatttattggaatattatcctgttggatttccggtgtaacattagcccgaatttcctcaagattaatttccctttcttgtgagcttccccagacttcattattttctaagaatacagcgtgtctagtttccacaaatttagtgacatggtccaggcaataaaatcggtaccccttagatgtctcagggtatccgataaaatggcagcttacaatcttaggatctaatttctttagctgtggattaaatattcttgccccagcacgacaaccccacacacataaataatttaatgtcggttttctaccggtccataattcataaggtgttttgggtaccgacttacttggaactcgattaagtatgtgtgtagctgttttaagtgcctctatccgtatatttgttggcggatgttaaatgccgattc

SEQ ID NO: 22819 - DNA, 1036 bp, Oryza sativa
accccctggttcggccgaaccaccagctccaccgttggatgtggggttttgcgtggacgtcccagatgcatccctgatggcggttggagggcacttcggacatttccccttcgccaaccgtcatacctacccctacataaagacatcactccctcacttcacacacacacttccaagcttgagctgaattataagaggctctattgtactatattgtatactagaatattaagagagtagtgtagaaggagtcggaagaattccggagttgtcagtaatcttctcctatttcttttattctgtttattactctgaattcattataatattcttcttgagtaatttagatttatcgtgtgagaattatctcttggttagttcctaaatagcatacgggattattgttcactataatcaactaaaatatagtgattgctttggtgagttatgaacactaaaatagatattaattgcttagacgtggtgtttaggtaattattatctaataattgatgcatatcccacagtacgtttgacgtgggtgtagaggttttgacagccctcgagatcacttaagtcctccctgtccgggtacgtagtagagggacatctgggaacagtgggttgctagtgcctgaagtattgcgttaggattaaaattaagctttccctagacactgtttctcactagtaaatcatctctatcctggcctatcatttgcttggtgtccttggatgaaccggaggaagctctgatcacacacgttcccttggcttcggtacccttggaatactccgtaggggaagtgctacatcggtatatccgtgtgcttgcggattttatctgtaaccgaatcaaataccaacaagcatttctggcgccgttgccggggaacggttgccgatcatttcttcacccctgctatcctagagaagtattcctgtcaaactcttctcgaccatggagcaaccttttttgagctgtctgctcctcggggcgaattctatgagccgcctccttcatcagagctcattt

SEQ ID NO: 22820 - DNA, 663 bp, Oryza sativa
gtgactgggacaaaccctgataatctgtttccactcagatctagcttattcaggtttgcgatttgactcaaggattctggaattggtcctgataaattgttttgtcctagcaatatggaacttagagatgaaatatttgctagagatggtggtattcttccagaaagcaagtttccattaaggtcaagaaatcgaagagtccccatgttacgaggaagtggaattttgccaacaaaagaattcgtttgtagatcaacagtgacaagcttggatgagccattgaaaaaactaggagggatctctcctgataggttgttacgcgaaagatttagctctatgagtgatgaacttcttgccaaggattcagggatggtaccttcaaggttgtttcttgcaagcagcagactttgcagagaagtgaggttgccgatgcaatcaggcaggaccccagtgagctccatggagctaaggtttatggagacaacttgagctggagatgtcgtgccacatctgacaccattccatctgcagaaatggactgacgtgttccatgagatgaaagcaccggtggggtcggttatgctttgcttgaagcatagtagagcttgtaaatcggtctctgatctgttgctgggctgcgctgatgagggtgttattgtgttg

SEQ ID NO: 22821 - DNA, 18459 bp, Oryza sativa
  unsure (1)..(18459): unsure at all n locations
caaattccagtgcaaactttttcattttgccattgcatagagaagaatgatctagaactatccggggagctaaatgttgtctctatttaaaatttggactagtgctatactgttattccacttattataatatcataatactatgagctttattggttgctcatattttctaataagccaaaacgacttattagagaataaaaattaatttataggtaaaaattttatatattaatccataacaactcataagccaatgttaataaaaattacgttgaaaatatcttaaaatcaaattaaaaattaaatttaaaaattcaaatttaacttttgctttggcttattaggctaatgggagtatgggactctacttctccatacgtggtttgttagcaaggatattttagtcattctcttgtcaaagttgattgcctaaatatgcgcgccttggtaaaaatgcaagttaaatgcaaacagacagagcatatatacttgtatttttggtttatgttggcaatgggatactatccagtttatatttatgacatcgacatatgccaaaatagaccattaagcctttgagtaagttgtactctagtatctctttttaatggttggtggctctttaatgtgtcttatttagataaagatctgtttggttttagacagatgtaatgagtggttggatctgtagtttatatcattattaaaaataagataattaatatatatttagctaatacgtccttacgatgaatactacaattttgtggatcagtgaatacatgctctgatcacaaattcacaatagagctagatcaactgttttagagcaagttcaatagtatagctaaccaataggtccaaattatatattcaatctaataacttattcattacttataaacatatattgcaccaaaaatatatagtctcacctcttatgcataaacaatattttagagtccgtgttgcagctggctataaatctgtaacccatttttcgtctctcttatctcttccatacgtgcttatagctgacatgtagtctgctatattgtacttgttcttactagctatctctactctcccaagctcagctaaaaaattcttccaagatattgggaaaaataaaagggcggcgagctgggcgagcgaccaccaccgacggctggtgtggatctagtggcggctctgcctgagctcaacacgacagccgcccggcggagcggatctagccatgggaagactagcgagtagtgaccgagtgacaaccattgtcgtcatccccttcctcgtcgccagggtgacacactgacacgggcagggcagatcaagccatcgcctccgctgccatcctttggcgagccatcgcctccaaatcctccctcgatggcgtctcggttgccggaaggcgtgggctcctgccgccgaatccggccctctgcactcgctctagccgtcggagccctctctgcatcttctgccccttctccgttcgccgccgtagcgacgctcagacaatgaccctcgtctttctcgcggaggtcgccgtcgatgggagccgcacgagtggcgggacctcctctctccttgatccggctcactctctcctgcttttacttcttgtctaacatggtcacccgttcctccattcttcgtttgggtagcgaggagcttacttggagcacggcagatacgtacagacgtgaatggaaatcttctagctagttagcgtgttggggctgaatgtcatcttagatgcattgtgaaaggactaatattcttcattaagtttagcaggtccagcacgaggaaagtgatttggctactgaaccgagactccatgagaaaatgaagtacaatagtagagggaattaaggattgagagatatgtgcacagtacgtacgaggtggacaggacgaaggaatttcctttcgatttcttttgccgtacgtgctgcccaaccgtgagacagggatcatcagtttgagatcgcctcatttggtgcgtgtatactgcatgtaaaaaatagcagcgttgcaacgagtaagacgtttttaatcagtatattatatattccttttttagttttgggtcgaaagcccattcctttattccttttcccgttatagcccaatctgctacctccctccacacagtctgtctctcttcggcccagctcacaagtaaagccatgtgtcttgctggcacgtcttcaacctccatatataagttggtgtcgtgcccctacgatgccagagtcaattctccccaatcaaatccgccgaatatctcctagtattggtttagggtttttaatccactcaatctcatctttccatttcttccaaaatcggagctaacaaaactcgggataaaaacgttgggaagctcaccgatcgaccagccatcatcccatcaaatccggccgtatctttatcgatctactaaaattggtttaggacttttgatccactcaatctcttctttcctttttttttccaaaatcggaccgaacaaaactcgggataaaagcggttgggaagctcaccggccggccatcatcggtgagggttgaatggagattaaatccgacgaattaaaaccgaattgaaagggataaaaatggttgggaagctcaccggccggctatcatcggtgagggttgaatggagattaaatccagcgaattaaaaccgaattgaaataggaaatcatagagaaaaagatgaaggatgagtggggaatcacattttgtaatcaattagaggagtaaacttatgggaagacaagatcgacatggtggcggcgctagggttcggcccgacaaaggaaaaagatggcggcaaaaaacataaatatggcggcaaaaaatgtatggaaaaaaaccggaagagaggggaggagatagagaagagaggggatgaggtggaggaagcggggcccactgtcatgtgggtcccactattttttaatcttattatttaactgacatgtgggcccatatattttgttttattttttaaattgttaaattttgctttatatgccacgttagatgaaaaccgaacttagctatgtaggcgccatgtcagctgagaccgccgtccaaactactttgggacttattttgcaccgattttaacagttgagagacctgttatatcttgttttccaattaaaatatgaaaattggattcttcgataagttaatagacctcagatggacttattccaaaggaaaataggccaagccttctaactcaactctattcattcagcccacgtgcaaacaagattttgataggaatgagaaaacataggaataggaaaaacgcaggattttgataggaatgtaagtgtaaaatagaggattgcaaaacacaggaaaaacacaggaatggtcgtttgattgggccgcaggaaaaacgtaggaattagaggagagataaagactcaaaggaaagtttccaagaggttttaccccatgttagaattcctccaaaacttgcatggcattaggcaatccataggaatttcataggattccataagatccattcctttgattcaaagggctatgtagaaaaaattcctataggaataaaatcctctaaaatttctatgaatttcctttgaatcaaagggggcctaaatagggaaatgaggaaaataattgcaaaaataggaaactttgcacgggcagacagactagtctttttggcttgtaataagtccatttgtcatcctcatttggtcgagtttaattggcatctctcacaccgtaatatcttcgttcctcgtctggacaaaaccgttgaagtcagatgatttcactacttaaaaaataatttagacgagaccttgttaggttgtagatggaccataactacccgtatctgcaaaaatcgagcaggcatttttgcatacatcttcttaagaggatcatatgcaattaaaaaaaaagcgattttcacatgcggaccttttaaggggttgcatgcaaaaataaactcattttttacgtgcagacaacttaagaggtccgtatgggaaaatcaatctttccatatgagcctcttaacgtatgggcctcttaacgagccgtatgtgaaaatcgatttttacacaacaaaggtttctcattttaatctttgactaaaacttgtaactagtctttctccctcatactaacttaaaatgtgttgattctttttcctaaatatttctaaaatcatgttctatcatgttattgtattcttgttgctattattttggccgtcttctattgtgaatttgttttatcaattaaaaatttgaatttcaaaaaaaatggaaacttcaaataatattttgaattagtaaataatttcagttgaaaaagtcatgaacataaaagttgtagaactcatcaagatatacaacttttattttggtcatttgttcatccaacaaaatgacagtaacattgtttataaaatttgcatatctctcttatagattataaaatcatacgagagatatgtaaaatttgtgaaaattttactatcactttgtcggatgaagaaatggccaaaataaaagttatagatcttgatgagttatacaactttgttgttgatgactttttcagttgaaatcatttaatatttgaaaatgttgtttgaagttgtcatattttgaaattaaaattcaaattgttcaaacaaagtcatatagaaaaaatgaccaaaacaaaagttgtagatcttgatgtgttatacaactttgttattgataatttttacatttaaaattatttactacctgaaaaattatttgaatttcttatattttaaattcaaattttaactagtttaatcaaactcggatggagaaatgagcaattttcaaaattggtagatcttaatgagttctacaactttgtttttgataacttttcacataagttcatttagtatcataaaattcgaatattcgatttgaagttatcattttttcaaattaatttttaatgactattttcacatgcggtcctcttaaagagctgcatgtaaaactctatttttgcatgcagacatttaggtggtttgcatatagaaatgctcactcttttttctcccctcctctttctttccctcctcaccacttcaaaattttcatccttatcccctctctctctcgcacctcctcatccttaccttactttctcacctcatcctctctctcactttctctcctctcctctctctcacagcagcgggcgcggctcagcaagtggcaggtgacagtgggcggtggtggcgggagtgggcggcgggcaagcggatccgccacccccgcccttgggggtgacggcgacgcgcggatccaccgcccttgaccttaggagtggcggcggcgggcagtggcggcggcagcgggcagatccgctaccaacgccctcacgggcgacggagacgcgcagatccaccgcccccgacctcgggaacagcaatggcggtgggagtgagcagcgacggcgggcggcggattcggtggcgccgccctcaggagcggctgcagctgaggcgatggtgtggcgtgactacggcgattgtgacgtcggcggctgcggcaagctcgtggatcccgccgcctctcctccctctccctcatcttcttcgatcccgacggccagaggtcgctgggtgcgatccgtcaccgtggatccggccggctggcgatggcgatgacggaagcgatggcgacggcggcggggctagagttttttcttgtggaattttattttttttcgcgctttttcttttttgcatgcaatcggcttaagcggattttcgcatgcggttgtgcctgcccccacggaaaaactccgattttcacagaccttgtcacgcttccggctggagcaaccgcatgcgacaatcagtttcgtccgtatgtaaaaaccagttttgtagtagtgttggtttcactaacgtgtcgttttagtcagcaaaataaaactaagaacaatatggggctacatgtaagtggactttcacctctctcccccacctatcccctctcttcctcatctcccctctctctctctaccttaggagctcattggctaggagaggggtcacccgtccatgagaggcggcagcagcgatggggggttgtcaatgagggggctccggtcttccgtgacggtggaggggaagaggagggaggtgagggaggctgtgagcttgagcttgccgaccagccacgggaaggcggcggtagcagtggccagtgggcggtcgaagaggatggggtcgcggctatttgcggtggtagaggaggagaggatctggtgccccagcagcttcgtctcgcgggtgctcctacggtcttgcgcgacgctgggagtgggctcctgtgccggccatcctgtcctcacaaaaatgggaagggtcgagcagagggcgggcgcatgcagatttcgcagttgcctctctgcctttctcgtctgccgctgccgccaccacggcatctcttgtttgctgaagccatcgtcataggaaagactttaatgagaatggttgcttcatgctggctttacgcatggttaacatctagctattggaaactagatgcagaattgccaatttaattcagttcttaaatcatgcagtaattttgtttcgaatcaatcccatgcgttcaattttttttaaagttaaaagccccgtgcgttgcaacggataaaagcaactgattttttcttgcaacggataagagataaaagcaaaaattatgagtttctagtatggctagttgattaaagcataactgatagtacatgttcaaacactccaactgatttttcacaaaataaaaaggcgaatgtccagcaaaacagtgaacacaattctaattagacgcttcaaaacgcatagtggacactgataatcataatatcacttaaggttagtaatatcaacattaaacttataataatacatctaataaggatgcaacacagcatcagagtatgcacacaaaggaaaaaaaacttcattttagcaaaactagcgaaatgcacatgcacatatatctcatgaacttgcactgtagtatgtataaaaagtgtatatgatatgatggctagagatagtaacaggtacatattctcatacccacacccaaactaaatacgtccgctccaacacctacacccgatcactagtgaaattattttcccgtacccatacctgaacgggtgatgggtacccataccatacccgttgcaactaacttttacagatcgagaggctgaagggcgagacgatgatggcctgggtaaggggcagcctcgcatgcagttgtggccttgccgagcgatggcttagagtctgtttggttgggtggatgagcctggatgggagatggccgtccgaatttttgtggtgtttggttggagggcagggtggatggggcgggccagaatagggaatattctctcaatatgctggatgagtgcatccggccgatttggttggatgaagccatccagttttggtctgggtgatgtgtcctattctgattggctgtggttggtttgattttctgttaagcaagctttaaatgatttttttttctaaaccgtttatctaatttatggtttgattacaccattatatttgttacaattaaatctttaaaacaagatctcggatgattatattacgataaatatatatatatgacaaatagatcccactaacttatggcttctcccatccatactatatccctccaaccaaacaagaaattggattgccatatccatataaaccaaacaaaaaaattggatcgccatatccaacaaaatatgaatggctatatcccatccatacgtgaccgtgaaccaaacacacggtaaagatgagagacgacatatggacttattccttttcgcttcaagtgtgctatgatagcgccaggcagaactagcttctcatgggcttttcttctcgtctatcatgtggtgagagcccaactaaggaataagagcatgtttggttggatacctcagtaacatgcctgagaaaaatgtgcatctgtgtaggaagaaaaattatgatgatgttgcctggtcagacgtatgagtttcgttgtttggttgaagcctgagcctgagcaaaatagatcccataatgctacactaaataaactctgagaagatttaactcttgcaggaaataacatatactacttgctaatcatgtcctggagccgctccctggacatcaggtcaggaaggagttgaagtagtcaggtagcaaccaaacaaccaatattttttctccggcatgtctcggccgaagcaggttcacctcaaggcagcaaccaaacagcctctaagttcacttgctgtccctcaactttacattaagtctatatgacgtccataatccccaatatcagaaatatcaactcctcaactgttcaaaaccatgcaaggtaagttccttggcagtatggatgcgtggtttcgctgacgtggtattctagttagcaaaacagataaaaaaacatatgtagagaccacatgtaagtaagaagaaaatgtggagcccatctgtcatccccatcatcttcttctcctttcttccccagcatgggagagcgggggaggcagcccgacgccagcaggagaagaggtggctggcgcggccggcgggagagggaggagagggggccggccgcgccggcgagagagggggagagaggcggccatgagatggctggatgggggcaagggcagcaaagtgagtgatggtggtgggcgccgccgctgccatggcggagaggaggcgggatggggacggtagcagctaagcaaggtgaacggtggtggtggctgccgtcgctgccatggcggcaaggaggcgggatgcctggtacggtgcttccgcgtagagtgcggcaagctcaaggcgcgggcgtacacgcttggtgtcccacacagccgtcgtcctacctacgacatcaagttccactagcgagcttggactcgccagacgcctcccccggcgcctcccttccctcccaggctcactagcggctgctcctccctctctcatcggcacgtcgggctcccgccgacactgctagtcgcctctctcctgccgaagaggcagccccctctcctccctgtcccgctggcgcggccggccacctctcctctgtctcccactggccgcctcgaccacctcttctcccgccaactacctccccctctctcccatgctggggaagaaagaagatgatgatgaggctgacacgtgggccctacattttcttttcacttacatgtgctcgacatatgtttttttatttgttttgctgatgatttgctacgtcagcgaaaccacgcatccatactgccaggagacttactttgcatggtttgagcaattaagaagttgatacttcttgtcttggggattaggtatgtcatacaagactcgacgtaaagttgagcgacgataggtgaactaatgttatgaagcaagccctcatgggcctcatgggcctcgatgatggttcaatgtaaagcccccttcactctccacggcctcgtcctaggcccgccacgtgtaggcgacgtgtccctctcgagtcacgagcaacccgcggtccggtgctacgtggcgtacgcgcgtcacgtgcttactcgtgcgcgcgcggcaaccggagtagtagtacttcgtacttgtgtccgcctcgccgcgagcccacgaacgcgaccaatctccgccgccgttgagctcgagctctagtactagaccacgaccacctctgctcccatggccagctccgtcggcgacagcaccgctgcagctaacggcggcggcggcgcagcagcatcagcggcgccaccggaggctgcggggaaggggagcgccaccatatccgtcaccgtcgtcctcctcgtgctgctggtggcctccgtcgcggcgttcctgatgtcgccgcagccgggcggcggcaagccaccggtggagggagtaagcggcggcggcgacagcgacggcacccgcggcggcggcggcggcttagagggtgtcaagggcgccgagccggtcgagcaggcggtgggccccggcgccgccgccatccccggattcaacagccggctcgacgcgttccgcgcgtgggccaagctcacctggatgaagctccggcggccacactccggcgagccccggtacgcatacagccatatatcgccgaacagtcgattgatctttgtcatgttaaacttgtactggtggttctaagatttggtttgtttgtgccaaaggaggtatgatgacgacgcggggagctccggctcggcggcggacgcggccaagaggagcctggagatgaccaaagagacggtggagcaggcggcggcgtccgcggcgagagcggcggggaacgccgtggggaaggccagcgacaaggtgaagggagctgcctcgccggcgaaacgggcaccctccgacgcggagctctgagcacacaggaggacacgttgcgcaaaacaccctcatcggctcagccttcttcgcccactgtttttttttcctcgaagaaattctgccagtgttaattaactagcctctgttctatgatgtatggattgaactgaatatttgtatcctgtgaatctgatgtacatatttccactgtactatatacagtagtgtgatccgtcctgttagaatcgacggaaataaaaaatgttcaggcagagttgcagttgccgccgtcaggcctgtgttctggatcaaaactgttgctgctactgacctacttttaaccaaatgacagccaaatgaaccaatgcaggtgtgcttacttttaaccagccgagtctctgtatctctgaccagccgagtctctgtatatacagagcagagtagtccacgggggggtttggtcttgttcagtcggggcagattctcctgaacacgggcagcctccggcggttggtcggaccgtagagcacgttgatgatcaactcgtcctcctcgtcggtcagcggccacgcgaactcctcccgggggctcggagcagacgacggcgccagcggcggtgcctctgattcgggatgctgcttcggtgcagaggacagaggcggcgctctcgtcaggagggtgacggcgggggcggtggtcttcggcggccacgagaactccgtccgcttgtgctgtgccactggtgttggtggcagcggcggcggcggcggcggtggcgttggtcgctctgactctgggagggtgatggcttcgcctctcccgatgagtcccctcttcgggttgaaaccgggcggcggtccggctaaggagacggtcggggtggctctcggcggcggcgcgaagtaaggagggcttggaggaggtcgacaaatgactcctggaactggaagtggcggcggcggccggaggaggaaaggaaagcctgccggaagacctgggatcgcgccgccgcctcgaggtggaccgactcctggaagtgacggcggcgggaagggataaaaggctcccggatgacctgggatcatggcgggggtggcgctgccgcctcgcggtgcaccggctcctggggatggcagtggtggcggaaatcctctcggtgtcggcggcggcgtcgggggccgctgcatgtagaatccggggccctgcgctggtcgtctgatctgcggctccatctgtatgacaagacagcagcatgtcagagatttgctcttcagtttgataacccaggaatggaattgtgaccctgtgaaaactttagcggagacaagatatgaacatatgatgcagcaggcaaaggaattcaacatgaaaatgttcttgatgcagggaatgcactgcagtaaacatcaaaaacgtgtgctgcccaggtcgttagttagattaccagtttaccactttcgtcagtctggtagtcttccagtttccgaacttccctcatttgcaggaattagaatcgttaccagagaataacgctctatggtgtattctatacaataaaatttctttcaactcaagtaggaataatgattgagatgacaaatcccagtggaatcaggttaagacatacttaagaaactactatacagtatcaagatttttatgcaattcgtaatgccatacgagcaaacaaacaaataagataagctgttcatcatccacaagaaggattagagagcagggatttgtcaaacccaaaaaaagggctggaaacaattcactggttcactacagaaagtgtagtactgtacatctacacgaattgtcgagtgcttgtgaactgttttcaggggggattgtgtaaacaacccaagctaaagaaacatgaaacgattctaaacaaaggttaaaacagtcttctggaacagaaactttgtgaaaggaagtaataagaaaccttgtttgatctagtcaatttgaattatgcaaagagagtgctgcatacatatgtcttctgataagttcagaatgatagaaatacgatgcatttttcagggttaaacagtgaatatcatggatcatatctgaccttaattgttagatatttactgcataaaacaatagcaattttacctcataagatgttcgtttgatgggtcgcaccacacgagggtcgcccttcccatcgaaaaactgcagaataaaggtcacggtaaggggaacaaatcatcagggaaagaaaacctggaaacggatttttcgtgatcaggagaactgcatagtgtaattttcaggacaaaagcatcgaacaagatggagtgaacctatcatgactagctcttattagtaggaacttaatttcacaaaatatcaaaaatataaatctactatctggtgagtggtgaacatggccatcaaagtcactaaataatgcagtcacggttctatcttttccatcaattactgtcttgtttcgttaacaccattcagttctccagatcatgtaaccagaagcaagcatgatagagtcaatgcaagttaagttagccccctatgtctgaacacatcatgaattccccaacagcgtgaagcatcaatgcaacgggaggagaacgagaattgagagcagagggaacaaattacctggcgattgaggccgtagcggccgctggcaccagaaccagaggtggtatcgacgagcacgccgtccatgacgatcacctcgtcgtcctgcgtgggctgcctcacgggggagctgtggaagaggaggcgctgcanattcggattccgagaggcctcgtgttggacgcggcggaattcctcgagaccgaggtccaaccctcctgacggcgacgacgacgacgacccgaggatcctcccgtcgccgtcccctgcagcatcatcgaacgccggcatgaggcgggtgcccgtcgactgagccgacaagcggctccgccgcgtcctgctggaggagtcctccgacccatctccacttctatcgctgcctctgctccgtcttccgctgccgctgccgctcccgctccctctgccgcgcctgccgctgccgctgtcgttgccgggggtgacgctgctgtggcggggatccatcgctgcgcatcacaaccgggatcggagatgcggattagtaaatcgaggcttgtaggagatgatttttgaaaaataaaactgaacccaaagctggagaaacgcgaaactgaaattgcgagcacacgaaaaactgcatagctcggaaattagaatctgatcatgcgcgagcaaatctagcagaaaaaaaaaatcctacgggattagggggctcgaaaccgcaccactgcccccgatttcacggaaaaaatcacgggaaatcccaagttcgatccaccaaaatattcgaacagaacagcatcagccaccgagggggaaaaaacccatgacgaatcaaacgaaccagagcaaaatcgcagaaaacaatcgattccgaccacaccgcaacgggaaacttgcgatcggatcgccctacctccagtactccagccggcgaaaattccagaaggttcgagaagcgtgcgtgcggctgggcgtggaatggaagcggagcgggaagaggagagaagaggaggaagcgaaggaagggggaggcggtggaggaggtggaggtgggcggagacggggttaagtacgcggcggcacgtcggtttgctcaccacggcttgcttcccgtttgaaatttggaggtgcgggcctgggagggggacaaacacgctcgaacggctgggctttccttcttcggcccagaataccttcatgggcttgtcatgggggcccacatatagattaactttagctttgtcttagcagtccttgaaactgttgatcatcatcctctgaaacatagaaaagtttgaaaattgtttgttataaatgataaggctgtttggtttgatgcccaaatcaaccctattgaaattgtcaatattttgttgggaagagatgttgccagtatttgataggggtagagatatttaaagtgtgtctggtttgttgccattgctaatgttttgtgagaggaagtttctaggatgagtactgcttgctatatatacggcccagttgtacaattcatgtgtaacaaaaaacatgcaaccatataccaatcaaagaagagcacatatgcattgcggcggtttagaaccgttgatcaaattcagttgtactaagtgagttggatagtttgattgtatgcatagcaatttccttataggattatcaaaaatattattattggactattttgaccgatttttgaatattacctatttattttggtaacaaactaatcacaacgctacatgcttaggctacatataacaatgaatttatcacaggtataatagatccctgcagtgctgtttttttttatatatattgaatgttacttctactccgcttggtaaaaaaatgacgttcagtctttttttagtattttacagtacgattttggtcatattttttttattaaaataagtttatagattgagaaaatttatggtgttgtaaaagcatattaaaaagaagaacacaacatcatttttcatattttcagattgtagtttagagtcattgataatcgaagtcttaaaatttcaattaatgcatattatccaaatgtcaaatattttgtgatccctccgtttcgaaatataagcacacactttatacacaaatataagcattttttggacacaaaatccaaatcaatggaatcttgttaatttaagtcaataagatgaatgggggaattcaaaatattcaaattctagctaatcagatgtttggggggaatccaagccccaaaaaatttaagtattttttcttaaatcttaatatttgttaaataatttagaaatgcttatatttgaaaatagaggatgtatttatttcgacagaagttcttataatcaattttcatggccctctcttcaaagtaaaaaaaaaatctaaattcaactaaatgcaacattttttcaagagttttctcaatgactattttgtttttcaaacgaaccgaatcaaacgataccaagtttcatattgacatagcagaaaaaaattgcaaaaccacaactttcagaggttaatcagaaaaaggtaaaaaacacaccacctcccacaccgatagcacatatacacaaactaaggaaggaaaaagcactaatccgatcaacgctgaacatgatcggtcaccgtcaatcctaagaatgagccacaaccatattgtcgagcaccaactcgaaccagctgaacccaaactccaagaacctcgggggtcacacccttcaccatccaactgattgcagaccttctagacaacgcctctaaggaagatgcgatatttaaagcagtatcactgcacatccaaaagaacttagacatggttttcaataggggatctactagaaaaaaaaggaatgtatctcgacaatggcgcctcctagatagaatatggtatccaaaaggttgctgctattgatctggtgtgctgccatattaggctttcgcctgccaccttcctaccccctttgctcatagctctaacaccccacaaccaacaaaccgccattggcgcataaccgccgcctgtaccgacgccccaccatcgatcaaccatcgtgcgagtgcccaagcacattcacttgagttaaggtaaccccactattttttatagctatgatcatttgagttatgactgataaggagttgaaaaatgaaccaagtaacaaaataattatatatgtattattattattattagtctataaaagaaaatattgaaacatagtctaaaataattctagaatcaacttaaaactgaaattaaactttaaaattgaaattttagctatgataagttaaaggacgacgaaagatttaccccaatattcatcgtacggctcgtactgatcctatatcatccaagtgggcgggggaaccggaaggaaatggaatcatctagagcatttcggaagccgctaacccaagtatcccaccggggacgaatttacggatttgccctccaccttctccctccccctcgcggcgccgcttcttatacccttcctcctcctccggcgtcgtccccgaggtcttctaaaaaaaaccctaatccatccactccaaatcgccacgcaggaagggaggaaaggaccaccagccaccgcgcgcgcccaaatcgtcgcagctgcttccccgaggagaagaacatgaggtaaatactccgtgctgcactttagcttgttactgctggtgatggtggtggtgtcatgtggaggtgcggctgattgtgcctgggtggctgtggggtggtgatgttttagtttgttcttacatgttcttgcgattgctggtatgcttgtgttagtttggttagatcgtaggatatatgaaatcttctggaagaactttggctgttgacttgctatcagcggtggtcaattttctttggtggagcaagaaacattagagttgttgcggttttgttgggacgctaggtcctcccgaatgcttttgccctgttctcggatgcggatgcgatttcttatccttttgagtaattgatgaaacgattgtgctgttgtcctattggttaacttgtctctgttgctgtgatttggggcaatcctatggtgcgctttctggctgttttactgcgtgtgttcatgattgcaaacctgaaatgtgttcatgattgcaaacctgaaattgtgatgtggagtgcgattctgagcaaaattttatgggggattggttttgtgtgcttgcagtcgccacccgagcactaagtgggcgcagaggtccgacaaggtgttcttgacgatcgagctgcccgatgccagggatgtgaagctcaacctgaagcctgagggccagttcatcttctcggcgaagggccctgccgacgacaccccttatgagcttgatcttgagctctttgatgctgtgaatgttgaggttagcgcaattgatggcatatctcctctgtttcgttataatcttttgcattctaatagtattttttgtcggtttttcgcaggagagcaaggcagctgttgcggcaaggtccatatgctatcttatcaagaaagcagagagcaagtggtggcctaggctgctgaagaaggaaggcaagccacctgtgttcctcaaggttgattgggataagtggcaagatgaggatgatgaagacattgggcgttagtccttttctgcatcccttgtgttctgtgtttggctttgtattatctagtttggcgcgaattgacagtgcacttccttcttgttgcagttggtgacttcggtgatatggacttctcggtatgagtctaccgcaatttcagctggtggtaaaggaaaatggtagtaaggattctcatgtttttctttgtgttgcagaagctgggcatgggaggtcctgatgatgatcttgaggacgatgacgaagatgacacggctgacagtgctaacaaaggtatattctccttgtcacctgtatagttaacttggagagaaagactggtactacttgcttcatgctccaagtatgttattagcacttatttcataactgaacattcttctggtattagctgtttgggccagttcgaatgctagatctttctcaactccttgaactgcttatccctttggctcagtcccctgaaactttgctgattcatgaggttcctcagagtagcctttacatcatcatttgtttttaatttgtcatgatttcatgtccatggtcattattacaacttggtgattccccgtgctttgctgcggaaattactaagcaattctcaagaaaatatctactttcttgtatatacatatatttctattagtatatgtatataaaattgattgaatgatggttggaaatagtaaatatgatatgat

SEQ ID NO: 22822 - DNA, 1277 bp, Oryza sativa
cccgattaccaatatggttttctttgagcaacaatagtaagtgtgacctgtctgtatcctgcatgtcactttctttattgaataaatgctgtaactctgactttttgcatgtaatctgtatgtttatgggcaacaacttttccaatggcattccttttgacattccacatcatgttggatgcagcatgttgattctaatgcaggactgccagtcttagcagttgattcaatgaattgccagtcttagcagttgattcaatgaattgttgttatagtctgggtcagtcaacgtaccattttgtctatgcaataccatttcaaactagactagttaaccaatgttatgtaaaactcttgtgaaacatctgatctgatttagccaacatgagcatagtaaactgaactttccagggatcttaatttctcataacaagaactctgtatattcaacttagtgaattcgccgagaggcaattaccgaactaactttatgcttctgcaatctgcagatgatgaagacattaaggcagaggggagcggggaacaggaagctgctggtgaagcgaagccgtgaaatacctgagagttttagaacgctatgcttgacttgtttgtgacgctgccaggtcttaagatttttttggtgtaaactctggagagtggatcactgccactaaagtaaagtagtagttatggtttagtagctccattttgttaaaaaactttgtgcattgcacactgttctgttatgtgaatcgccatatttgcatcaaccattgcaaagctatccagccattctgtgtttcatacttttactcatagcggtttggtggcatgttccatttgccttgtactttggaacttgcataattgttcgtgactgtaaaaataaactgaagtatccagcttgctcaatccatattgttactgcctgatctacatgttatacaactaatcatggagatcactgacaatttgttttctagggaattcaaaaatctcaaaactattgatgatcatgtaagcagataaccatattcttgcattgatttaacaaattgtaaggtcacaagaagatgtagatcttcacaaagatgacagaatattgctctcaggggcagtgacaacgagttcggcaaatgcaaactcctgctcccttttgcttaaactctctgttacagctgccatgaagaagctttgcccagtttcctcacaattcaatggagaagacactcctatgatggctcaaagtggtgtccattttagagactgctact

SEQ ID NO: 22823 - DNA, 2005 bp, Oryza sativa
aatttctgagcttgccctccatttcttctatcatttttcccatattaaccaggtgcccatctgccacagcaagagtcatactcatctgaaaagagaacaggtggttcaggattaggttgcttggattttccacagcttagcagagtctcctaataaaaagaagtgtcttaagaacgaatttttttattatgttactgattcaatgattgtgccacaagaaatctgcaaattgataagttatgtctttataagtgttgcttgtctttcaaaaaataagtgttgcttgtctttctaggctttctaagtttgcaattaacttgtaagtttaattctccagaacacttttgaagaattcatctatttcttactccttgcgtaggtgatcccaaaatgtgagccaatcaaacatttttatgtttgatcaccattgcacggaaaggtgtttacacttcagtttggccccataaaattaaattgttatcgctagctttattgtcaagtactcattcataatatgtatcttctgtatctaaaaaaaaaagtatcttctgtgatttttgatattatgatagaaatttgtggccgaattgtagccttgtgaccatgcaagggtctaaaattgtgagagcaaagttgctttacatccagaacgacatgtcttaagactactgatacactatagaggtacatgtgtaaagctatattgatggttcaaattgttttatttatgcacaaagtctgggttctacaaagtactgaggtagtaatacacatcaataactgtggaaaacagggatgaaagatgcccttgaactaagggcaacttaatatgacaaaaaggcggataagacaggaagggagatgttacctgccgcctgattgatcccgacaagttgaaagttccagattgcttgttatctgttgtcaatgatagcatcacagtgctgttcaagcagtaatgcgctgctccttcttcttcaggaccaacctgttaaagttacataaattttcaatgagtactacaaaacaacatagccagaaactaccagtaaaataatcagcgactgcatgaacagttttgtcttaagccacctgaatgacatgaatagcatcccatgaaccaatctgcatgtgccctctttttccttctccatctgcagccacataacaggaatactagttaaagaatttcagattatctggtcaaataaacgagatctcatcgagtgttcctacagacctttctttattaagaagcatgcaataaaactctcatcttcatcctcccaaatatacacagaagagatgccaccttcgtaatacctatttgtcaataggaaattgtactacttactttacatgcacatagcagatataatcacctgtatgctaaattgagaaataacgcaagtgcaagcaataacattattccatgctggtgcttagcattactgaatcaaagagagtatgaatcttactggtcacggtagacagagaaaacatcatttgcctcaacttcaagattcctcatctcttcggagggaactgttccatcttccaaaggaggatcgtatttgtttgaccaaggagacctgcaagccatccccacaatcaacaaatcgggagctacaatacagactgcccaacagttaacatccccccccccccaacttaagtgtccgtggtgatgagaatcataattaaatgaaagcgtttgcaggtctttgcattggttttctcgattgatgcatttgcttgttagtcaatttgtagagcgagtacaggtatagctgcaactatcactaagctgcattcctgaacaattgattatcctgtgtgcctgcctccgcgttctttgatactgcttgaagctttcggtattcataaggtggatgcttttcgcaacactcacaaagaagagataactataacagaaaccgtgagcgtatcgacggatcgctgacctgtaggagtcagcgtcacggttgtactcgcataggatgta

SEQ ID NO: 22824 - DNA, 780 bp, Oryza sativa
tgcacacaggggtgtaactatgcgttctaggctcgtggatgacttgaacgtgaaacacgtcgcagaggactacggtatcaaggccacacaaagcacagcactctggtatgcctccggccggtccgatcgaacgctccgggttggcgtacatacgacatcgacctcctgctggatcacgtatggggacgcccacccgacgaccatgggacgcacagatcactcaagatgagcgacaggggcgaggggaagccgcatggattacatctgcgcaaccggggcgaagactttatcaaagttgattccatggcactggacatagtcttttgccatgagccgggcctcgtgccagatcacggggccggtctcgttgttgtttaacttgaacacccacttgaggtcgattggacactggccggccgggagctcagtgagtatccaagggctgttctcctcaatggatttgatttcatcttgcatcgcttgccgccaatgttcatcctgctctgcttcagtgaggttcgccggctccttcgcgactgccaggtagagctcgtccgaatcgagctccaccagcgccgtcgtgtcgaggatgttcgccatgctccggtagcgacgcggcgcgccctggtcatcatcgacgtttggcgtcgagctcggcggcgacacgaactcaactgggggtgtgtcagaaggtgttgccggtgtcacagaaagcactggtgacgtggccccgacgctgggaggggggcttgcaggcgcagtgcttgaggccacctctta

SEQ ID NO: 22825 - DNA, 675 bp, Oryza sativa
ctattgtgaaatattaatcgtgccaaccacaagccagcgtgggcaacggctttaccttttgtatagcatggttcattgcggagcaccagactgagaagtggcggagaataagcccacgggggtcgctggggagtccatgccttgttttataagggggtgattatgatccaggaatggtgcactatggtgagttgtgttgtacaaagggtattgtcacagcctctattcgggtactttccagtatcgcgacgcatggtagacatgatgttgaggctgtgtcttgtgggtacagtggtacacctctggccagagtaaaactattcgaatagccgtgcccgcggttatgggcgggttgagcaatgttttcctgaactctaggagaagaaggggagaaagctctccggagttaaggaacccttgtaactgttaaccatcatctcaaacacaggagtagggtattacgctccacagcggcccgaacctgtataatccgattgtgtgcaagctagctagtagtattagaggcggatacgtgatttctaagaggcgagcctcttcccccggccgaactcacgaaaggggggtctcacgacctcccgctatcgagggacttccctcgacagctggcgcgccaggtagggggaaggtcgcgcgctttgaagtgaaggcgttttc

SEQ ID NO: 22826 - DNA, 653 bp, Oryza sativa
agtttcgccccaacctcacggagaagtatgatggcagcatcaatccttccgagttcctccagatctacatcacgattatcgtggcagcagggggtgacaaccgcgtcatggcaaattacttccccatggccctcaagggtcaggcgcgtggctggttgatgacccagccccccgtctccatccactcctgggaggatctgtgccagcagttcgttacgaactttcagggcacatatccccgcccaggagaagaggcggacctgcacgctgtacggcggaaggacgacgagtccctccgctcgtacatacagcgcttttgtcaggcccgcaacactattccatgcattccggcccacgcggtcgtgtatgcgtttcggaatggcgtgcggcataaccgcatgttagagaagatcgcctccaaggagcccaagaccaccgccgagctttttgagctggcggacaaggtggctcggaaggaggaggctgggcctggaactctcccggcaccggtgcggcggccacagctgcccccgagtctgccccccgctctaagcggcgagataggaggcaaaagaaagccggcccgctctgatgacgagggccatgtccttgcggcagatgggcccgcacgggccccgcggggctgcaggaat

SEQ ID NO: 22827 - DNA, 616 bp, Oryza sativa
tttctgcctcaaagcgcttctcttgtaagattgctcacactgcaagcttccttccgcgataagttattttctatgtaagttttcttccggcgtaagcttccttctgtactgagctttttacttacatcttaaatcatccacgttaaaatagattttataacacctacatctgtcgtcaagaaatccacgttattctttaggaatatactatttgttatagcaaaattatactcgaggcgggttgcgctttatttactcctagtctcctactgccaatgcgtgtcgcgtgatcccgtcctctagaacggcgaggaggattcatcggcgacttcatcgttgacccaagcgaacttctccaagaacgggctgggcttgctctccggtgggtacgcgtcgatgcagtcggcccacgcgcccttgtcggccatgtcgccggtcacctcccacacgcagctgttgcacttgaaccccgacccgaacgtcaccatcagcaccttgtcgcctcgcctcaacctccccttcgcctccatgtacgacagcacgtaccacacgctgctcgccgacgtgttcccccacctgtgcaacgtcatcctcgacggctcgacgtctcgctcct

SEQ ID NO: 22828 - DNA, 10231 bp, Oryza sativa
tgctgatgctgaccccgcggaggccatcgtcgtcctcgcgctgcatgatgcaggagtaggcgtcgtcgctggccgcggtggtggagcgcacaaggcggcggagctccatcttggcgcggccgcggtgggccgggtcgctgctgagcagcacggccgccccgccgcaccggaagaggcactgccccagcatcatggtcctgtccttcccggcgtaccagtgcggcgccagcgactccgtcgagaccaccagcgccatcacgggccgcggcgaccgcgcgcgcatggcgttccgggcgacgtccaccgcgaccagcgtggcgctgcaccccatcccggagaggttgtacgccgcgacgtcctcgcgcatgccgtaccggcgcaccaccctggacgcgaggcagggctccgggaagaagccgctgacgttgacgacgagcacgtcaacgtcgcgggcgcggagccccgtcctggcgaggagctccggaacggcgccgtcgaagcaggcgtccatctcgtcgaccgcgtgaagctgccccgcggcgagctcctcgcggccgtcgaggaggttccgcggcacgtaggtccggtcgccaagtcccgcgcgggagatgaggcggaggaggaagcggaactccgccatcccgagccgctcgttgcgctggacaatctcgccggcgagctccgccgtcagcgtgcggtcatcctccggcttgtagcagacgtagtccaagaggtagcaccgcgtgtggcggcggcgggaggcggccgtccatgccatgtgcgccaccgcgagcgccggcggcaggaggagcacgacggcgagcaaaggcgtgagctccatcgtgttcgcatgcatgtgatgtgtgggtgcgagtgcgtttcagagccaagaggcgactggtatatataacagcgaccgttgcaacgacgaaattaattacagtttctaacttggttttcttgtttcgcagaactagtacattttacagttagcagtagcaattgacgggccaatattcgcaccacatatgaatcgcatgtttcagaaaacggatttgctgaatcttgtgcgcctgaaatgtcaaatctgcagccacattttcaacaacagcttggctattttgtgaaaaagttgcgcttgttttttcaaaaagaaaaagaaaaagataagccagagtaatctgatgttatttgtaaagatagtgaaaaggcacacattttaattattgatagccaaaaaatatcggagggtagcgataaacgggattatcggaattctattggcgatagaaaatttttttagacaaaattagttttctagtttaatatagttttcgtcggcgtgctcaatattttagtttaatatagttttcatcggcgagcccgggcggacggtggctctagccccgttggaatactaccgcttgatagtttgatttaggagtacttcttccagtttgatttacttggcgcaatcacctaagaacgaccaaaatataaaagtgttgccaaaacttgataggaggaagtcgttttccttttaacaacagagctagggctgtgttcggaagtatcggttcccaacacgcacagtacatacaaaaaacggaacggtccattagcacatgattgattgagtattagctatttcttttcaaaataaatataattttttaagcaacttttgtatagaaactttttaaaaaacacatggtttagcagtttgaaaagcacatgcgcgtggaatacgatggagtgggggttgagaaccctgggttctgaacaaagcctaagcatggctgtgaggactcttttttttctctctttctcaatcacacaaaacaaattaagtcgactaaaaacaccttttctatcctggaaactggaagaatgtctaatccaacactattgctgtttatattaacctttaccattcttactgaacttattttgtacctagaaaattaagaataggtgtctccatatccaatcaacatgtaagtcccctgtttagtaagtcccctgtttagtaaggatagtctggtttactcgatgataacacaaggttatgtacagccctgaacacggccggatccgtggcgcaatggtagcgcgtctgactccagatcagaaggttgcgtctttcgattcacgtcgggtttaataccccgatcaaatatccggattatctttttattccttcgttttgatgttcacgcgataagcgagttaatgctgatacgaacacgcctttcttttttcttcgttctgatgtcactacagtggccaagatcacctgtgacgtatctaaatcctcacctttgacggtttcgcgcatggtcagtgatcagtggtcactggtgagtccagtcaccttttacgggtggccgaccatcacagatgacacccacctctgacgagcaagttactagaaagccgttagaggtgttggtctccgctagccttatgaccagttgggaaccgtcataggtgactcatctctgacggccctttaaataaagaccgtcagaggtgatggtctccgtagatagaagctgtcacaggtgatctacatgcaacggccccgaaagtaaaggcccgtcacagataggtcacctctgacgggcctttatttgcgagtccatcacaggtgaggtaaccattgacggattttggttccgacccgtcactgattgacccatcgacaacgaaacaacgatactttgaacttcaagtaatctagctccaatattttctcaactctgccatagtattgatcatgccgatcaccgtcactagcagcctcgatgcgtaacccactgttctgcactgtgtatttgctgtcttgctttaccgtgtgaaaggtgtatccatttatgtcatatccttgccaggtggtggcactccattcaggaccctatgacaaccactgaagtgtttcactagacaagttctgcaacctggcaattcggttattcagccactcgttgaaagaagacatgtgcttgtttctgacccaactctttaatcggcctaggatctcctatcggagaactaaaaggtgttcgtcaacgtacggcaccatctcagtcataagctgcagtaccttgaaatgtgctttatcatataccttccgatccaacctaacaatcttccttccaatagtaccaacaccatcaagcctcccttcgtgatgagatcgtggtaatccaattgaaaatgtttctgacatgtagtccacacaaaaattgatgacctctttggtggtgtaactctcgatgatactcccctcggggtgtgaacggttccgtacataacccttaaggatccccaggtacctttcgcaaggatacatctgcgtcatgaaaactggaccacaacactttgtttgcctcacaaggtgcacggaaagatgttcatctagtcccacaggaaagctggaccacaatttctgcctgtagttcatccagtccctcggaatcaatgatcttttggccgattgcatggaagaaggagcacaaccgctggatcgtgtgtcgcacgcacaaccgctggatcgtgtgtcgcacgcacaaccgctggatcgtgtgtcgcaccttaggaggcaaaatattctttattgcaacgagcaacagctgtgttgtaacaacgtagcaatcatgcgacttcattcctaccaatttaaggtcttgcagtgaaacgaacctactaattcttgatgagtaaccagatggaacctttataccactcaaacatgttagcaaatcaatcttctcttctttcgagagagtgtagcaggctggaggaaggtacaccctgccggattccttggttatgggatgtagttccgagtgaacacctatgtcttccagatctcgtcgggcgttgagaccatccttggtagtacctgggttaagcagtaatcccattaaactcttacatacattcttctcgacatgcatcaaatctatgccgtggcgaacttcaagatccttccagcatggtagtctccaaaatattgacttttttttccacatgctcttctattttgtcttttgtttttccacatgctcttctgttttgtccttcgacatgctcttgtcttttgtttttccaactttcctcttttttccaaactcgttggttattcccatcactaagttgtgcacctctgtccctgttagctctgccgggggtccgactgtatctttgtgtccattgaaattctttctcatattcctatacgggtgataccttgggagaaatctcctgtgacccatgtagaccatcttgtgtgaatgcttcaaccatttgcttcttgtttccttcatacactccaaacacacccatttccctttcacagtttggccagaaaggttgccaagggccggataatcgttgatggtacaaaacagcatcgcatggaggttgaaatactcttgtgcatatgcgtcccatgttcgtgtgccctcatttcatagcctttcaaagtcatcgattattggtttaaggaacacatcgatatcgttgccaggttgtctcggtccttgaatgagcatggcaagcataatatactttcttttgaagcacaacgagttagtaaggttatagttaacaagcagaactggccatgtactgtgacgactgctcaaatcaccaaatgtattaatgccgtccgaacacattgcgaaacgcatgtttcttgggtcatttgagaattcctggtaaatcctatcgattgtcctccattgtactgaatctgctgggtgcctcaacattctatcgactttccgttcttcggcataccagcgcactagctttgcttgttccttattcgcaaacattatctccatgcgcttcgcaattgggagataccacaccacctttgcggggcctcccctctttgacttacttccttcaccttcactctttgctcgtttgtatctagatgccccatagacagagcagacatccaagtcagcatattccttgtaatacaaaatgcagtcgttcggacaagcatgaattcttctgacctccaggcccaacggacataatacttgcttcgcttcatatgtcatctgcggtaaattgttcccctcttgcaacaggtcctttaacagctcaagaagttctgtaaaactcttgtcggactagccattactagccttaagcttcatgagttccaacacgcatgacaacttgttgtgcttcgacttgcatccatcatacaatggcatctgacaatcttccatcaacttactaaacttctcaaaatctctgtcgttgtcctctgcgtcttcaatgtcatgcaacattgtagatagaaattgagtgtccaaatctatggtctctccacctaatggagaaggtacgaacatgccttctcgagctgcggcggtgttctctacatcctgatccaacacttcttcagccgtggcatcaggcgcctcttgctctccatgcttggtccagcagatatatttcttcatgaatccattcgttatcaaatgagaatacacttctgagctatcaaggatcatcttttcattcttacagtccctacatggacacaatatgtacatgctcatcctactttttctgtcattctccgcaaatgtgacaaattcattgaccccctctctatactctatggacgaacgatgaacatggtacatccaactacgatccatttgaaatcaacaacataggaagaaaaatatatgatgatcgatatattgagaatgaagggaagaataatatgttttttaccttgaattttagcaaaaattcgccccccttgcccttccaaccgatttgtgaatagtgaactactcgggatggaaagcagttggcggtttggggggtatttatagacccaacacacctcaaacgggttaggtaaaaaaaagcccatcaaatgtattggtcatacctttgacaggcttcaattgagttgcccgtcactggtatcccttcacttgtgacgggccgggaaacaaagtcgtcacaggtggcggcccatcacctgtgacggcttataatgcctcggcccatcacatgtgaggggataccagtgacgggttggaagcaaaactcgtcactgactcacctgtgacggattttcctttcggcccgtcacaggtgaggggatacctgtgatgggccacggccggatgcctcaccgttgacggcatcccttattacccttcataggtgacggtcactagtgaccaaatcgtttgcccgtcacaggtatcccgtcagaagtgtgagaatctggcgtagtgtgagccaagtagccgtcttttctttcgttctaattttttcatgttcacgtactcccgcatggcgtccaacacaagaggagagcggcgaggaatggcgtgacacgtcgtcgaaggggagaagtgcagggacgcacagtgcagtccaccaaagcgagggaggggagggagagatcagcggcgcgaacagatctccgagcaggtcaccggtgctgcaggtgcagcaatgcgtgcaaccaactgatgaagagacgagggcaacctgtggtagctgtggatatctgctgttgtttctctctgttgttctttcatccggccggtacatctcctggaccgtttgatttgaaccggtacctcgagtacttacctcaagttactgcttcaaggatgataaaaaaactcattgatttagaaaaacgatctcttttttatttctttcccgccgaatcacgtacaaaggccgatctcctctcacgtccttaagtgctatgcagcacagcataggagactcttttgggaactaaaactctccgtcaaaaacataaaaccgattctatctacaattctaacaatggtataaaaaagacaagtcttcctcgtactttggtcataattttttgaatacctgccatgaaagaaggctataagcactatccttctcctccatccctatcgctggcagccttctccatgaaagaaggctacaagctcccgtcatcgtcatcgccaggatgactcgggaggagcctgtggaaaaattgggcgctgacacttttaaactgttgtttctcttaaattatttttccaaatcatgattcaattgcaccattaaattcgttgcaattaaatctttaaaacaatttcatacatggatatattccgatgaaaagttttttttaacttactattgaattatgtttaaatgttgcacgatgttccaccaagtatatcggaattgtttcactaagtagatcgaaaatgtttcaatcatttaaatcggacgttgtttcacctaatataataacaatgtttcagcaaataatgaaagaatgttccagttcattgcgacatttgattcatacatagtgaaacattataagtgcactaggttaatcttttttggtggaacaaaaaatgaaacgaattcccttaatagagggtttatgtgtgtgatttgttgcaaaaaatgtttcaattcactgcaacattagatctatatatagtgaaacattgtgagtacactaggtgaaacatttttggtggaataaaaaatgaaacgaattctattaatagagggtttccaaaatatgttggtgatttgttagcggtgttgtcacagaagaaacattgctctcctgcttcggcaccggcaacattagtggtggggagttcaaactcaaagccatggccgttggtggagaaagattttctcgcgacggacatggtgttgtacggctgtatatatcggtcgaggctatccgtgttcgaggcaatctgcccatcagttgaaaactcgagaacactttaatcatcactttttttattcgcctttttccctaatatattagtagtgcaaataaatagaagttcatcgattgctagctttccatatataacttcgtatcagtatgattagaaatacatattagcatggacatgaaattagaaaaaaaaggatgggtatggattaatggataaatatatgtataggcgtgaacatcagagtggaaaaaaaaggtgtattcgaatcggcatgaacagaacatcagaaggaaaaaaaatgcgtattcctatcggcatgaacagaaatacgcttatcgatgtgaatataaggtaattaggaaataaaaataatacggacattggatcggggtattgaacccgacgtgaatcgaacacgcaaccttctgatctggagtcagacgcgctaccattgcgccacggatccgtttgtgttccaaacagcacataatgttatctgttttaacagttatcagatggctaattttaggtacaaaataagttcagtaagaacgtaaacagcaatagtgttggatcagtccttcttccagtttccaggatagaaaaggtgtttctggtcgacttggttttgtgtgattgagaaaaggagagaaaaaaatatactaccttcggagtcttcactgccctgcttagctctgttgttaaaaggaaagcgacttcttcctatcaaattttggcaacacttaaatatgtgttgttatagaagctagggaaattttgatcgttctcaggtgattggctcaatatgtgtgcgttgatcaaaagtgccaagtaaatcaagcaggaagaagtataaccagagtatcaaacggcagtactccagcaggggtggagctaccgcccgcgcggctccattaaattttaatattaatttttttgtcaaataaattgataagaattttacagcaaatattagttatagtaatttcaggctcaaaaatctttctaacttcgtcacggtacttcagtatattaccgaagaacttcatgatccaaacataaagactaaggctccgatcgtttccacttaaaaagtggattaagttttggatattcatggtacgttttttaaacggctaaactgtgtgttttgtgcaaaaattttctatataaaagttgttctaaaatatcatattaatctatttttcaagtttacaataattaaaactcaattaatcacatgttattaccaccccgttttgcataaaatacttaatctttatcttcaggagattcaaacaccacctaaagagggtgaggtaaaaacctaatctttttcatacttctggcttgtgaaaatctctataagtgaaagtataagtgaaaggtaaaactcaaaataaagcatcgttgaaccacgtcattagagaagcacgagccgtcggatgcaacagaaatacaatatgaaccgttggatcataaaaaaaccgttgtgaaaaaaatggtgaaaggttaaattcttcgggaatattcgacacgttctctagcgtaaaaagttaaattcttcgtgagtctccaacacttctccaggatatacaaagaaacacgagtcgggagagaaaggaacagagtggagattaagaaacgaaataaataatatgggagaattctacgctgtgtagctctcctcctccaactccaactccagccggggctgcgttccagaccaccagcccggcccggtaagaaacgatcagaacaccagagaaacacgataatggagttcggaaggtggttgacatatccggcgcttcactgtccaccaccaccaccaccacctgatgggaatggggaagcacggcagaggtaccttcctgcttcctccgccgtatccccaccagggttggaaatttcagatttcgttcacctccgttacgatattattttgaccgaaattttttattttttcattcatttgggtaatatttgttcaaatttaactaaattttacttaaaatttcggaccaaaattttcgaaatttcggtgaccccgatataaaggcctcaaccgatagagtgaacccttatccccaccgtaaccaccgtctccaaatcaagtagaccagagcatcgccatgaccagatcggtatctactacatcttgtccctcctcctgcaggtagccggagacgccaccgtgatcccagacacatcggtgggggaacgggcatagctcggcactccatggcacgctgctagaggccccgaacaggacagtcacgccgcctgcatctttgctgttctcaacggtgtggcgcgcacctccctctggcttcctccatgctagccgcacagatctgggttgcttctgctactgcggccatatcacagggagaaagtttttgagtgagcagcagcaccgtgtgagagctgattgagaaagaaatagataagggagtgag

SEQ ID NO: 22829 - DNA, 6621 bp, Oryza sativa
tgagaatattgcactaaaaatttaaattttgtttggcgcgcagctgatggggcgtggctaggggtgggcagaaaaagaccgaaccgaaaagattgagaccaagaccaaaaaaatcgagattgagaaattcagtactaggcagtgaaagaccgaattttgttcggtcaattcggttattctcctcgggtaactggatagaccgaaaagaccgaattatcaaaaaatgtctaaatacaacctacaatccactatatttaataggattaaactctaatttttatatcctacttgttctaggcatgcaacctaataagagtctttattcataagggcttacgaatttttttaggattttctgttgaaaatttccattatttctttgcatatatgaaaatgtcgttgaatttcggtcaggaccgagaccgagaccgaaaaaacctagatcgaatttgtcggtcctgatatttttacgctgaaattcgatcttcacttttcaaagaccgaaaaagctgaaattcgatcttcacttttcaaagaccgaaaaaaccgaaagatcgaagaccgagaccgaaattttcagttagaccgaatgcccacccctaggcgtggcgctgtggtctttatctatgttttcaccatctagtgtaaactttacaaataacttattcccctgcttaatataaacaccagattaatttggcttgtcttgttttttaaaaaaagggcccaactttttttttttcacaaaatagccaagctgttgttaaaaacgtggctgcagatttgacatttcaggcgcacaagattcagcaaatccgttttctgaaacatgtgattcatatgtggtgcgaatattggcccgtcaattgcatctcctagctgtaaaatgtacttagaccattcccaaaccagatattagacataattttcataatctctacatcataaaaaaaaacttatactagatactactattacaatgcaaacaacactatttcatatttaaatttaatgctacttatctcacatgatgtcttggatattgtgtagaaaccgtgtttcatgcaagacatgttttcttctatttcattatttattcacttgccacattatttttcattttagttggcagcttatttaatgctatagacaccattctagtcattgggttgggaatgatctttgtactccctctgtcccattttaagtacagtcatgattttccgtgcacaactttaaccgtccgtcttatttgatttgttttttaaaaaattaaaaatataagttaagtataaagtactaattataaaaatattttaaataagatagaagattaaaattaaacataaaaaacttatagttacacctagattgggattactagtcttgtgaaacaagaaaattaagttagaaactgtaattaatttcgttgctgcgacggtcgctggtatatattaccagcctgtggtctctctagctcatgcatgcatgcgaacactatggagctcacgcctttgctcgccgtcgtgctcttcctcccgccgccactcgcggtggcgcacatggcatggacggccgcctcccgccgccgcggcatgcggtgctacctcctggactacgtctgctacaagccggcggatgacctcacgctgacgacggagctggcatgcgcgattgtccagcgcaacgagcggcttgggataccggagtttcgcttcctcgtccgcctcatctcccgcacgggactcggcgaccggacctacgcgccgcggaacctcctcgacggccgcgaggagctcgccgcccagagggattcggtcgacgagatggacgcctgcttcgacggcgccgtcccggagctcctcgccaggacggggctccgggcccgcgacgtcgacgtgctcgtcgtcaacgtcaatggcttcttcccggagccctgcctcgcgtccagggtggtgcgccggtacggcatgcgcgaggacgtcgcggcgtacaacctctccgggatggggtgcagcgccacgctggtcgcggtggacgtcggccggaacgccatgcgcgctcggtcgccgcggcccgtggtggcgctggtggtatcgacggagtcgctggcgccgcactggtacgccgggaaggagaggaccatgatgctggcacagtgcctgttccggtgcggcggggcagccgtgctgctcagcaacgacccggcccaccgcggccgcgccaagatggagctccgccgcttgtgcgctccaccaccgcggccagcgacgacgcctactcctgcatcatgcagcgcgaggacgacgatggcctccgcggggtcagcatcagcaaggccctccccaaggccgcgctccgcgcgttcgccgccaacctgcagcgcctcctgccgcgcgtcctcccggccatggaaatcgcccggctcgccgccgacctggcatggcagaatctgttgcagcgccgccgccaccgagggcagaccaagctgaagatcaacctcaaggcaggggtggaccacatctgcctccacgccggcggggtggcggtgatcgacgcggtgaagaagagtttcgggctggaggagcgagacgtcgagccgttgaggatgacgttgcacaggtgggggaacacgtcggcgagcagcgtgtggtacgtgctgtcgtacatggaggcgaaggggaggttgaggcgaggcgacaaggtgctgatggtgacgttcgggtcggggttcaagtgcaacagctgcgtgtgggaggtggccggcgacatggccgacaagggcgcgtgggccgactgcatcgacgcgtacccaccggagagcaagcccagcccgttcttggagaagttcgcttggatcaacgacgaagcagccgatgaatcctcctcgccgttctagaggacgtgagacgcattaattggcagtaggagtaaagcgcaacccgcctcgagtatagtttcgctataaaagctcacaaacaatatattccaagataataagggtgtgtttagatcacaccaaacttcccccaaactctaaacttttcatcacatcaaaaacttttctactcacataaactcccaactttttttccaaactaccaactttctccaaacttatccctaaacttcggaactaaacacagcctaacttggagaagcaagctttgcccaaaaagccagcttgcaggggaagcaattttacagtggaaacctctgtcacagcctgattttccgtttcaggatttataaattatttaataaattattaatagaatttatattaaatgttcattaatttacaagtgaagttaaatgtgggaaataaaatttcctaaatttagagcatggatggatttaatttttattaaattctccatgattaattatactctctgaaattttctcggatttttcagagctcaattcctaaatgatacaaagaacagctcagtaattagttaatcaattaatgatctaattataattatgttaagtgcttttcttgtttaaaaatccttaaattataaattgttgtttaaaagaaattattagaaataatcttaaaagcctaaaagagaagatctaattttaatttaataaatctcaatataaaagtgagatagataaaattttgttaaatacttcttttgtttctatagtttctagatttttctaggatttatttgagcaaaggaagcatttttaataaacggaatatcatttcatgaataatttaaatagaaaaatgtttttaaatccttcttttggatttgggccgaaagtcggcccaagtctctcccttcccctcggcctgctcacgcccgacccaagccggcccagtccgccaccccagccttgccgcgcgccgccgatctccttccaaaatccggccgcccctatccttctccgatcaaattgatagaggggaaatgatcctcgggatctcctcttccttttcttttttggaaactttggctaatttcgtttggaaactgacggatttgagctcgattcggatcgatttttctcccttcaaccctagctttccatctccttgccaccgccgtgggcctagccgctgccccctagcccctataaaaggacccccgggacctcctcttttcgccgccaccttcgccctagcctgccaccttctctagcgtcgccttcgcgtggttctttgcgtcgctgccgccggcgggtgtccagtcgggcgccgccatcgcttcggtcgtcgccgtcagtcgccgtctccttcatcagtatcgcgaggtcgccgccgtcctcgtcccgtcctccgtttccgccgcagatcaccggagcgccgccgacaccatcgacccgaagctctcaccgtcgacgtcggtccagccacgccgcaccgccgttgcagccgccgccttcggttgccgttgccaccatcgggttcgcgaggaggagaagaacctcggccagccctccgttgccgctgtttcccgccggagcaccaccgtcatcgccgacccgaagaccgccgccgcctcgacctcgccgctgtcgtcatccgtcgtcgtttgccgtcgtccaagtgctcggtgagttcgccgcgtcgccctctacccgttggtgccctccgtttgcgccgcctcgccgccgttcaccgtcgagcatggtgccgagccgccggcgatgacatcatcactgatgtcagcgctttgtcagccgtagacccgtggtagtccggatcgatctcggtcgtccgattcggtcaattttaggtcaattagatcttgggcgttggatccgtggaccgcttctgtgaacccggtttaccgtggactgtccttgatgacgcaaaaatctcttttccttttaaaaataatactttattgcgtcataattcaattaaaatctatataaatgctttaattcggtttaatgtttaaaaattcataactaattcattgcaactcggtttaatgtggttcaagttgcaaaagttgtagaaaataaagatctatatagtaaaattatccataaattgtgttaaatttatttaatcctttaattaggtttaatcttgtaaaattggtaattaattcatatgaagtcagaatgaggccgttcaagtctcataattcatctaaaatcatgatctacatgtttgtttactttatatgtattgtttatttggagtttcttagtatttttcctcgttttgcgtgttagcttgtcgtttccgtcgtttcgaaggttcgcaagtgcgccggaagtgttcaagaagattaattgaagaccgaatgttgcaaggcaagtcacacagatcccaaacacaattcctttgagcatgttgatcctatatttaaattctctatttatttcaactgtacatttattttcgaatgtcaccgggtggtgtgaacccctattccctttgttatggccaatttgcattgattaccctatttcttgattacctcgggttataatttgactagttggatttatatattggttcaactagatgtattagatctaattgcttagccatgcttagaaacattagcacactattgggataactaatgtttcaccattacttaatgatgtacatggtaaaggtagctcacgatggtcaatcgtgattggttaattaattaatgtgccaactaaaacttgataatggtgggttgtgagcacatggttttgatggtcgtgctcataacaattaaggaccggttcacgagtttcggttgtgaaacattaaccgtgccaaccacaagccagagtgggcaacggctggacactttgtatagcaagactcattgtggtgtgccagactgagaagtggcggagataagcccacgggggtcgttggggagtctatgccttgttttatatgggggtgattatgatccaggaacggtgtattactttgagttgagttatgcgaggggtcttgtcacaatcactcgccatggtgacgtgtctgcgcggacacagtgacatgacagtgggttgtgtcttgtgggtacagtggtacatctctggccagagtaaaactattcgaatagccgtgcccgcggttatgggcgggtctaacaatgtctttcgtgattagtcccacaccactcattaataataatgtgataattgatggcaattaatttagctcctagtttggaatggtacattcctggtttggagatagatctgtacagccgggtatagttgttcaggatggttgggcctgtgcagcatgggtgtgttgttcagcgttgattaatattgatgattaattactctactgttttacaattattaactgtttgctaaatgttgcttttgcaaatgagccctatattatgctatcctttggtatccttgtgcacttgcatatttgctgtgtggcttgctgagtatgtcatatgctcaccttgtaataatcaatcaaacctcagttgaagttaagttgcgaaggagaagacgtttgacttataccccagttgagctacctgtgggagtggagccagagcttcgctagaccgttattccgctgctgttttcttttcatttgtaagtatgtaacgttgtattattgatgaatctgtatattaaattgtcagtttgtgtacctcg

SEQ ID NO: 22830 - DNA, 3320 bp, Oryza sativa
accccgaggtccaatacggtgacaaacactctccgacacctcctatcttccttcttgtagcttgttctcaaatcagaagaaataaagcttccactctcgcccatattttttgtgtttgcctgcttgtgtgctgatgagtagaatagaccgatttctcaacgtcatgagcatgagtctctaccgaccaaaataggtaaacatgtgagaaaatcagtttgttttgatcattttgttctttacatgcaaatcatcattctgctatagttgaaataagcataagaacatcatgataattgaagtaccatcctccgacattatcttagcaattaatacccagtggtggagctggagaggaattgaggggggtgcaccactttgttgtgcataaagcgggataaaaataatacttaagcaaatgaccatataacgagggattgcaatttcggtaattttggacacctcagcaagtgattatctcggccaaaatttttgtttttctcaaaattttatgaagttgattaaaatttagtcaaattcagttaaattatgttaaaatatgccaaaaatcctgaaatttcggtaaaaccaaaatgagtgaaattttagccgaaatcgaaatcgaaaaccctgcatataacacgaacaatttaactgttcataattacagcaccaaataagaagcaataacaaaatgcttaccaaaatatagcgaaagaagttaatatcatatacactcaaatcatcagcccacctgagtatacttaaatcacctacagcataaaagtgagtaaaatcatcaaaatttgcaactgaataaccgtcaaaaaataatttaatgttagatgcattttcctttctcgttgattagggtggtacttgtgaacatattattggtattttgtggtgatttgcttttgagaaatttctccaatacatccgcctgtcatttatagccatgatgcaaaaggagaatagcgatataataaagtcatagccccaaatatgttaatagtgctgtacagttttgcttcaaactgacaaatcctaaccctacaacctagaaaattaataacaacaaaataatttcaaatcttctattctaatttcactaaattcgcttgcaaagatcagattaattaatttatagaaaaaaaaatagagctgaggaaacaagacacaagaaaatttttgaggtcttgcctgttgcgctcaagatcttgaagggaaagaaacatgggtggaattaaatggcgtggcagctagcgagagagacggtcttgggcacagccagaagatgaaccactccggtggcgaaactcatggccggaggtgtccacaccagttcaccgagaggagagaaggaaaggggaaaaagatgcgaacaagaaccacttgccgtcgtgcggcatctgaaacgataaaaaggaaaccctccatccaggcgtgcaaacatttgctcttcctaaactctatgggcctgatctatttagaacgtcgttcatgggccagtaatgtcttcgttgttgttttgggctgatcgggggtacaccaactaggctcgaggggggtgcacatattgtcaaggtagggtggtaagcactaattttgtctttcggcccgggtgcctgggaaccccctctggcccattgggctccgcccctgttaatacccgataacatgaaggcggctctaacactattatcgtccaaaggcttgagatgatacatcctctcagtacttctcgataacacgatggcagctctaccaccgttattgttcaaatgctagagacgatatagatgcttgaagcactggcatggcaacttattggacggctctgctgccgttgccaccaaataacggaggcaaacaaaccttctgcatggccctgaagtgttgttatggatgtccttcgattctataggcatcactcatgtgggcccttgatgtcactaaggtcagctctgctgccaaggatcatgggcaaatagtatggaagtgttgcctggtactattcatttttaaaattttgcacaatatgcatggagtttgtgctcatgtatgctcctcattttgtgttatatgcttactatactgtttgcatgatcttttgtaacattttattttaattttataaaattaattgccaagcatgaaattaattttctagcatgattgataatctctaatcaagcaatatgtaatcttgaagattacttaaggtaatttgcttggaaagtttccatggaaaattatgtggtaatcctgaagattacacacactagtaattctgaagattacgcatgaccaaatttatgttgaccctgcacattgtatttacatgttgtaaataccaaatgatgtcgcagacatgtcagacatagtgaaaagtaattcgccacgcttaccttggatgacataactacctcacttgggcattggatgttgagattgaccacaactctatgggtctcggtcatactattatgttgcccgaggctggcacaaagtagcctaggaaggccattgcatttcttgcgccaccatctccaccaagaccggaagtctgagtatatgaccgagaaagatccattggtattatggcaatccatgaatgatcatttcgactagcaaggatcaattgtgccccaaaggcacaacatgactggatcaccctacgcttccaagactacaagtctatagtagcatataactctacatttatgtgaccagaagttcactgacgctaagatgatcgagaaaaccttatccaccttccacctaggggcagatctacagtagtatgagcggtgtcaggcaacatcaacgactttcagcaaaacctatagcaaaactgcttattcatatgttataacactatgacctaagcataattaacatactatatgacactaatagacacgttatgacaccaacgagtcgattttctggatccgccactgcttccaccccaacaacatggagttgcaataacaatataggaactcaaagtactctatgtactctgagcttatcttagtactacttcttagtattgctagttgtagaaatgtagaatgaggttcttttaatgaatcattccactcgacctactgggtctatggcagtgtctgaagtacaagccaatgatgatggggggacttaggtgaacgaatggggccacattgagaagagatgcagggtaagggaagtatcatgtccaagggtaagagtaagggtaagtcctaaggtaacgacgaactcaagaaggttataggtgacacatctgggggaaagcaggataactgctacagatgtgg

SEQ ID NO: 22831 - DNA, 10824 bp, Oryza sativa
atgacatgcttatcgatgctaaggatggtgcagacgtccatatggacgatgatgaggacaaaccttcttgaagaagagaatggcatatttaaggacctgaagtaatctcctatatgtctcttatatgtgccctacatgcgcagaacatgtagaacttagtcatgaataatgctcctaaagagcatgctaatacaatattaagaaaaactagatattttcataccttaactaagaaaactaaaaatattgtgaccattgcaggaagcaatgctcatatagtaggcactgtaagttctaatctagttctccctatggatactctagttcaaagcgtaccctcttaagctataatgatatctgtgcaaacgatttccatatagaaaccgaggttgagcaagatgttgaatatcttctcatatccaaaatagatggatatcaaaagcaagtcgtgtaaagactcccttcatcgccatcgggttttgaactacacgtacataaaacccactaaagaatatgatgaaaacaatattttgaaacccaaagttatttaaaatttggcatgacgggttgggtcatcctaggttgggtatgatgagaagaatcatcaacaattttgctggccacattgttgaaactagagacttccctaatcctgaagattttatttgctttgcttgtgaaaaaggaagttgatcactagaccatccctcctgaagattagggatgagtcaccttttcctggtaaggatacaaggtgacatatgtggacctatctagcccctgtcgggacagtttaggtattttatggttcatatgtatgcttcttctaggtggagccatgtggtcttgttgtccataggaaccatgctttttcaaaactaattacgcaaatcatcatgctagaagctagcttccctaataaccgcgtacaatccatttggatggataatactggtgggttgaggtcaaaggctttcgatgattattgttttgccatgagtattaaggtagaatattataccgcatgttcacactcaaaatggtctagctgagtcctgttggtaattcttatggtcgcagataaaatccgcaagacaataccgactaactcaagtagtaccagccaaaccgaacccctttttttttccaaaaaatcagaccggttttcttttacttagtcaagaacctgtcaacgcgtcaggaatccagatcaatccgctttccttgctccttctgcttgcctcttatcctcggctcgactgacgccgccgcccagtgcctaccatgccgctcttccttgctgaccagccggcctttagagctactccacctcaccacctcctccatgctgccaccaaagacgctttagtcttgatgccgccacagtcctggaggaccgccacgcaaaggtgtagagctcccgctacactgcctaaactcaggaccttgccagtgagggtcgcagctgccatgggcttcccaccatgcagtgaggatgttgatgaccacgggctgactctgacacagaagctgatgccatccctagctgttggaacccgccacctccacgacctggagatggccgcgccaaccctctccactacctacaccaccacttgccgaagccgtgcactgctacccgagctcgtcgcctacaaatcgaacgcactcggagaaaatcaggttcaactctctccctttgtcacgcccgaaatttctatccaaaactccaaacgcttacatgtgtgtaaaccctcatccagaaattagccaaggcacacaataacaaattgataatagagtgcaaatatttatctaattaataggcgaatataaagtcactacacaggtagatagttcctctcaaacaaaaagatctaagcagcggaaattaaaataaaatagcgtagacgactccatcccacaagcagcttgaccaaggctacgcctaatcctccacaccatcagcatcactgtagaactcctcctctgatgaatgattgcaaggtgagtatatgacatactcaacaagccacacagcaaatatgcaagtgtaggggataacaaaggatggataatagtctcatttgcataaatggcatttaataaatacttcagaatttagaaaaatagtaaagtatttcattaaataatattaatccaacgctatacagcatacccgttgcatagacccaaccattctgaacaaccattcccggctgtatagttctatctccaaaccaggaatataccattccaaaccagaagctaaacaagttattaccaattacagcatcatttattatggtgagaggtccgagactaatcatgaaagacattgttagacccgcccataaccacgggcacggctatttgaatagttttactcttgccagagttgtaccactatacccacaagacacaacctcaacatcatgtcaactatgcatcgcgtacttaacaagtacccgaatagagattgtgacaataccctccgcataacacaattcaaagcagtgcaccatttctggatcataatcacccccttataaaacaaggcatggactctccagcgacccccgtgggcttatctccgccacttctcagtctggtgccccacaatgaaccacactatacaaaaggtaaagctgttgcccacgctggcttgtggttggcacggttaatgtttcacaaccgaaaatcgtgaaccggtccttaattgtcatgagcacgactatcaaaaccatgtgctcacaacccaccattatcatgttttagttggcattttaattaaccatcctatcatgattaaccatcatgagctaccattaatccatcattaagtaatagtgaagcattaattatcccattcatatgagctagtgtctctaagcatggctaagcatcctaattaatttagctaaaaccatataatgttccagctaatccaattattaaccaggtgacaaagtataggtaatcaataacaaagggcgataacaaaggcaataggttgcttccacccggtgacattaaaaaataaatgcaatagttgaatagaaacaatagctttaaacgggatcaacatgctcaaaggggtatttaggatctgtgtgacttgtcttgctggccttggaactcttcaaagtcttctcctgcaaaatcggactctccgaaaacgtcagaatctaagtataaaagagaaaaaaatcaccaaaacagtacagaaacaatcataaacagtacatgtggatatttttaacatgtagatctcaattttagaaaaaattagagacttgaaccaactaaatccgagctaagatgaattagttatgaatttataaagtttaaatcggattaaagcatttatatggatttaattagattatggagcaataaagaattatttttgaaaaggaaaaatgatttattgcgtcaacagctcgggttcacggtggactgggttcacataagcagtctatggaacagacggccgagatctaatctaatcaaatcgaatggccgagatcttgttggctgcaaccctcaattctcactctaaactcactcttggctggaggtagaagatgatgaatagtgaaatcaccaagtgttcgacacaggaaaagtttttggtgctgcgtagaaacgttgtagctttttcgcggtttacttctgtaatataaagcaaattacatgcaaactgaaaaatagaaaaaaaaaaaaggcaaagaccgggaggtgccatagtggactccgccatgcgcgccagtactccatccaacgtgcgccatcccccacgtcgaagcaccagcgtgatatgcatcctaaagacacgttccagaccatcgaggccaagaactcgcacacgacgctcacgccgcgaacaagcaggcgcgctcatgcaaaaaccgaaaagaaatgacaagctacagtgacatacatgattttgtaggcgcaggattattcctcctaacaatctccccttaatcctgacgccgagtgacaatctggaccacgcccgccttgttgcgaaattcttgaaacttgatgcgcgcgagtggcttggtcagaatgtctgccacctgttcgtccgtggagatgaactcaacctcaacttttttctcctctatgcactgcctgataaagtgatatcgagtgtcgatatgtttgcttcgatcatggaacacaggattcttgcacacagaaatcgccgacttgttgtcaaccttgaggatggccatctccggttcggtgcccagcacttcagccagcaatcgtgcaagccacataccgaggcaagccgctcctgtggcggcaatatactatgcttcacaggaggaaagggccaccaccttctgtttctgagattgccacgcaattggactggagccgagaaagaacaaagcccctgaggtgctcttccgatcatcaacgtctccccccaaatcactgtctgataaacccagcaaatgtattcccttttcccctgatcttgcaaagcaacatccaaagttcagagtacctgctacatactgtaggatgtgcttcactgctgccatatgattatcatgtggtgtctccatgaatcggctcacatagctgacggcgaaggcgatgtttggccgcgcgtgcacgaggtaccgtaggctgcccaccaggctgcgatacagagtggagtcgacggccatcctgtcactgttcttggtcagcttcagtctaggctccatggggatgcaagtcgaattgcaatccgccaacccaccgatctttagtagcttctgtgcataggctgactgattaatagtgatgtcgtcgtcgctttgatgtacctcaatgccgaggtagtagctgagcaatccgaggtcgctgatgcagaagagagagtgcatctctcccttgaagtgccgaatttcttcagcgtgtgcaccggtgatgatgaggtcatcgacgtagacaccaacgatcagacgcttggtcccctcgccacgagtgtacaccgcgtgctcggtggtgctccgtttgaagcccagctcatgtagacaggtgtctagctttgcattctaggctcgtggagattgacgtagaccgtacagggctcggttcaggcacaaaacacgccttggatgcttgtcgtcgatgaagcccggcggctacgagacatcgacctcctcctccagctccctattgaggaacgccgatttgacgtccatgtgatgcacagtccactcgagatgagcagcgacagcgaggagaagccgcatggattccatctgcgcaaccggggcgaagacttcatcaaagttgattccatggcactggacatagccttttgccatgagccgcgcctcgtgccagatcacggcgccggtctcgttcttgttcaacttgaacacccacttgaggtcgattggacacttgccggccgggagctcagtgagtatccaagtgctgttctcctcaatggatttgatttcatcttgcatcgcttgccgccaatgttcatcctgctctgcttcagtgaggttcgccggctccttcgcgactgccaggtagagctcgtccgaatcgagctccaccagcgccgtcgtgtcgaggatgttcgccatgctccggtagcgacgcggcgcgccctggtcatcatcgacgtttggcgtcgagctcggcggcgacacgaactcaactgggggtgtgtcagaaggtgttgccggtgtcacagaaggcactggtgacgtggccccgacgctgggaggtgggcttgcaggcgcagtgcttgaggccacctcttaatggacggtgaacgagtcgtctgaggacgcctctccttgttcgacaggttctccccatggccacgacgctgcttcatcgaacacggcgtcgcgcgtgacggcgacgcggttggcctccgggtcgaagacacggtagcccttcgttcctggctcatagccgagaaaaaccatcaccttgttgcgatcgtcaagtttcttgagatgcggcttcacctccttgacgtggacgacgcacccgaatgtcctgaagtagtgcatgtcaggtgttcgtccgtgccacgcttcgtagggagtcttatctggtacggccttcgtgggcgaccggttgaggatgaagacggcggtcgtcaccgcctccccccagaacttcccgggcatttgcttcgccttcatcatgcacctcgccatggccataactgtttggttatggcgctcgacgacgccattttgctggggagagtacggcgccgtcagttgccgagtgacgccctcattcgcgcagtacaagctgaactcgatggaggtgaactctcccccacgatcagtgcggaggacacgcagcttgcagccagtctccatctccacccccgctttgaagcgcttgattgtcgccgaagcctcacttttgcatgtcagcggaaacagccacatatagcgagacatgtcaccgattagcaacaagaagtactttttaccgccatgggtggaagacgaaatagggccgcagatgtcgccgtgaacgaggtcgagccgactcgtggcccggaacatcgccattacggggaacggcgctcgacgctgcttgccgatgaggcattcatcgcagacttgcctgacatgctccagctccggcaacccgcgcgccatgccacgggtggagagcatgcgcagtgcatcaaagttaagatgcccgaatcgagcatgccagatccacgcgtctttagaactccttgccgcgagggacaccggctgggcgaggtcgacctggagcacatataggcgccacgttccgcgacgaacgcgacacaacggacgccgccgttggtcatgaagggtgaggattccgtcctcgatcaccatcttgcacccaacctcgtcgagttggccaagactggccatgttgttgtggaacttggggatgtagtaaacgccggtgagcacacaatagtcgccgttcttgcaggcgaacagcacggtgctgcgtccctcgatccgcatgcgcgaggcatcaccgaacttgaccgtgccgtgcacggtggtgtcgaggttggagaaggcatcccgcgccccagtcatgtggttggaggcgcccgtgtcaaggatccagtcggggtcgaccggctacccctcgtcacagagagaaacgagcacgcgttcctcgttcaggtgcacctcgccattggtcagctcgggttcatcgacgggagcaagcttgcagacctgagccatcagcaacgtgggctcctcatcaccaccagcctgctgtggttctgcaacaaggagattacctgggccagcttttcgcgatcccgctttgccttgcggcaatctttggcccagtggcctagcttgccgtagtagcgacactagtctttggagacgttgcggcttcccagttgtgatggcgtggacttggtgtcgccaccattgccgtcgtgcccttgctggcgtgatcccgcgttggcgcccccgattactagtgtcacgagacaactgcccggtctgcttggtgttgcgagcaggtgtctccgtttccccgagcagagcctggcccgcgtcttccccgtcggaatccggatggtcgtcgatggtgaggagccggccagtcaggtcctcgatggataaaatcgtgagatcaatcaatgtttcaattgacaaggccatctgacgatacctgcggggaacaacacaaagtaacttgcgaacgattttctcctcggtgatgtcatcaccaagaagacggaggtcgctgacaaccccctgaagccgaagtgaagtcctcgactgattcgccgggcttgcatcgcatggactcccacgcttggcgtagcttctgcgcatgggattctttcatgcgatccgcgcccactcgcatggacttgagcgcatcccaggtgtccttggcgcatctcagccggcacagctcgcaggatggccgaaagaacctgacgatcttcatgaaagggcacgtcgccggtgtcgacagcttcccacagaccctgagcctgcaggttcactcgcatcaacaccgcccaatcagagtaattggaacgagtaagcgtggggtaggtgacagagcccccttccttgactacccgctgcacgacaagctgctggccgcgagtgcgaggaggggacggcgaatgctgtcgcccacgccggtgtggcgtgcaggactgaccacccacaagagccgacatggctctgataccaaatgttggcggcaaccctcaattctcactctaaactcactcgtggctggaggtagaagatgataaacagtaaaatcaccaagtgttcgacacaggaaaagtttttggtgctgcgtagaaacgttgcaacattttcggggtttacttgtgtaatataaagcaaattacatgcaaactgaaaaacagaaaaaaaaaacgcaaagaccgggaggtgccgtagtggcctccgccatgcgcgccagtactccatccaatcgtggccaagaactcacacacgacgctcacgccgtgaacaagcaggctcgctcatgcaaaaaccgaaaagaaatgacaagctacagtgacatacatgattttgtaggcgttggataattcctcctaatagatctgaccgatctaccaccggtctagggctgacgtggcgctgacgtcgatgatgacatcatcgccggcggcggctcggcacaccatgctcgccggcgaacgacggcgcgacagcgcaaacgaagggcaccagcgggtagagcgcaacgcggcgaactcaccgaaggctcagatgacgacggacggcaatagatggcaacggcggcgaggtcgaggcggcggagaccttcgggacgacggcgacggcgatgatccggtggtcttcggtggaaacggaggatgggacggggacggcgatgacttggcgatcccgacggcggcggcttgcacgcggctagggcgcggctggcggctggaggtggaagacggccctgacaggtgggccccacctgttagtgggagagagggggagagaggggcggctcggcttggtgggctggctcgggccgcacgcgcacaggctgaaggaaggaagggagagagaagggaaggttttgggccgactttcggcgcaaagccaaaagaaagattttaaacctttttcttttttaaattattcatgaaatgcaattccatttattaaaaaatactttcttggctcaaataaatcctagaaaaatctaggaactatagaatcaagagaagtacttaataaaattttatctatcccacttttatataggaatttattacttaaaattagatcttttcttctaggcttttaaaatcatttctaataattccatttaaacaacaatttataaatttgggattttttgggtctgacacccttgctttgtgatttgcttgattgcaatcccatggaagcctcactatatttattggggaattttcagtctgattcaagaacaaattgtagtcatcgtatgattccctttcatgtccaacgtggtgtcttcttttgcatgtctttgtccgcagcgatgttttactcgagccaaagttggcctctgagttcaagtccattactacagcatgaaccataaagcacaccttacactacctcatggcatggctcctatatggttatcttctgcagcatggcctcgacgtggatagcacgcacaccgccgtgacacctgacttcccgagcctcctttaccttcacgatatcccgcagagccttgcaccattggccaacatcgtgataacgaccgccgctgatgaattgatgcgtgctattgtgccaagcttagcagatgaaaatggcgtatccatgatcaggccagctagggagtgatgaggatgctagttcatgatcttccgataggtaatgataactctcgatttggtggaaacttgacacacacgatccggcttccgatcaacacgatccgaaccttgcaatcgcaacaccacatctcctctggttatcaaccattctgaaacccgatcgacctcgtcgagaaggctaatccctgcatgcgaatcgaagaacaaaagcaagaacaagatagatagcaacaccgttgcatatgaatgattaaacacttgaatttggggttcaacaaaccgatctagcggcgaaactgtaatggcagaaataatctaagaaaaacccgattgtaaactatgatggctactgaataaaaatgatttaggacgtcctagggttgccctaggacgcacacccacttgggcttaacctacgacacaattacaaggcccaagacccaaatcagattcggattagatgaggtatgtggcttgttttgcagattcccaacagctcggtgggaattttgatgtgggaccaacaagtactcatgagccctaaaattcctattagattagcggctagatccgtttgaaactgatgctgttaggaggcccgaatccgaatccaaaacgtgtagaactttatatcttgtcttctatgaacctaaagtgatgtggtgagatagaagtggacttggagaaggtcttggtttggtccccaatcaacttctttgatcatccatgcattccttacgctatcgcgaccgagaaaattaccttttcccgaacgctagtgtactaatccccgtcctaggaaaagccggggtacaccgaacaaacatgatacaaaaggcacatctttattatatcgataatatttacattattacaaaggcacttaaggcctgacaatcaaaaataaacagcagcggactagcgggcctacggctccatcttcacaggcgctcaactggggtata

SEQ ID NO: 22832 - DNA, 14014 bp, Oryza sativa
aaaatcacaaacatggctactcattctattctggagagatatagctggcattgttctagtgactacatcatccttgattggttctgtgatgatgtgataggactgcatattgctatcattcacaggagaagcttccttctgattgctgtttgaagcagatgacagtcttctgcttggtatcgccctcctgaggttgattgccctttgctcggcctggagtaggtcggggagagacacaacttcttccatcgatgacaattctttgctgaggctgtcggtgcagagaatggttggtgctgaaggtattattgctatgatttattgcagagtcaggtgcagcaggaggagcattggtgctgtggatgatatcgtcgatgttgctgttggagctaactagctgatgagacaatcgtagggttgttcgttggatttctgcggtcttggtcaacaacacactgagttggcaatccttgggcacatggtttgtaccttcgcacagaaaacatgtgaccttgcgggtgggacactcccctggtggatggtcttcttcacaataagggcagagtgtgagacacatgctagcaatgtgtccaatttctccacaacgggtgcatgcctttgattccatctcttcctcgccgacatgtcggggagactcatcttcatcatccgaggagacttgatctgacccttcactatcagatactctgccaccatggcttagaaggtgctgggtcaactgtcgtgcacctcgaaaggtatttcctctttgatgtctaggaatagttatccctgctggaggccattcggtgctggtaatagtcatcttacgtacttcttcttcagttcgcatcggtgcttttctctgctgattcttactcttcttgcctttggcttgcttagtacgtgaccccacgtggtacgaaaggctaggaggaaagcaattctcgggattcaatggattctctccattgggctctctactttgcacactaggctgcaagcttgacttggtgcgaggaggctggtttagcgatgtctgccctgctaaaccaaaggaaggggcttctttggcatatacccatggacaattcagggcatagtgtcctcgttctctacaatcgtgacaaaaggggacatcctcttctggcattggaagctcattgacctgggtggcaaatgctcgatcaaacacatactgattttggtcttgacttccaaccaatggtagctgtgaactaagcagcatgcttggaatggaccaagggtgtgccctggttaactctcttgaggccagtggtggattgagttgaaaacttgagttacttgaggcatacccgctgacattctttcctttttctctgttaaacatctgttacagggattgaggtgagagaggaaacaagccaggaaagaatagaccagaactagagacaggaccttaaaggaactaactcttcttgctgatgtgttgtttgtttcacgtattctgcaagttgattaagcaaacaacctagcatggttacatcacaacccgctgatgcaaaccacgcgctacacacacaagcaaggaaacacacgactaacgactctaccctagagggtggcttaggttctgtgacgggttctcaagatcttcactcctgcttcacagctggcttcactgcttcctccacttcgctagcggatcctgcagtcttctggagtttcggcagacaattgacgacatcttcttcttcacaaagctgaccaactagtactagttgaaatttgaagaaggaagaaagagtaaacattttgcaaatagcacaggggaaaggaggaaaaaggaactttcgcaaatagtttcatttataaaatatgtccttaggttttatccacttggcttatcctacagtcgagatggttctgataccagcttgtcgcgaccgagaaaattaccttttcccgaacgctagtgtactaatccccgtcccaggaaaagccggggtacaccgaacaaacatgatacaaaaggcacatctttattatatcgataatatttacattattacaaaggcacttaaggcctgacaatcaaaaataaacagcagcggactagcgggcctacggctccatcttcacaggcgctcaactggggtataagccaggactccacctaagacttcttctccaaagcttctcttactgaaggggggggaaaagattgagcaagaatgagtacaaccacagtactcagcaagccacaccggagatgcgtaattaatgcaagggagtacaaggggataataataagggttaagttttgcagtaaaccgcatttaaaagtcacttagttgcccaaagccattttaaaaagacgatcctagagctacacagtgttattaatcaaggtcgtgaaccctcacgaacctgccttaacccaaggcctacgatgattcagaccgaactggcaacccgaccctgggtcccagctcgtcccaagccaacccaggccaaccattccacattttagttgttaagcaaattttaagaattaaaacactaacttgggtacattgctaggcttgcccataaccgagggcgtggctattcgaatagattatactctgatcagaggtgtacatctttacccacaagacacatcttcctcacgtgtaaccacgtgccacataccaccacggtatacggacggaagacatgacatatttcccaacccatcctagccataaacaagagtaccgacccaaccccacctacggccggaacctccgggacaggtaggcaggattgagcccctagcagcaggacaccagccctgtgccatgacatctcgactaccgggccgcagctcgtgtagccttcatttgtcctagagatgtccatcgacccccgacttcgtccatctccatccgtgtacttttgtttataaccagactgagccacaaactaagccttacccactagacatgtgaaagtacggtagtgctttgcaacagaggcccgagcttaatccttatagtggccggggtgctacttcccacaactggcatgcacccaaaccccaccgaaaaacaggttttaggggctttgaaagaggaagagaggggtatgtccaattccaccataatccaacaattccataatgtccaaatgatatgagatttcccaaagtctaaagttataaaaccacctaatgttgcctaattaaccagcgaagcatctacctaagttcatactagtggaaccataaatagagtacccactagttggggttttattttcctagggtgaacaaggtaataataacaatagcaataataatgtcttaacaacgataaataggcatggctaaataaaacagtgataacgcgggaatttaaataaagcggtaatgcattaatttaaatcaacataattttataaactgggattcaatatgctcaaggatgatgtgacttgccttgctcgctttcccaaacgtcggcttcaacctccacgaagagcggatcttccgaagctgcagcgtctacacgaccaacggaaaagaaacggcttttactctaataaactccatataacaagcagaaacaaagcacaaaaatgggttcttgacttcttaaggaaaaattagagacttgaacggtccaattccgagttcaaatggccaagttatggccatttgaaggttatatgctctttaaatgaatatttgcgaatttcttcatttaaattttaatttaaaatcggatttattgcgtcagccgaggagaggggcgcgcggaccgggtccatgggagtggggcccacgcggcagcctcacggtccacggtggaccgggtgcacgcggcttacgccggccggcgccgtgggtcccacgcgtcagccgcacccgagggcacgggcggctgacagccgggccccacatggcagccgcggggcgcgcccgaaggcggcctcgccggcacagccgacgggaggcggcgcgcccgcgccccgatggtcgccgccggcgaccaccggcgcggcggagcggcgcccgagagaggggagggaagggggaagcgaaacggcggtccacggctcaccccgggtcgacggcgacgacgggaacggctaccggagcggaggaaggcggcggcgcggctcgggtcgacggggacggcggcgttccggcggtcggcgggtgaaacggaggggtggacgaggtcggcgaggacgcggcgaagccgaaggaggcgacgccgaggcgggaggcggtccggggtgacgacggcggcggaccggagctcggcggcgacggcggagagagagagcgacgtcgcgagctcaaatccggcgaggaggaagggcggcgagaggcggaaccggacggaggaggtgcggggagggtttaaatagagccggggcgagagaggctggccggggaagggaggaaaccggcgcgggaggtcggccgccatcaatggcgccggcgagattaggggagcggtttccaaccgaatccgagggagagagggagggaaaaatggggggaaagagagagggaatcacggggagtgatttccccctctttattgcgcgcggggacggcgggaggcggcgggattcgcggcggcggcggcgctagggcacgggcgaggcggcgggagcggcgggaggatagggatgacaggtgggccccacccgtcagcgagggtggcgggcgggcccgcccgtcagcggcacgcgcgcggggaggaggccgattgggccgcgggggagaggagagagagggagggaggtgggccgagccggcccaagaggggaaggggggaaaaaggactttttagggcttttctttttataaaaccattttaactttgtttatttcttaataattattatttgtgctctgaaaattccactaaaatttgagggctccttttagaccaaggagaatttaacaaaaattctccgggccacattcgaatttttcttgtacgtattttaatgtttgccaatttcttttcgaattttaattaattctattattccttttagaaaatgaattttatttcggaatgaatttatcaggacgtgacatacgctcggtctcttttccttcacccaagtaagtacctctgcaaacgagaacacacaaaactcattgtgtagcaatgtttgttcaaatatataacaagtaaatctaatatagaacatatgcacctttggttgatgaatacataaggtagtcatggttatatccgagctagttgtgtcctcattagggaggctgtcctaaacgttctcggcccaatttgtatgcttgtcatccatacactgcctatgtagcaatccaacacgcaccatcttgtcaacacctcctaaagcaacctcaaggatccacccacattgaccttcaattgaatgacatcaatctatgcggaagcacgaagccgagaaattgccatgtcgtctccacagccatcgaacgacccgaaggccacgtctagccatctctctatcgaacgcagctcaccgaaacgcccgtgccaccatgccccaattgttcgattccacctgttgagaccaccgatcacctccagcttcaatcaacctgagcgtgcgaccacacgtcttcctattgaatcgcccgcctgaagtttctgacccaccggttggatcgccaatcgcttccatcgcatcaacccgaacaccatgtctggttgtctccctgttgaaaacaaccactgaacggttcataccgtcgcctgaagtgtccgatccacctgtcaaaatccgttgatcaccatcgtgcaccaccatgcacacatgtccttccatggacataaaccacgagcggtgcagtgtgggctaccccatcgcgcctctatccatggacctcctgcaggctttgataccacttgttataaaactggcttcaatagcacatcgagaaccaaacgtggaagaaacgccataggatatccaaacatgataacaacactgaggcacgatatttgttaacaaggttcagctgtagcctacatccctgtggcactgattacgggtgctactctccgatccagcatattagagcatatcagagttacaacgactcacggccggacaccgacgatagccgctccctcgctctatgttaaggcccagttctttcccccaactttcccaactcacctccctcgcacgcgcacacttttcaaacggctaaacggtgtgtttttttgccaaaaaaaagttgctttaaaaattatattaatccattttttaaagttttttatagttaatacttaattaaccatgcgttaatctatcgctccattttgcgtgtggaggggaggggttcccaacccctccaaaagaacacagcctaagtcaccatatggtttcaataggttggctcctctatttaagagagatcttatgatagagtccaactcttcctctattcctaacacctagtacaactccaagttctaaactggaactaactttgtagacatatttgatgcgaactataacatttataatttataatttactattttttatatgtaaacataataataaacactaaataatgaagaattcactagataaaaaatagtttggctgtaactaaaggactaaagaagcactaagtatatgaaaatatgttatctcttgtactaacgagctaaagagcagttcatgagtcagctcattaaagtcacaagctaaacgtttagcttggctcgatttattaagattacagttcgagtcaatccgaaccaaactcgctacgaatcaatcacaagctttgagtttcttttccacccctataccgtagtaaaaaaaaccggacctacccaacggttgaaccggaaaaccggaaccacaagctacgagttttttttttccaccatgcctatacctgagtgagacacaattgtaacaatcggtactataaattcaatggccaaccaaatcctactttcgggtaaatgattgtccacggatgatcatagctaccccagggatttttcttaaaacatactactcataatgtccaaatcaattaattaattagtaagatttctacttatgtatagtatacatactagaatatactacaattgtcgatggtaacctttggtcaaatataacaaaattaagttccattcataaaattaaagtaaatcgatcagtgtcacacacagacaggaccggatggttggtggttttgcagctgtgcgcattaaatggtccagtgcatgcacacagaaggcattataaatgtaacttttatcccatgatgaaagccttctcttctgctggttccatctggccctccctttcaaccttttttcagaatttaattgcagagatttatttgacttggaatggactatatatcaggttcatccaatcagaaaaccgcggcggagctgccgacccgttcgctgaaaaagaaccttcttagaattaaactgccttttgcctttcatctccacaccctgaatctcttgtaaaagatataaaataaaaaggaatatcaaatttgttaaaatgacttgtttttaccagtacttacgtgtagcaaaacttgaaacatatagccagcctagtatattattaagatcatgtgtcagaaaagagccattatattgccttcgttgctagaaattagggttaattggatcaatgccactagaaatatgttattttagataaatgacagtactattcatgatatcggctacatgtcactcgaatttatagaaattgggatcatgccactctgtcgtattttccatcaaaactctctgtaagcctcaattgcacgtgggtaagaaagaagagggggattgaaggaagatggaactgacatgtgggtccaacgtctaggggtctgacggaaaatacgacggagtggcacggttctaatttcccaaaatttcagtggcacatagctgatatcatgaatagaaatgttatttatctaaagtggtatatttgtagttgcatggatccaattaaccgtagaaattatcattttctttagagaaattataatatttattaatattaaaggaaaagagctgaacctacatcgaatatatggaaacataaataagctagacatgtatatacatgaaatcgctttttttaatatatctagttccacacaattgcgctgggaaacccactattttttaacttaaaatcacaaagaaaccagaacagatataccactgcgttgccacaataaacaggaagatatatagaggtgtacgtgcatgctatcctccgtacgctactttcccgtcataaaatgatgattggtttatcgaattaaatttgaaaatatactttttttaatattttacgttcatatacatgcatggaaaatatttgtacaaatatacctcctccagacaacggtgacgcgggaccgaggcagtgcggctctttcattccgcaggaccggcggtcgcgcaggacggccgtgtggtaccacctcgctcccacatcccgagagagcggtagcgtggtggagggcagtaccgcgtgcaaccggcgcggtcccacgcgatggtgctgcacgaccggctcggtcccacgccgtacgaccggctcggtcccgtgcaacggcgccgcgcgaatggcttggtcctgcgcaacggtgccgctcgatcacctcggaaccacgtgcgaccgccctccaccacgctgcctttctcccggactgcgggagtgaggcgttgtcgcacggccgtcatgcgcgaccgctcactacaagatatcttatgatagatgacgcttcatttacgtcacaaacattgaatttttcgtcacgtttcgtaatctgtgacgctcgcgtgacgaaaatttattcgtcacctatcatgcgtctctaatggcattctatgacgaaaccttattttttcgtcattaatctagtgacgatccttctgtcgtcataactttgtgactctcacattcgtcattatctagcctaaaaaacgtcacaaaatatcagatggcccattaaaatccatgtattgagcaccctgtttatgggcttagcccaatggcaagcccaactacattttagcctggcccatctatgatgtagcatattttcagcccaattttattatatccatttgctttaatatcaaataataaatgggccaagtccattgcaaaagcccatgtaagccaaaacattacaccacaccattttcagcccatcatattatattcatttatattagtatcaaataacaagtgggctaagcccacataggcccaacaatcaaccacaataacaacaacccatatagcacaaaggttacaacccatatagcaactggttcttctgataatgcaccagaagtcttacaaaccgaaaaaaaacaaaggtttcaacaaactgcatgcaccatcaacaatcacctacaaggatatgttgtatcaaactagcaaagatatctgattctaaggttgccaaatgttcatagcatgtatttctgagatatttcaccactccagatggcaaaatcttcagctgcctccatcctgtacatttcttctcttgaaaatcaaccaatggcatcaatgtatctttaccctttacaagatcctactcaacagacatcattgtaagtacagagaaatgcagtactgaaatgcagtatacagtagagagaaatctaatctagttctcaacaaactgacatagtatacagtagagagagaagtacagagaaatgcagtactgaatgcagcactacaggaaagaaactcttaagttaattaatttcaggctaagttaaaactactggtgcaactgggtaaatttggaccactcatccaaccaaggattggaatcaaaccagcaagctaaagtctaaagggtagcctctgatcaggatcagattcttcaccagctaattgaagcagaaatgctgaatgctaaattgcttgcttctgtaaagcgcactgaactgaactaaatgaattacagtgtgaaagaagatacagtagaagtagcagattacttctctgttttagcagattagctcatggcaagatgtttagataatggaatagatatctagtttgattgccagatgcaagttgatctctttgcctagaaattgagcataaacatgcacagtgcatgatgcactcactctcattcatcagtcatcacctacatgaatgtaatttttttacaggcggttcttaataactactaattaaagtattggtgtaagcatctaatgtatgcagactgcatgccaatattcttagggatcacatgaataaaaaatcattttgaggtagcaaatgtttgtgttcaagaataggaaaaggtagtaagaagaaggtgggaaaatgacacttatctttctagtcaatgggatctttgaacgcagtggcacacaaccctctgtagcttgcaattcatatctgcaacagagcaactgcaagcttgcatccttctcttttcatcagaaacttacagctccaaatgaatatgcaatgaaacaagttcagaatatttagtctctacctatgtagcgtggcaagaaagctctgctacataaattgatttactttctgtaggacaggggaataagacttaagtacacatgccaagaattaccattgctgagaggagttgcaactgtacttagatctaagtatcatcatacgcaagtaaatgcatccagaacttgcagatcgagggaacagtgctaccggatgaatcgtaggatcaaccatcattcaacagagacagacagagattaaagcttactgttgtggctcgatgatggcggatgagtgctcgacccatcggcgctccacgggaagccacttgagcaccctcctgcccagcggctcgccgcgacgccgccgctgattcaccgatgcggcaggggactgcgacgcggacgcactacctccggacctccctgctgcccccgaagagaaggcccgacctcgcctcctccagccaggagggcaggccggtgatgcggcagatgcggcgtggatcggggatgtggctgcagcgttgacgaggggggagggtcgccgccgccggccgtcgccgtgcccgccgcgcgccgagctcctccgtagggcggcggatccgggcctcccgaggacggcgccgccggatccgccgccgcaggccgtcgccgagcccgccgcccgccgctgtcggggaagggaggccaccgccgcgcatgggaggtcggggaacgaaggccgccgccggtgccgagcgagtcgccgccgagcccgccacgccgcacagctcccgtcggtgagagagagagagagagaggagaggaggaaagagtgagaggctgagaggagaggagaggataggataggataaggacggtggaagttaaaatatcaggagaggaggggggagagaagaggagaggaaaaattttgaatggaggaggagggaaaaaatttaattttaaaatattaaaatttctaatcgaattttatcatactaaataaacttatgtgaaaaatttttttttgtcatttcgccatccgattttgatttaactatataaaatttgaattttaaaatataagaaaatctttcaggtagtaaatgatttcaaatggaaaagttgttaacaacaaaattgtataacttatcaagatctataacttttattttcatcatttttctatatgactttgtatgcacagtttcaatttgaatttcatattatgataaattcaaacgacattttacaagtactaaatgatttcaactgaaaatgttatcaataacaaagttctataactcatcaagacctataacttttatttgggtcattctttcatccgacaaagtgatttataacattattcacaaaatgtacatatcccttatatagtttataaactataggagagatatgtaaattttgtgaacaatgttactattactttgtcggatgaagaaataaccaaaataaaagttatagatactgatgagttatacaactttgatgttgatgactttttcagttgaaatcatttagtatttaaaaatattgtttgaagttgtcataatttgaaattcaaattcaaattattgaaacagagtcatatagcaaaattaccaaaacaaaagttgtagatattgatgatttatataactttgttgttgatgacttttttagttgaaattatttaatatttgaaaatgttatttgaagttgtcataagtcaatcaaacttagatggataaataaccaaaataaaattggtagatctcaataaattatatacctttgtttttgacaatttttttacataagttcaattagtatgataaaattcgatttgatgttttaatattttgaaattaattgagaggagggaggcaatatgaacttctggttggagggaggaggggaaggggcagcttggcggctgggccggctagttcagtggcgcggcccatggaggagtagaggagggttgcacagcttgggccgaggtgggccgagggagaaaggagggagagggaagggaatgggaggaggaaaaaggccgagcgggctggcggggatttgaatcagactttagtacggatttggcccaaatgacaaaggaggattgtttttagtttttctttttaataaattctgttaattgtttttttgcttagtaaatatttcggtgctttgaaaattcaagtaaacatccaggacatattttaaaccgaggagaatttatgaaaaatactttgggtcacaatcaaattttttcttgcacgtattttagtgtttgccatttacttttaggattttagttaattatattattcattttagagaataatttttaatttgggtgaatttatcaggatgtgacaattattttagggcgttacaaagggcagttcaagcattcatcaattttaaaaagaaaaaaacttatgataaacgaacattgttaggaacttgtgacgtttgttggttggtctcttatgacaaaataataacagtcacaatacaccattagacaagtttatgacgatctgtatttgatcttagtgacgaccaccccatttttgtcactaaccagcaccgccccatattaaacgtcataaaacgaaatggcatagtgacgaaaagcaccatcgtcacaaggaattcgtcacagaagatcacatttcttgtagtggctggtcacgtggaatgggaaagcggcaccgcctcggtcccgcgcgtccccgttgtgcggaggaggtatatttgtgcaaatattttccatgcctgtatataaacaaaaaatattgaaacaaaatttatattttcaaatttaattcttggtttatccccagtacgtgcatgatattttttttaggtgagcacatgtattaagaaagtagatataaatgattaaagaaaagttgtgaatttgtgattggttgagaaaaaaagtgaataaattaattggtaatggttgtgattggttgagagaaggcgtggtagatggagaaataactttattcttattttaattatattttaagatggaggtagcagcatgctactgctggagaagcttggaagctagaaattggcatataaggccatcaccaatgcggtgcttcagcccgtccccttagcgccggctgtccccttttccgtccgcgtcgttccccttggacggaacgcgtccctcagctagggaacgcgttgctcgccgcacctcgccagcttttcgtggggagacgcagccaggcgccacactgtgcgcgtgtgcagctcatgggcacggtgtcgtctccccccccaaaatttccccttgcaccctcgcctttctcgctctcccctcggtctcatcgcgccgcgcccaccactgccaggaccgccactgtcggccttagagagagagaagacatcgacgacagtgacaatggatccgcgacggcgacgaccggatccgatcgccgtgcgccgcggcagcc

SEQ ID NO: 22833 - DNA, 3562 bp, Oryza sativa
ggaggggaggaggtgcgccggtaaatgaggagaagagagagagagagagggaggagagaagagaggggttgatgtgaccatggttaccacagatgcaaccattgctcacatcatggatgaacaagatgacatcaaggtcaaggcctccaagtgctggaatccgatccggccacctgctgcattgctgatttcaaacagccgccaaatctccatacgagctctgttttcggcccgtgagtacttgatggaaagctctcggagtcctctttccaacggatacagcctcattgcgaaattccatcttattgagccgcaattgaagcaacaaggtgctgcgtcacctatcatgggcctttgggcttgtaacttcgtttgggaccctggcccaagtggggcccatgtggggtgcgccctaatctggtggagcacgaccctaggatcctcatggtcgttctcccacccctataagtagctagataccccttcagggttgcttgggttttgattaattgtaagtttagccattgctacttcgcttgcagcgcgcgtgtcggctataccgtccgtctgcttgttcggaaccccactttatcatgtatcaatttatctttgtgcgtcttgtctatctagtaattcagttgctttatatcttgttcttgcttgttctcgattgcttgcaggaataaggttgatctgcaccggcaagatcaacaacccacggagaggtgtatcgatcgctaaggcgcaacgcaacgtcttgtacggttgtagtcggatcgtcaacgtttctcccaaatcgtagttatcatcaactcaccgaaagatcgggccaaacaactgccttgagtgtcgagtggaactcagggttcatcaggggtagtatagtaaaatacctacgtaggctttttaggttaggggcactcgttaggctactagggtatctttcattgtgtggggggtttcccagagagtgccctcagttagtgagggtactcttagagtgtccctgattgtagatgccctaagaaaaggcaagaaaaaggatttgtatcattagatgttactacctttatattttaatatatgacgtcgttgactttttgtccaacgtttgaccgtttgtcttattcaaaaaatttatgtaattatcatttattttattgtaacttgattcgtcatcaaatattctttaagcatgatataagtatttttatatttgcataaatattttgaataaaacgaatggtcaaacgttggtcgaatagtcaacagcgtcatacattaaaatacggagggagtagatattactgtataatgtatgtctaccctaagaaaaggatatgatactacataatgtatgtcttgttagatgtttctgtaatgcaataattactgacaggccccagtggtcgtcccctatacctgaggctttcgttccgattaacgttagtataggaacagaaatcaattaattaacttcctcttaaactctctagccagctagcttgtaccagaagccatgtacaaccagcacgtacaattaaatacactgttacgatacactgtcgtctcagcacgtgaacatgtgtccagcttcctttcggttaattagggataaaaatggtcacgaaaagtttcgattgacagatgctcgtttttttttcattgaccgaagcatctgaaaaaggtaaataaagacgaaaaggacaaatttaataaatttgaaaatggaaatggaacgattatactattttaccgattacttccatatatacccaacggaaattactatatttataagataataagtttaatttattgttgtaagattgaatatctatgatcatactccctctattttttaataaataataatgttaacttttaaacacatgtttgactattcgtcttattcaaaaattttattcaaatgtataaggtataatcacgcttaaaatattttaagtgataaaacaattcacaacaaaataaattagaattacgtaaatttttttattaaaaagaatggttaaacttgtgacaaaaaaactaacgatgtcatctattagaaaacaaagatagtattacatataatcatgttatgtgaaatatatatatggttttacagttattcaaacagtacttaccggttaccggattctaatcgataccggcacgttctcattcatataattccgttttcgattttctgatattattgcagcttttcattctcacctctacctttttattctatttttaagaaaaatatatatggtcacagaaatggttttgatggtgttctccaacccatttgttgtctggataaacattttacgtagaactgtgggagtgagcccaaaaaaaaaaaaaccgtacgtgtgtccgtgctgctgattttgtccgacatggatgcatgcgtgcacatgtattaagctaagctagtagtagtaggcagcacagatcgatcgagcacgtacgttatgtgtacagcccgaaactagctggagtagatcgatcgatcgatcgatcaggagcaaatcatatcctttgcttccagtaggaatgtgcgtacgtaggacgatatatgtgcaggttcgatctccgtcggtggcgttggccgtctccctcgatctctcaaccacgaccggccggtggcgtaattccttcgatagggttccataccctctctgcaagatagagctgctaattaacatggtcgacgatccaagaagctatcctttctaattcgtcactccgattccacaagcaattaaagtcggtttagagttctcaattacatctttttgctaaagtttggatttttagatatagtagaaaaaagtgccagtgcgttgcaacaggtaaatgctattttaattttattgttgttatacgatttaactagcgtaaaattaattcactatgggaatctgcttggatattctttttagaaaatcataagctacaattaggagtccgtagttaatctcaagttagcacgcgagtttttttaaagaaatttattgtacgactccttttgtattttccaaattaaatgagcttaaaatccaactcaaatatggatatatatttctaaaagtcaacaaatttaaaaaccaactcaaacacggatgacgtaccaaaataccggcaaaaacatcttcaatttttataacaatagagaagagatagataagagaaaagatatagattaaaaccgaaacataaaagtaaaaccgactcaaacacggatgatgaaccacggaaatatcttcaatttttataaccgattaaacacggatgacggaccacggaaatatttttaatttttataatagtagagattcgattcgatgactgtatatgtagcttattttaatcttttctttcatactatatatttatgtcaagttttcaaaatataaggattttaaatttatagcaatttcacaacctattcaattcaccttaaccattcaaccgcaaccagttttcatttaattttgtgtagctcaattttaatttctactaaaacggttaaaaatgcttatgttttaaa

SEQ ID NO: 22834 - DNA, 8769 bp, Oryza sativa
aatactagtaaagattatctgattttaatttgagacgggggaattatttaccccaaagcacacaaagtagctgcgagatgacactgaaacccacccaccaaccaacacgcttgtcccttttcggtcattattggaaattaatgtaggagtagctaagcttaagcttgcttgtactatatatctagctagatagcgtgtttgcacatgcatatgctccgtacatataccatgaatccaatcagtttctttctgttaagcgacgaccgccgccatgcatttgtctgctagctagctgtccggatcgatcttcgccggcgagcgatcgagctaggaacacgaaggccagctgctaattaccttttatgtagctgcgatctacttcactctccattctctccgtcttactttaatgatcataaaatatctctaagtgattatattatgatttaatgtaagttgtatagttatacttactacgctacatatacttttgataatatataacatattttgaggtattttaaaatcttatgaaaataaacaagagcgatcaaattttgagcttaaatataatatgttaacgtcaattgtttaattagtttttatatatagaaaggttccggtaattacctcgaaactttaatatctcagaacatgatcagcgtatatatatatatatatatatatagtcggaaagaacttcattattctttgcatatatatggaccactgaaacaacacatggccggcatccgagaagtctaattaagagctaatcaacaaaacacacacatgtttttcctaattaacaatcgttgaaacccgtaaatatggctactaatttgactttattacatagatgcaattatgcatgcatgacacttaatgacacacacacgctagtaagactgatttggtctgcacctacgtactcgatcctttctatttcagttccaattcagagatgaactagttggctagcacagatcaatatccttattaccaaatttcaacatatataatattgtgaatctgtgatatgtgtgtgtgtgtgtatatctccatgcatgtacacatatgtactccctctctgttcttttatgtacgacgttggttaattcatttttgaaataattaacgttatatattaaagaagggaatagagaggtgtaaacttttaatttgtggagatgggtgggaaatgaattaatccgttttaatttacttagatgatgaggctgtctccgtcgacgtcgttgatccacgaatacttctccatgtaggggttggccgtgttctccggcgggtaggcgtcgatgcagtcggcccacgcgcccttgtcggccatgtcgccggtcacctcccacacgcagctgttgcacttgaaccccgacccgaacgtcaccatcagcaccttgtcgccccgcctcagcctccccttcgcctccatgtacgacagcacgtaccacaggctgctcgccgacgtgttcccccaccggtgcagcgtcatcctcgccggctccacgtcgtcgtcgtcgaggcccaggctgcgcttcacggcctcgatcacggccgtgccgccggggtggaggcagaagtggtccacgcccgtcttgaagttgatcctgggcccgtcgccgccggtgtgcttggtggcggtggcggcggtggcgcggcggcggaggagcttcttggtgatgagcagctgggcggcgaagcgggcgagctcggtgatggggaggatgcgcggggcgaggcggcggaggttggcggcgaaggcgcggacggcggccttggggagcgccttgctgaggctgatcccgacggtgccgtcgtcgtcctcccgctgcagcgcgcaggcgtgggcgtcgtcgttggcggcgatgttggcgcgcacgaggcagccgagctccatcttggcgcgcccgcggagcaccgggtcgttggtgaccagcacggaggcgccgccgcagcggaacaggcagttagccagcatcatggacttgtcggtgccggtgtaccagttgggcgcgatggactccgtggacacgacgagcgccagcgcgcgcggccgcgtcgccagcgtgttccgcgccaggtccagcgagatcagccccgcgctgcaccccatcccggcgaggctgtaggcggcgacgtcctcgcgcatgccgtagcggtgcacgatcatggacgccagcgacgggtccggcgagaacatggaggcgttgacgacgagcacgtcgacgtcgcgcgggccgaaccccgtcctggcgaagagctcggcgatggagtcgccgaagaagtcctccatctcgccgagcgagtccccgtgcgtgggctcgccctcccggccgtcgagcacgttccgcggcgcgtacgtctcctcgccgatgccggagcggacgatgacgcggaggaggaacctgtactccggcaggctgagccgcttgctccgctcgatcaccgcgccggccgcctccgtgctcaccttgcggtcgtcggacggcttgtggcacacgtagtcgaggaggtagcaccgcgactgccgccgccgcgccgccgccgtccacgcgaggtacgccacggcgtgcgccaggaggagcacggtgaccaaggcaagcagctccattgctgatctctctctccttctacaagtagaaagctagtgatgatcagtggtggtgttttggttttagtggttttggtgcggagagagtgtgtgtgtgtttatataggccggtttggtttgcacgcaaattaaagcggtcagagttgagagaaggtggcggatagtattaattaattttggtcaaaaaactaaatttaccctaaatagaaatatggattactgtagatgtttcctttcgcaatttggaaaatgacacgtcatgtgtgcaacttgccgtgccctgtttgtacccttgtcgttgttttgggtaataaactcgtgcagcgctatttgctgtatcctgcagtcatactcccaaaattagcatctttccaaaattagcatataagttttttgacatggtctttagtatataactttcataagtaatcatttagtcaaaagttataaattactaatatttatttttccaaatacttgcaagtctatagaagaagtaatgattagtactccctccactaaggggaaacgattagtcccggttaacaactccctttctatcggttgtagcaaccgagatgaatgaatcgggactaaagatctcgacttaaagatgcatagcaagtgaaaaaaatatgaagatgcatagcaaatgaaaaaaaaagaatcggaacgaaagatctcgacctaaagatgcatagcaagtgaaaaaaatatgtgggatgtgggattttaactcaaaatctctcaccttagccctcatgcgtctaaccattgcatctaaccattccacctactacacacatctaactagaataaaaatgcttttcttttgaactaaccctgaagacatctttagcaccggttggtacaccaatcggtacttaaaaatacatttttagtatcaattagtaacaccaatccagactaaatatacatgtttctatggacttaaacttttagaaccgatactaaatcatctttagtatcagtttttaatctaaccgagatatttgtgatattggataccacgtcaaaagattcgctctagtagtgctccattcacaaataatcatcatatatggtatgtatagcgataccagtatatccccgcatgccacttaattaaattggcatggatcaacattgtgtccggcgcatgcatcaagggtagtgtgccggccaatgatattgcttgatgtatacatgcatcataattacaattagttgaatggtagatagaataatgcatgcaaatgatcatttagtactgcaagaaaaacaaaaggtcacgtaggagagagtaccaaatatggtgatcacttctgaataacacaaaaaaaattatatgatgattatttgtgatggagggagtataagatttggtaaaactttcaaaattttgatcacatatgcttattctaaaagaataaatgatattatagaattatcttaatataaaattgatggtcaaagttttaaaagagtgatcaaatcatatcctaatcaaatattaatgattgtgtttgcgtagaggtagatcaaaaactcgaaactagctcgtggctcagaccaacttgaactcatagtcataataagtcgagccctattagacttttagctcacattagtactccctccgtccttaaatataagggattttggttggaagtgacacattctaattcaacgaatatggacttctaatccaacgaatctggacagttctgtccagacttgttaaattaaaatgtgtcacttccaaccaaaatcccttatatctagggacggagagagtactacagatcaccacatctcttcatatatactccctctgtctcgattttggtttgatgtgatatatcctacaacacgaatctggatagaactagaatgtatcacgtcccaccaaaatttcttatatttggagactgagggagtattatgcttcttgagtgtaatgcttagtttttttagttacttaaactccttgtgtttagttttcattataattagttagtgtttattattatttatgatataatggtaaagttgaaattataaaagatggtataaatgtgttaacgagctagctcgtgagccaagctgagttaagcttttatctcagttaaggttaacggccgaagcctagctacctggttaaaatgataacagtcaaacgaaccgagccttgacaggttgagcgagctcggtatccccctaggaataaaaacgatcagaagaccgagagtattggaaaactgagaaaaccaaacaaattcaagcttactgtagataaaattacaaaatgtctctcttttagccatgcactgaagttatagatttatttgaggagtcgaggcctctaaactatatatggatgatatggacggtaattatcgtattatgaaagcggctgtttccccctaaaaaaacatcagcatatattaaaatcgttttcatttggtaaatcgggttgaaactcgctgttcacctgggaaatatattttcgcaggcctaccacttaagcggttcgcctataaaaataccctttatttttacaggtggacctcttatgtgatccacctacgaaaattggcgtggatataaatagatatgacatggcagcaagattttttctaagtctcagctctcctctccctcaaccctctcttcgtcagctccctcaacaacctgcggcgggaaccagcaacggcgacacgcagaggcggcggggtcagcgccggcgagggcggggtcagcggcgggaacggcgaggcagcggggtcggcggtggcaacggcaaggcgcggggtcagtggcagcagcggcgaggtggcggggtcggcagtggcaacggcgaggcgcggggtcggcggcgacaacgacgaggcccggggacggcgacgacaatgctcgaggacggcagcatccacacccagcgcggctcccctcccctccctcccagatccggccaaaggggaggagaggaaggagaggtggcggcggctgcccctggaggtggcggcaggcggtggcggcggcggcgccccccacccccgacggcggcggcacccctacgcagttcccctaaccctagatcggctagaggtgggtacgggtgtgggtggggtggcaccgatttttttttcgtcgagatgattttcacaggcgggggactgggccgcttttgaccgcctaaaaaaaggcatttttctagtagtgtttctcccttcttattcagcttatctttgtgcggacgatgaattaggatacagagtaggggtgaaggagaagattggagtaaaaccgggtgagatgttcctagatttggagagcgaggcaggccgtggtccgtaatatactagtttggctggcatgaaaaatactatgatactgtagtttatagaagctatatgtgttgtgattgttaattactgaagtgaccaacgattgcaaacttcaaactgcaatattgactattgagactaatcttatcctactgcatgtcaaaaggtggctgacatccttcgtctggaatgtctcaagacgacgattatatactcccttcattcaaaattatatgatgctgttaattaatttttcgcataacatttaaccatttattttattaaaaataaataaataaatattatttattttgttacgactggttttatcataaaagaaaatacaatctttatatgtatactaattttttctataatctttatttttaactaatttttttaataagacagatcgttaaatgttacgtgaaaagtaaacaacatcttttttttttgagaaaaaacaacatcatttatcttggaatggagcgagtatatatttcccattattcttttttactattttccatgttccgagctctttcgggccccttcactctacagtaaaatccataagcaccgattagggtgcatgaaaaagtggccgacatctcatttaaggtagaagtcaaaacaaatattagatgatcctccaacctagctaattaagtgatctggaatgtcaattagtactgtgcatgctatagtttggctgttaattactgatcggcagtgtagtgatgatcaaccaacagttgcccaactgcaatgaaacgaatgctatcctattgctacggtaattaagcatgttaaaagggtggatgcgtgtcatcattaatttaatttaacgcaaaaaagttgaaacgggtcttaatttaatttaatttaattttgccgctaaaaacccctagccaaccttggtctaaaatgtcaaacttcgattatttcctatcattatcttttggttgggcaaatgctcgatgatagaagttattgcaaagaaagatacatatatggggcacaacttgccatgtctcttttgacaccactatcataatattaattagtgatcactcggcgattgttcaactagttcctcactacttgtacctaccacttgaacctcgttgcctttatttggaagtcacttaattaattggagggacaccgtacgagaattgtagaaaatccaccactatagctactactaagcctatatcaagaacagcaaataatcaccccaaaaccctcgcaaaaaaaaaaaatcaccccaaaaatatatacccttgcacaaaaaaaaagtttcaaaaatgtatacggttcacctcttgtttgtaaaactattttaagctcgatcttaattaagaacatgtccgtcctcgatctacacataaattactagttaattaacagagtgcatatactgccaagacgacggcgcccgcgggacaaagtgatcgatttcgacgtgattttgactctaattttctgttcgtcggtgcttctcagcgtttgggtctatcaagcgggtggtggatataaagcatatgcatgcatatgttttgcatgccacttgagcggcgcaaataattcatggacaagtttgaagcgtatgttgaattgttagccgactttaaaaatctgtgagcgtgccttaatttgagatgcatagcagaattgcgaggattaactgccgtattaattaggacgtatatctacacatgattttgatggtttacaactgcaaagatatatgattataaaagaaaaaaaattggaataataatttaggtagatagcagaaagaacgaataaataatagacttgaagaaaagtttccaaaaggttaaagctttgagagtatgtagatcatatgtcgatacatttttaagtaaaaatgagtcgatgttttccactactataatagagaaggaatgtagtgatgattattactccatctgtcccaaaatatagcaacttttacatagatggtccagatatgtagtactagcatacatcccatctaacaaaaaattgatatattttgggacggagggagtattaatcaaccttggtggttcattaacgtgcacatcacttgttgtttcactactgaagaaaccatctttggtcggttgcccaaaatccacaatagtcccggttcattaaaaaaaggggactaaaaagtatttttagtctcggtttataagtgaaaagggactatgtgatctttagtcccagttgataacaccaatcgggactaaagaacaactcatatcagaggctgtcagatccccagagatctttagtcccggttggtggtattaccaaccaagactaaagatcctaactttagtcttggttgttgttcccaacgggactaaagtttatgtagatctttaatcccgattagtgttaccaaccgaggctaaaaatcaatataccgtatataatcccttacacttatcctcaaaaatttctatctcctattcctcctctctctcacactcttatcctctccttatattcctattcctcctcctctctctcacactcttatcctctccttatattcctattcctcctcctctctctctctctcacagtacgtcttatcctctcttgttgtttctctaggagcagcgccggcgaggagcaggcggggcatggcggcggcctgcgcgcggtagcggggccagtgcggcgcggtggcgtgggcccgcgtgtgcggaggtggatgccgggagggcaggcggcctgcgtgcatggaggacgagaccgggagggcgg

SEQ ID NO: 22835 - DNA, 2572 bp, Oryza sativa
tttattgtgaacaaagctgacaaatgtgtgtactatcgttatggtgggggagagggagtgatcttctgtctatatgtcgatgacatattgatctttgggaccagcctaaatgtgattgaggaggtcaaggactttctgtccaaaagctttgaaatgaaggatttgggagtggctgatgttacacttgtgcaatcccactatgtggacaaggttttgagtcgctttggctatagtgactgtaagccagctactactccttatgaccccaatgtgctattaaggaaaaaccgaagaatagcaaggcatcaattgagatactcccaaatcattggttcattgatgtacttggctagtgcaacgaggcctgacatctcatgtgatgtaagcaagctgagccggtttgtttcaaatccgagagatgatcactggcaagctctggaaagagtaatgcgctatctaaagggcactatgagctatggaattcactatactgggtacccaaaagtactggaagggtatagtggctcaaactggatatctgatgctgatgagataaaagccacaagtggatatgtgttcacacttggagttggcgctgtttcctggaagtcttgcaagcagactatcttaacgaggtcaacaatggaagcagaactcacagcactagatactacgacagttgaggccaagtggctttgtgaactcctgatggatttgccggtggttgaaaaaccagtgccagctatcctgatgaactgtgataatcaaattgtgattattaaagtgaacagttcgaaggacaacatgaagtcatctaggcatgtaaagagaagactgaaatctgttagaaagcagaaaaactccggagtgataacactggactatgtccagacagctaaaaatctggcagatcagtttaccaaggggctaccacgtaatgtgatagacagtgcatcgagggaaatgggcttgagacccacttagagatgcacaatagtggaaacctgtccattgtgatcggagatcccgtgaatttggatggtgaaacaaactactgtgtaaccgagagaagagacccttaaatgggctcattttcatgatgtacttctcttctattttgtatggtaggatggcttatgcctcaatgtgttctgagtggctttcattaagcagagatgttaacctgcagaacatcttagaaggaatacacctatatgagttcgactactagtcacagtctatgagatatgggtaatctctagatactcatgaaaggcctagagtatgacttataagctccaaaccgagggaatactaacggttgcctagtatcagttatggaattgagtgaaacctaactgcacaagactgacaattcaaggcatagtccattgttcagttgtggttaggtgcagctccttttctaggtggaagttcaacttaactatcacgcccggaaattcacaagtaatttccaaactaatttgtgcattaaatcatcgtccaggaatcagccgaggtacacaaactcacaatttaatatacagattcatcaaattaactaaaacgataaatacttacttaagaggcacttagtcctcaccatgaagaaaactgcagcgaaaaataaaatctagcgaagctccggctccactcccacaggcagctcaactggggtataagccaaacgtcttctcctttgcgacttttcttcaactgaggtttgattgattattgtaaggtgagcatatgacatactccgcaagccacacagcaagtatgcaagtgcacaaggataccaaagaatggcataatataggactcatttgcaaaagcagcatttagcaaagagttgagaatttgtaaaacaatagagtaattaatcatcaatattaatcaacactgaacagcatacccatgctgcataggcccaaccatcctaaacaaccatacccggctgtacagatctatctccaaaccaagaatgtaccattccaaaccaggagctaatcaaattattaccagttatagcatcatttattatggtgagaagtgtgagactaatcacgaaagacattgttagacccgcccataaccgcgggcacggctattcgaatagtttactctggccagaggtgtaccactgtacccacaagacacagccccacaatatgtcaccatgcgccgcaataccaccacggtacctcggaaaggagctgtgacagtacccctcgcataacacaatccaccacaacgcaccattccttgatcataatcacccccttataaacaaggcatggactccccagcgacccccgtgggcttatctccgccacttctcagtctggtgccccgcaatgaaccatgctatacaaaaggtaaaaccgttgcccatgcgggcatgtggttggcacggttaatgtttcacaaccgaaactcgtgaaccggtccttaattgtcatgagcatgaccatcaaaaccatgtgctcacaacccaccattatcaagttttagttggcaaattaattaattaaccaatcactattaaccaccgtgagctacaattaaatat

SEQ ID NO: 22836 - DNA, 8807 bp, Oryza sativa
aaccttcagggattttctatgttattggggtcttcgtagtaatagtcataagggtcctcctcttgacccagatctgaaaaagggtttataagagcaagggtgagtatttacaatacttagcaagttatcacgggaatatgttatgcattgacatataatagggttctttgcaaaaagcagtattagacaatctaaaaaagttatagcaggaatttataaaacatataaactttagatttctaaccagggtaccatatgattcccggtactcaactccatgagtacagctattcgaatagtttcaaagatattctactgcagcagatgtacgctttacccgcagtccacgacttgctgataatcattggctttagtcatggcccagtattaagtcattacaaattatggcacctgttccatgaacttatatcctcatatgctctgaacgtaatgttaatagcagcaagaggagttctggcgttcccgaggtatttaaggggaactgatcgtttgacaccacgtcatctcgatcagggtttagaaatataccatatagtttatactcgagtatcacaaaccattttacctgtacatggtaatggttaaagttgcccttcgcggctatagttgcctcctgcgcgaggacttaaaaataagaaccactatacagaggtgccatattgccaattaacctaataactaggtctgtccccattctagaaactgcggtcgtacccgttcgttcgacataagtacctggtaaaacttatatcgattgagacaatactagccacccggaaatcaaccaaatcttacatattgtcccaatctaagtatgaggtattttaaccatattgtaagcaaaaataagcaatactaaattatctgggtttctatgaatgatttatgcatagaaaaatagaatattgaatagaaggctataaataaataatttgtaaaatataggcttaaatgatcaacaggtatatggtaacttgccttgctcgatgtcttgagattgattgatattatctagggtgtcagaggaatcctcaagacctagggttagacatataaaattcaaattcaaaaggagtttaaataaaatccaaaaataagaaaaaatatagaaaataaaataaaaaacaaaaatagcaaaaaggggcccaatagatagaggatgattttagaagaatattggtccaagtttcattgaaattggatctatattttaaaagatatgggcttctaaagtttgaaaatcaaataaatgtgaaatggcactatgtacaggtcccacctgtcagtctctctctctcttctcttcttctacctccagccgatccccaaaagcgggctagccacgctagggtttgggattgcagtggcgctagagggagaaagtggttgcgaccgaggaggtgagggagctagggatctccggcgacggggagcggcggcggtggaattaatttgatgtgtggacggcctaatggctagggcggcggtgacacggttagactgagatggcgatcaaggtgataagagttagacatggctacgggaggggttctagagcatctacgaggtgtctagagggattccggcagctagccaacctttggcaaggcgcggagcatagttgccgacgagcgcctccataggcggcggccgtgctcacgtcggcagctcagagggtggcatgatagtgcaaagggattgctaaaatggaatctaggtagtatgtagatggttgaaacggaagaactcaccgagatcggttgaaacgacggattgcggccggaaaaacttcgcggcggcgaagaacagagcagcgcgggggcggctgtgctcggcttggtgcgacgaggtaaaactcgacgcagagcttcggttagggcttactatgctagaacatggtagaatataggtgttctaaaggatatttagggcggaggatggatggagaggggtggagtcgatcgcgcacaaggtgttcgaccgacggatgatggtggttgatgagatggattggtgaagcagagcttctgggttgtggggctatggttgttgatgatcgatgatggacagggaaggaattggggtcctatttatagggctaggaggagcggatgagctccggcaccgtcatcgccatggatgagctcgggatttggatgaggcaaaggtggcaggggctgagagagggcggataaaatcaaattgagtggcgggaggccacgtttgaatacttaccggccaagtattgacttgaccgcggttggaatcggctggcgacttgttggcgccaatccgggtgcgacgagggtgaaaacggctggctcgggggtgaatggtttgaattgtgagaggggataccaccatctatgtccaatccaactgtgcggcgagaattggcgcgattcacccagggtagaagcgaaatcgcactcggtggtggcttggacgggagcgcacggcgtcgagcagcgattccttgcggtagtcgtcgtcccggctttgtcgtcatcaagattggtgcggcggcggtgggctgagatcgtccaacgggcgacggcgcgccaaggcggtcgggcacacgtaagcggctccgaggccgacgcgcggcgacacggcgcgcagcaaagtcggctgccagagagcacgcgtgaaggggaggagaaggccaactaaaccacggtttttgagtggggtgtggtcccctaggatcaaatctaaactttgtgcaagattggatagagttgggctgctctagttgggctaggcattctgtcgagcaccttgggtgcaatgaacagtaaaattcaggaattttggatattttccctagaaagatttgaatttaaactatggttttgaaaagctttcactaaggtttgaagtatagcaaatctccactaatattaaggtaagttaagaaaataatctatggtttgaattttgagagaatttgctcaaattcactaaggtttggaataaagggaataattagagtaaattggtagggctctaatacttgaaccaatttttaaataaaaaacaaatagatttttgaaccaaacaactttaatcaaaagccagcatgatgcagtcaaattttagtttaaaatttaaggatgttacacaaaggaataagttcacaccacctgatgacattcaaaaataaatgcacaattgaaataaatagagaatttaaatataggatcaacatgctcaaaggaattgtgtttgggatctgtgtgacttaccttgcaataattggtcttcaataagtcttcttgaacacttccgacgcactcacgatccttcaaaacgacgaaaacgacaagctaacacgcaaaacgaggaaaaagactaataaaaaccaaataaatagtacatttaaagtaaacaaacatgtagatcataattttaaatgactttagagacttgaacggcctcattctgatttcatatgaattagttacgaattgtacaagatttaattccaattaaacctattaaagataagactattccaaattaattaaacaatttacaaatgatttataaccaagataaaagattaaaacaatctccggaaaagattagattatattggtagatgacatatgataaaaaggactaatatgccattgaaaagagagaacagatttatattgattttagatggctgagattaatcttgaccgagtcgaccaagatcgaatggcttggattgatctggcaagcgaacctcacgagataccgactcaacgagtcaattctacgtgacatgagatcacccaaatgatcaaccgaaaccggcgaacggaaccggcggctctgaactaaaggacgactcaacacggatgaacgaacgaagcacgaggaacacctcattcgaacgaacgagtgaatgactcaacaacggctgtggctaaaccggtgggctagacacgattcacggtaaagccccggtacgacaaacgataggccggtaggaacctagggttgcacctacggctagacaactcaactaccgagcaacgggctaaagcggcggctaggtttaagcggcacatagttgcgacacggcacaacagcagcaacacagcaatgactaggcaattagcggcggcacagcggcggctactcgatgacacaaacgagagattaaaacctaaaccaagggaacagagatagaagtctcaccgaaccaaacgattggagagggagagatgacgacggcgacccggcggcaacacacggagacgacgacgatgctagacaaacaacggattagattgaatttgatctagggtttaggtagacgtggcaatgataagacagccaagcgagatcatcggataacggacacaggaacgacgatcaccggcgaactacggagcgacgataaaagggaggacaccgggaaaaagagcgcaaggcgacggtccttaccaacacttacgcgacgacagacggcgacggaagatggccagtgacaagcttcgaagggcggcaaggtactgtccacggcggctggagcggcggccggaggtggagagagagggagctcgcggggagagcgattccggcgatggcggaagacgggacttgagaggataggtagaggacgactagggggtcatttatatagccatgggagcccgggatcgagtccacatcgacgggaaaaactctggaaagtttgggatcttcgccggaaaaaggaaagattgaaccgtgaaattggaaaggatttccatagaaacttttggggatttcttggggaaattgtagaggagattgagaggattccgttctcgcaactaatttggaaaaaggagcaacggggaggccagattcggaaggggatcggcacggctgcagcttgggacggctcgggctctgtccagatgttgaagacaacaatgtagcgagagggaggacaaacagacttctatgcgggctgagaggaagggagagagaagagaagggaatgggctgaaaagggcccaagcggaggaggaagattttattacttttccaaataaattaaccaatgagatgatctttcaattgttaaaaatatttccaatgctcaaatagttccaagaaaattcttgaacatacttggacactcaaagtatttaacaaaactgtaaccagctcatttaatgattaatttaatatgtgaataattactgaaatgttctttgtattattaaaattagtaattgagctccgaaaaatccgagaaaattccagagagtataattaatcatggagaatttaataaaaattaaatccaaccatgatttatatttaggagtttttacttcccacatttaacttcacttgtaaattaatgaacatttaatataaattctaatattaatttactaaataatttataaatcctgagacagaaattcaggctgtgacattaacagtcttgaccgaaacactggtatataaaagctgctatggaatagagagcattctcatgagccttaaaatttggtggggattgttagatttaattggttaattgatccatttaaatcaattaaattaaataaattccaaggctcattatgctaggaattcatgtgtattcattctctaatgggatatcaatgggacgaggagttttgagaattaatccatttgattagtgaattggtaacttatatcaattactcctaattgatggatggttgatggttgtatagtggaggatggttcatcactagttgatgataattagttgctctattcctctttctgttctattggtaacctacatcaattactcctaattgatggttggttgatggttgtgtagtggaggatggttcatggctaattgatgagaattagttactctattcctctttctattccatgactcttactcttcatcttccatttctcatataaaatgagaatggatttgatctccctaagaagaagtgagacacactttcatccatttccaaggctgttgctgctacggtaatcccatcccgacgagtgtgtgctcacgcgttgggagagtaggcctccgaaaccacgtactgctgtgacgtttgcacggacaggcgggcgattaggtttttggggagcgcaatgcgcgactactcactattcgtcaacgtctacttcgtcttcaccaatatgtcgaacactggagacaacggcaacactggagacaagtagaaggaggttcctgtcaacaacaatagaggcaatacttcctcaaactccagcggaggaccattcttggggtataaccttcttacattatttcaattagaagttttactactaatgttcatcgcagtgtcaacattgcgttattatgtgattgttgatgcttcttctacgttaagcatgctcatgttgattacattcaccactatcactggatcaaatcccattgtaaatatcatggtaattatcttgttattttggattaaaatatgccgaattatgaccaaatttccaataaaccaaaaacctaattggtcattttcggtagttggctttgctacaacactgaaaccacatgcttttgatggttctaattataagagatggaaagcacatgcactactgtgtttgacagcgatgcaatgcttctatgtttcacggggcaaacgaagtgaaccacctctctctcctgaggaggaggctaagttcgaggcttcggattgtctgttccgtagagcattgatcagtgtactcgctgacaatatagtggacgtgtacatgcacatgccttcaaggaaggacatgtgggatgcgcttgaggccaagttcgaagtttccgacaccggcagcgagctgtatgtcatggagcagttctatgactacaagatggtcgatgaccgttctgtagtggaataggctcatgagattcagatgctggcaaaggaacttgagaacaacaactgtgagttgccagacaagtttgtggcgggtggcattattgccaaattgccaccttcttggtcggactttgccacttctctaaaacacaagagacaagagttcagtgttaccgatctcgttagctctttgggtgttgaggagaaggcgagggcaaaggacaactggggcaaaaatatcgagggaggttctactgccaatttggtgcagaagaagaaccctcacgcttctcacaacaacaagaaagtcaagtctgatgtcaaacccaaggctacaaccaattttaagaagaaaggcaagggaaaggcaaagggagattgctttgtgtgtggtaagcctgggcattgagccaaggattgtcctgagcgcaaggaccagaagtctgccaacatggtcattagcgagggcggacgaatatcgtggtacggtaaatttttacctacagttctctctgtttttcattcacctgattggtgggtttatactggtgctaatattcatgtgtgtgctgatatttccctgttttcttcttatgaggtcgggagaggttcctccatgttgatgggaaacgggtcgcttgcggctgttcatagtgttggtacggttgatctaaagtttactttgggaaagaccgtgcagctgaagaatgtgcagcatgtcccttcaataacggctctctactgtgtagagatggttttagacttgtgtttgaatccaataaatgtgtcgtatctaaatatggaacttttattgggaaaggttatgacagcggaggcttgttccgcttttctttggatgacatgtgtaataataataatgttgtgaaccatattagcgagaatgatgagtccaatgtgtggcattcgcaactttgtcatgtgaatttcggttgtatgacgcgcttggctaacatgagtttaattccaaaattcactttggtcaaaggttccaagtgtcatacttgtgttcaatcgaaacaacctcgcaagcctcacaaggcatctgaggcgaggaatttggcacctctagaacttgctcattccgatctgtgcgaaatgaacggcgtgttgactaaagggggaaagaaatatttcatgacactgatagatgattgcactagattttgctatgtgtatctattgaaaacaaatgataaagcattgcattattttaagacctataaagctgaggtagaaaaccaacttgaaaggaaaatcaagcggttgaggtctgatggggtggagagtatttttccaatgagtttacatctttttgcgaagagtttggaattattcatgagatgacgcctccctattcaccccaatcaaatggggtagctgaaagaaaaaaccgcactctaactgagatggtgaatgccatgttagacactgcgggagtttccaaggaatggtggggtgaggcaattttgactgcttgtcatgtcctgaataaaattccaatgaagcataaggaagtatcaaaattcgaggaataggaaaggaagaaattaaatctctcatacctacgcacatggggctgtttggccaaggtaaatgtacctatagccaaaaagcgtaaacttggaccaaagactgttgattgtgtgttccttggttatgctatccacagcatgagttatagattcttaatagtaaactctggagtacccgacatgcgagttggtacaattactgagtccaaagatgtcacattctttgagagtgaatttcccatgaaaaatacacctagcacttctagtcaagaatttgttttaccccatgagcactttgcaccgatagaacacaatgatcaaacgccttaggaaaatcctgagaaggataacatta

SEQ ID NO: 22837 - DNA, 901 bp, Oryza sativa
tggttgatggttgtgtagtggaggatggttcatggctaattgatgagaattagttactctattcctctttctattccatgactcttactcttcatcttccatttctcatataaaatgagaatggatttgatctccctaagaagaagtgagacacactttcatccatttccaaggctgttgctgctacggtaatcccatcccgacgagtgtgtgcacacacgttgggagagtaggcctccgaaacgacgtactgctgtgacgtttgcacggacgggcgggcaattaggtttttggggagcgcaaggcgcgactactcactgttcgtcaacgtctacttcgtcttcaccaatatgtcgaacactggacacaacagcaacactggaaacaaggacaaggatgttcctgccaacaacaacggaggcaatactgcctcaaactccagcggaagaccattcttggggtataaccttcttacattatttcaattagaagttttacggttaatgttcatcgcaatgtcaacattgcgttattatgtgattgttgatgcttattctacgttaagcatgctcaagttgattacattcaccactatcactggatcaaatcccattgtaaatatcatgctgattatcttgttattttggattaaaatatgccgaattatgaccaaatttccaataaacagtagggttgttactacaaatcaaagtaaaagaaattcctgtggtactgactgaaagtaggaacatttttttgggtaccgagctatgtgctatcgtatggataaaaaattttccatcataggaagcagtgtcttacgtcacagatgtgagcatctcccctatcaggcacgctatggaaatctatcaacctggcaatcaagaggcaagaaatagct

SEQ ID NO: 22838 - DNA, 14656 bp, Oryza sativa
ttgtcccggttctaaatcagtcaggcctagtcaggccccccgatatctttagtcccggttgataacaccaaccgggactaaagatcctatctttagtcccggttggtgttatcaaccgggactaaagatatcggggggcctgacaaggcctgacagatttagaaccgggactaaagatcatttttagtcccggttggtaacaccaaccgagactaaagatcaaatatgcccgctgtagccaccaaccgggactaaagatcatctttagtcccggtttttagtggaaccgagactattgtggatttcgggcgaccgaccaaagatggtttctccaccagtgtgtcataaacacattacgtcttggagtccgtgctgtagctggctacaaatttgcagcccgctgcttttctctatctccttttatctctttaaaatatgtttatagctggcttatagcctgctattgtacctgctctgagggattaacttatatgtacacggatcatgctaatatcttataagagcaggtacaatagtagactataagtcaactataaacatattctaaagagataaagaaagagagagaaaagcagcgggctatgaatctgtagccagctgcagcgtggactccaagacgtaatgtgtatatgacaggtgggactaaatattaatattatagtaaacaactattatatgaattggctattacattggctacagatgatttgaagctagtatttggctatactattaaacttgctctaaatcaggttgcagttgagtactgaaggttttttttttaatagacctgtgtgctgaaatggaccgatcgaaaatcagctataaatcttcttaatttcggcccataagaaaaaggaaatgcattgtgcttgaggttttttcctttcatgttctgaaaagtaacatatggatggcaatattcatgaagcgcagtgtgcagttatatatgtttactttaacataaatttatgccaataaatactcccttccgttacataattcttaatgttttctatattataataatatactccctctatctatttttgatagtcatatttccaattctgaaaaataaaacaacctatcatcttaatgattttctcggatttaatgcgtgactctctattcttccacacatgattgattacatgggcattgagaaatataaatattaataaatcgcttgcttatgagaaatggctagtagcatatttaaatggatgataaattgataagtagaattacttatcattggtctgtgtgccaagatgaaatatgactatcaaaaatagattgagggagtagaataaaacaatagatttttactatttcattactttataagataaatattatattatttatatagagatgtactatactacaccaattgggtgcgttataacgaaaacgcccacgtcataggtaacccccacccctaccgcaccccagccttaagctacagtcagatatataagtttgatctcaaccttattaaaacatcgagaattataaaaccgaaggaagcgtcgtaccgtgcatgtaataaagcaaggagacaacaatacgtgctggctgttctacaaaaccgtgtgctccgtctcatcattgtacatagctacatgcttagtgcgcatagttaggttatacgtcctccatctatctggggttggaaggcagcaggaatggtcgatgcattaagcaaacatatgttcctgtgcaaatccgttgttgagcatgagggccgaggcatgaaagctcaatggcacgaacacgaccgccatggatgcctccaccctttgcaccacagacagccaccacaagcacataccggcacccagtagtctgacgcacccatggcagctgcatttgcccaggagagttcacatgcagttgtgtaccgagcctcaaattccaaggtacggccctgtacccgatgtgccaccctgcagcacgcgagcatgccagcagtcggctccgcttcttccaaaagagagtgcacggcttgttatcatttcgttgaggttgttgacttttgaacattgctgatagaatgcagatatatatgttgcatgctcccgtcgattcggagcactaagtacatttattcgttgcgatgttagacatatcaaactattagaggtataccacgagaaccttcggccgggcctaccgaaacgaaggacataagcaaaggcatgagccggaggcaagcagcgacggtcgaagggagaacataagcgaaagccgtggtatcgagctgacaagcttcgccaaagatggactctgccggagggtcgtacggttgaagtccgcgaggcgaaagcccacgaagggcatgggtttcgccaagtatcgaaccttgccaggagaaggcccagcgggccgacacgccttccagaggcttcgccaaggactgggccgagtcacttggcccattaggagcccatacgagcaaaagacattgtatgcccataaagatattcctatcataagggcaaccatgtaaattcccctgtaaagcctaagccctaaaaggagagtctgtaatagggctataagtagtcccctagggccatgtaacaaggggatctgaaaaatttctactccctccgtcccaaaataagtgcagttttgcactatttatgttcaacgtttgaccgtccgtcttatttgaaaattttttatgattattatttttattgctattagatgataaaacataaatagtactgtatgtgtgactaaatgtttttaattttttcacaaattttcaaataagacggacggtcaaacgttgaacgtgaatagtgcaaaactgcacttattttgggacggaggtagtactaagcaaattgtctttacttccaaccactgttaaaagaaccacgtccttcgacgtgacacagttgtctattcgacaatacaaactaacaacactattgcaaattttatgaaaaagcccttgagacccagagacaaggctgaatccgcagcatcatagtttggttgtgtggtggttttttcactgaaagactagatgttctttatggatccataaataaaagaacggtaaaatttgctataggatacttaaaaacgtgtaattaaccgtgggacaccgtaaagatgtgaattagttataagacaccataaaagagcagtaattagctactagacactggaggcattattttattatttttccggcattgtggccgtgtgcgtgccgctgctgctgctatgcatgcttgtctctgcggtcggcgtcgtcagggcctttgctgcccaggctatcaacgccttgccaatgttcgcgtacaagccctctagcgcggtggagaaggatggcgttggcggcgccgcattgtacacggtgtaccatgtcgggaggaagaggacaagaaaatagaggagaggctgacatccttgacctacataatcaatcctccaaatcctggccaatagtttactgacatgtggtctgtggacccaatgagtttaaaagctcttcttggcccacaaatttctttctctctccatgttattcggaaataataaaataatatatccggtgtctattagctaattaccactcttttgcggcatcctatagccaattcatgtaggtgtcccacagctaatagcatgtttttttagcgtcttattgcaatttttgccatggagaagttatgagaaattagtggttataggtgaagttatgcttacaagtctttaacacttgggtttaaaccatggtaccttcaaatgttgtgcatcaggaagttatgagaagttagtggttgtaggtgaagtcatcaggaagtttggaatttaatgaggtttgagatttgttactttttcaaacaaagttaaaaacaattgttttgtaatcatttttaaatattatttcataatgaactatttcaaaactcaattctcagcctgttgtatataggacaatagtcacccgagaagaaaaaagcgagatcctacggttgccacggcagctgctttttctactttctagctgcaccgctgtcaaaacacatatgcaaaaccaggtaatgtgacacttttgtccattcgcgattcccctgccttcgttgttgctctccctaagccaccaaccaccatcaacccttccccgccctctctctaaaccgatgaaatcctcaagtctctatggaggatatgggtatacccacacggcgtgcatatccgaacgggtagtaggtaggctgaatccatataatatgtaatagagtaggacacggttatcatgatgtcttatattcaaagacagggcatcgagtcctggctagatgctaccatgtataaaattaggaaactgaggtcgtgcctagctaggttttcctcattgtaaccctatccgccaacctatataaggtgggcaacacgtctctcgaggacaacaaccacaacaaaatccacaaatcattacacttgatgaattcaatccaccaaacatgagtatggtattatctctcattgagagtgtctaaacctatctaaacatttgtctccacgcatcgatccggtttttggatctcggacgtagccacataaatttagtgccaatcgataacattgatagtctcccaccccctcccacgccaacaccaacttcgaaatctatctggtcgaggatgtcgcctccatcatctgatcagttcctcgatgtcaccggagatggaagaaaaagttatcgatcacaatgcatattagagaggaagaaatttgtgacacattgcccctaattttcatgcgaatatagtttaccatttctgtagtgacaatggccattttgtcaaaaatcatatttgtctcggttcgaataggaaccgggactaaagaatatctttaccctctggttcaaaagcccaacagtgtccaaagatcacatttgtgtaattattttttattttaagtatatttaatgctccatacatatgtccaaagattcgatataacgtttttggaaaaacaaattaggaactaaacaaggccatactttctgcactcatctatgctctctctcctcccttggcaagagtgccaaattcacggtaaagcgagagacagaggagatcagaaagagcaaagcccatcggaggaggtctaggcaccggaggcagaaggagtgacctggacaacagggacaaggagtgacctggacaacagggacagcccgaacttgagggactcgacaaggttggactccgacgcggcgcctagcaacctcgatttagaggcaagctgtgttggggaataaccctgtactcagggtgttgtataaactaatgtataaaaggactaaaatacccccaagagtatgttgtacatatatagcaaatcaagggcaaagatgtaatttcctgtacatatgaataaaatgagtcctccaagggcaagagagggggatctcccaccctcccaatccattccattcttagccatccaaaactccatcatcttcctctcatcctctctccagaagaattcaagcttgggttctctcctatggaggagggggcccttgtcatgcacgttgggttttgttccaacgagcgggatgtcaggccagttggtggagaccgatagacgacagggccgacacaacctcagacgttggaagcgaggaccagcagggaggccggctaatggagacgcgtggtgagaagctggaggcggcgctgaggttggcggagtagaagtcggcggggacacaaatcgaggcaatcggacggggacgcggccaaatgacggcggtggtgctggaagctgcggagtcagcgccaacagcctgatagtgacccaccccatgcacggaggttggggatgagcatagggcaccagcaatttgaggcttggaggtgatgcagtcggcccaccatgtcgacctgctctggtggggatctggaggtgaagtggcggcctccgtcctaatggttggaggaggccggccgatccacgcagagtggcggcggaggctttgtggcgtggaccccggtggcggctccaacgaggtcacaaaggacattgatgaggttgagtagaggggaatagagacgcaacgacggtagatcgaagcgggtgaagaggcggcgacgataggtctcaccggcacggatccgggaggccgttcccggcggcgagcaggagccccgcgaggtccatgacgaggaagatgatcaccagatcagttaatcgcgaagatgcatgctacagctgcttgactgattgatatgacaacgaagaaaaatgccttcggagatgacgacaacaagaacaaaacggtgaccgcatccaggaaatcgctactaccagggtcgatgatgcataagcatgacaccccggccctaaatcgtcagctctggtactatgttgaattgtagagcaggaagagaatactgcgtaactagataatagtattgagccccagagactgctatatatggagattccatgggtagagacaaagaaggtactagagataatgaaagactctaattaaatcaattatatcctaatattcctagctacaactaccatatatactcgaagtctctgtgtcgactatttcttctatccatcatgggcaatcatgttatgcaaagctctttgctctgtttttcctccttatgggatgtcttctgaattgtggttggaaagtagatttttgtcctttgaggggatatcccctcgttttatgcatggcattcaaaaagttatcaaaaaaattaaaaaactttgtcaagatagataaatatatgatatatcttttcacaaacatgagttaaacttcgacttacacaattcgaaacaaaaataacaaatttggctgtgaattacacgttctattcatagtcaaatttgttatttttgtttctacttgtataagttaaatttgaatttgcttgtttgtgaagtgacatatcacatattgatttatcctgctgtttttttcaaattttttgataacttttatgtgacatgaaaaatgaggacatatctcctgaagggatgatttgaattttcctgctggcatcgtagcagtaaatggctgtgaattctaaacatcaaaggttgcacagttcagtgtgagatccaaaaggtggattcagacttctcctgcatgggtataattgttgatataggagattaagtggtactcattagtgcattatgttaagtttatcttacaatcaacatggcagtacacgtgcaattaatatatatattagatcatcattcatgtctttgtctttgggcctgtttgaggagcttcagattctgacaaatagctgattgatagctagaaaatctggaaaactaggttttccaatattttatggattctataactgcagcttctcagaatctggacaaaaagctatactatttagggagcttctgattctaagagaaactgtagcaactagaagttccccaatcaggccctttgtttcaatggatgattgaattcacaagtttccaatatcaccttggaccgtattagttattgtgctgtaattcgtttgatttttttccccagcagaaagctcttttggtttattttaactccgactgaataacaagctctacccaccaggaaggcaaccaactaaattgaactggaataattaattagacttcgtgactttcactcgttgtcaggctccatgcttctcctctatataagtgtccaatccattcggtcccaaattatctttgcccagtctcccaccacttggcttgaaaaaacgaatcgtgtaaatgtaatcgaaagtgaactgcttcgagtaggaatgatcggcatcaggtattagtgcatctcactaaccagaaagaaacgctcaagatattttgctttctcaagtcactcccaaaaaactcgtggaaattaagcaccagcgatagaattactaaggtccacactgaaatgggaaacagatttgatgataatagtgtccatatatgttttatttcagtttagtttgttttcctcagcagtaggtaatggcagattttagctgcacgtacacacttcatctgctaatggccagcccgtacaactgtttgggcctcattttattgggcaagattgcgctagagtgattacttttttttttaaaaaaaagattacagtacacaagagaggtatactctctgccctttcaataatcagtggctttggcacttattacagtcaaggtcctgtgttagtgccttgtcgtcttaaaataatcactattaaaaaaaaactttcataaggaccagccatataggtgccagtttgacagaaaccgacacctataagccgtttctcacccaccatttctataaccggcagctataatgtttaataggtcccggttctttgagagaggcaccgaaggccctcccgccgatggtctaaaaaagtataggtgacggccgttcgtaaaaaacgggcacctattatcttaatgacgtgtgttccggcccgagacaataggtactggtttatagtaataagtgcgaaccggtattaccttgcgatgtgactcgcgtatggttataggtgccgagttttcatataatttcttcatacaaaatcatatgagtataaactttataccaaatgagctagacaagatctataaaaaaactttttgaattaaggtcgtttggacgtttaaaaatgtgttataatgtgctataccacacttgactatgtacatatgattagatgtacagatcgggtttattccattttccgaaaaggtaaaataaaagcaccacatttacaccctacatgttacatgttactatagatatgtagtcattccttattccttcgagataacttctttcctctttctcaatctccggttcgcgaggcagaagcaacgtgactagaaattcatcaacgcaataggaatgagtggtatttggaataaatcgcttagcaagattgtctcggggtggctcgtgctatcaaaacagtgttcattgttttcacataacgtcgaagtggttgggacttgggtgtccactaggcggtagcaataggggaatgaatgttgtgccatgtgtaaaatccggacgaatattaaaataaattcaaatatatttggtcatacttccagaataacaaaagaaaaagaaagacagcgttcaaccgaatagtcaattggaattaatcccgatttgatttaacagtgttatcacattttgatttttttttattcacagcttttggtaggattgaaagtgattcggatagtttctgtccgaccggacattttttcggattcggatagtttcggtcggatacatccagaaattttcgaattcgtatttttttcggaaatgaaaacgaatatgatattggtgatatccttcggaatcggataatggtcggatactatttgatattttccatcagatatccggtattcttataaaaaatatgtttttcttttctctacttaggtggaacaaaacaaaccatataaaaagatacaagagcaattaacatacaaacaaatggaaaaattcaattctgaaaaataaccactcaaattttcaaaaactttcaattcaattcttaaaattttaaaaacttttaattcaaaaattgaaaagtttcggttcgaattcaaaacactcaactcagatttgaaaaattcaactcaaattctagaacgtttaattcaatttcaaaattctcaactccaattgaaatgttcaaccaaaaatttaaaatattaaaccaattttcaaaaatttcaatgtgcctacgaaaatttcagtgatacacattaatttatttgtttcatgataacataaatttgtatggaaagtaagcacactattttctatctcccccttgcccttacaaatagagataaaatttgaaaatgttgatgttttgtttttgaaaactaatggctacatctcttccttgatttaagaagcttactttgaggagtcttgatatttcgataatcattcgttgccgtatttgtttctattcatattctctccgtatctgtattcgataatattcgattctattttcgtatccgggtttccgactccgatttcgattcggagaaaaaaaatatgaaaatgaatatgatagagcttgtttctgaccatattcgatccgttttcatccctagcttttggtgtgctctgttagaaggcgtaataaacgaccattcttttggatatcctgttctcatacgttaacgagattatgccttatgtgtacatagttgcccacactagtacacaacgggtttttctagacagcccagcccgaaacctattttcgcgtgcataagcctgcccctacatatctgccctaaatagtgtgcgaaaatctgattttacatacgggtagcgcatccgcacgcgaaaatctggttttcatgtccaggtgcttatgtcgtccacacggaaaaaaaatccaaaacaaaaataaaaattcaaaaaaaaatcaaaatctagggatcccgtcagcggcggcatggatctggatggctcgtgtgtgcagcggcggcagcaacggcgggatagggtcgtcatggggccgatggctgctcccagccacctcctcctcgttgtagtcggcggcggtggcagcggcgcagatccggccatcgcggggctggtggtgccgctctcggccgcctcctcctccttgtcgtcgacggtggtgccgggtggggacggggatggcaccgctcccgaactgcccaccgcccgctcccggacgctacccgaagtcacgccgtcacccgtcgagccgacacccgctcactgtcagccgctgcccgatgtcgcgccgccggtcgttggccaccgcctgatgcgccaagccgacgcccgcccgcccgctctcggccgccgcgcagccgtctgccctctcctggccaccgtctgctcacggccacctcccgcgccccacgcacagcgcgttcagtggaggagagaggagacatgaggaagagagagatgattgaaaataaaagggaaaaaaagagagaggagtgataataaaagggaaagggagagagaggaggtttaaaaatttggagtgagagggaaaagagaacgaggaggggagaaaaaaaatgtgaaggagagtgaatatttttgcatgcggtacacttaagagaccctatctgtgaaaataggctcattttgatgtgcgggtccttaagaggcctgcatgcgaaaatagaattttgcgtgtgtgccacttaaggagctgcatgcgaaaatgaagtacgtgaccaattacggtctggtttgcaatctaaagtggtgcttgtaacgaaaatttgtttttgtagtactgccgccctagtcatcccttacaaccttaagttgaactggttctgtttcaattgaatagaagagctgatagcttgtttcttcttactgcctgggtgagctgatgtgttccctctttcctgttggctgaggtcctttgagatatgataatggaggggaaactatagcacccaaatttggtttagtcgatacaggcccataatttatcgggtggccgcattgacttacggtagggccattgctattggcagcctgcaaaacaataaaggtcatgaagttttgatttcatgaagtttgaagaaattttggaagtgagaatatataaggactattacctcggtatcagagtcaacattgtccaggtcaggcgtagagtagtaattggtagggatgaggggggaggggggcaagcaggttttttttaacccacttatctcacttctagtttattttttcttttaaattttgtactaccatatgagaagtgaactagtaagcaggtttttatacgggtagcaggactatccacttgcatccctattccctagtaattggtagtggccaagctgaaaatatgggatttccactcagtccaccattggctgaaaagtctcgagcttgatgtgcacggttcaagttataagaattcgtccattgaaggtccttcgattgacgatattcaatcaaattccaggcagcccaggcccaaggccgtgcacgcccccgtatataagcgggggagatgtctccccccagtcgtcgctctcgcctcttgctcaaccctaaccctagccgccacatgccacaggccacagtccacagccatcggccaccgcctagcggcccaccgacccacctccgccgctaccccacccaccagtcctcctccaccgtccaccactcaggcgctcaccgattcgcctcccttcctcttcgtctctgatcgatgccttgcctgacgagggcgacggacggcgtcctgctaggggcatgagggccaccagtgaatccgtcaactctttgtctctggctgccagatcgagggccgcgcgcgccatctctttcccttttgttcttcttcgtcagatccacccccaagtccccaatatccctcttgagtattgtcttcttgtagatccatgagcttattgtcttcaacggcaactccggtgctccggcttattatatttgatgaagtaattgtgaatttgatgaagtgttgatgtatttgatgaagtgaatgtgaatttgatgaagtgattgtgaatttgatgaagtaaatgagagtctcatgagtttgatgtgctatgtacaatattttgtcaaactgagttgttgaagggtctatgccaagtcgtgtttggaccggcatgggcacgatgggctggccgtgccttagggctggtatggcacggcccgggactatttgggctgtgcctaggccgtgcatgtagcctatgggctggaacagcacggcccggcttgtttgttgggctatgccggcccgactgaccacggcccaggccgaacaagccccaacgatacatccgccaccgctctatcctacacatattctaactccaaatccaatacaaaattgaatacacaattttgtacctagcagtactagtatatttgacacattctaatatgagcaatgctacacgtactgaatttttcttactaaacttttactaataatcatctcaaccgtttgatttaagtaaatgaaagttataaaaaaatctagatgcactcatagcatgacacatcagtgttaataagaatataataagaaaaagttactccctccatctacttttgatagtcatatttccaaatctaaaaaatttatttttgataggtatatttcaatccaactacttatcatcttaatgactttctcggatttaatgcgtgactctccgttcttccacacaagattggctacatggacatcgagaaatgtaaatattaatgaatcgcttgtttaaatagatgataagtagaattacttattcttggtctatgtgctaagatgaaatataactattaaaagtagatagagcgagcagtacgtatagccttttccttctaacacatgtagcatccaataaaaagggagctattttaatgtgaattaatgttgataaatagtgcactatgcatgtaaagtagagagacgatgaataaatgcatgctcgctgctctacaaaattgtgtcatccgcctcatcactacacataaccacacgcgtagtggcgcatggttgggatctatgtcctctgtctatctggggttggaaagcaccgggaatcattgatgcacgatgaagtgagatccatccgagcaaatcttttgctaagcaagaatgccgacgccaggaatctcacgggcagggtgacaatggccatgcacgtctccaccctctgctctgacagacatccacggcgagcaactgccggtgcccagtagtaggacgcagggccggccctggggcagtgcggacggtgcgaccgtactggaccttcaaaaattaggggcctccaaaatatgtatactatagtattaggtctgatgggcttagagaaaagacagaagaccaatcgacgatcgagtatatcgtgactgcttgattgtattttaaacttattattgtgaaatttgttaataacaatgagtttttaaatattatcttattttttacggtgaatgggggctttcagtttttttccgagtcagggccggccctggtaggacgcaaaggaagggtagacagagtcgctgccataccagatgtgttaggcagctcgtgagccacgcctcgttgctgcttcttccaaacgagctagtgcacatctcattgagggttctgaagattgaaggcagcaggcagctatcaaacactaacaaaaatattggaaattttatattagttatttgaaaaactgagacccggaggaaagggtgaaaccacaatatcataggaaagtatgtgaggttgatagcgatggtaaaaggagaacataaaagtttagttgtacggtggtctttttttttttttttacacagaaagactaggtattcttaatcgattcagtcatccagtgaaaggaaaaacatgttcgagtaatgtaaacatttcctaatatgaatcatatatttctgtttgttcttcagtttctcttccgactaaaatttgtattttaattattccttgatatatttctctttcgaaacgaaagactatgaaaca

SEQ ID NO: 22839 - DNA, 8445 bp, Oryza sativa
tgctcttaatcccctaaccaagccaaaacaaccacaccaccgagcgcttcctgcagaatctcctaggacaagtaaggttgcagttctttcctgctgcagggaagagagggagggggaagagaatagatagatgagagatggagtcctcttctcctgctgctattgttgttcttgtgctgttgcagtagaaggaggtgggaagcaatctgacaacaagaaggaaggaagaagaaatccatggctttaaattgtttgtttgattcagaatggttgcaccaagaaagtgggaaatctgggtgttgtgctgaactgatcttagtttgtgaacttactgtagtaaatcgttgagtaatcctctgtttattttgtggtttcttcggtgctgtgagtgtaaaaaacttcactgcagcatacgaaagaatgctatgcagaaacaaatgttcattttttcctattccttgtcttgctaaattataaagtatatgcacaatcggtaccaaaggtgctaacgtcagtcaacaaggtgttgtattgtcttcgcaggtccacagtgaccatggattgaggcaggtaatatacgaatgtaaataatgaatcattaccaagtattacgcctgtttgttttgaatttgaaatctgaatgtggtgagacccggagatgagacgtgtcctgctggaattatgttatttcattggtgcatcaagcattcatactgttgcattctatgtcatgagcatttcatccttgtatcatgcaagtgttttctatttcggtctggaggattaataggtaaggtgcccaggctccagtacgtgcagcaatacaatttgtacatcatatcataacttgcttgaaggttgggacatcaccagactttcactgctacaacaaatccacagttccacacagatatgctacatcacacatcgaagaaaacacttcccatgttagctactcatagtcagaatgagaatgggtatcaagtttcaaagagaggtgaatgctcataaatcccttcttttataaggttatgacctactaactacaatcaagaccctaaatctcaaaccttaatgttccacatcatcataaattcttagccattggatcattggattagatcacttctcagacattggatgaacaaaatgcagcagccaccacatgaggcccatctagtaattttgatcctagcccaattcagcagagaaggatttaaggtttcttcttggatcggtggggtttcctcctagagtcggagtggggtctcctccctagcatgccccacacgcgtggcgcggcacggcaatagcttggtgaaaacaacaacactcagtaccttattaccaacaggcggtagccatgcttgtcgatgctgagcttcggacaccaccacctccatagaccctttcctccttaatttgcggtgctcatgtgtgtttcttttgtttaaactgtttgattttatcattggtttgttgaaagttaggtgttccatatgctgccggatgattcaattttctggtatgtttgttcgatggaaatattttcagatttgcatgtcatatgtttggcacaatacctgaacgaggatcatactacgttagtatcttctcactgcaagtttatgatttttatattgtggtttcttaacctaattgcaccatgtgcacactaccatctcactatatcaaacaatttgtgtcatctaatcctaacatatttgattctagaaggtcacccatggtcaattaatggtagaccagttgtttgcagtttgcattgtgtatgggtggtttagcttcagcacaattgtctttttaaacatttctggacagatattgaatggttgaggcagctcaccgccctgaacagtagttctcttttatttcatacaactgcagatcctatttaagtgtaagaattaccatcataattttattttcctgctattattcacaacttacaacatggatttaacatgaaaagaaagctagctaccaaagttacgcccttgcagatagcacgacgagaaggatatgttttttttaaagatttaaaggtaaccgtatgatccatccatgaatatttggaagaagagatgcatgtgcttccaatagctacatatttgacgagaacagagtgtgcagtaatgcatactgttggacaaaatatagctgaagctcatacaagtctgatatgttgtattacaaaatattctttgaccttctatggatcacattttaattcacagtttgttgtctttgcttactttgaagccgataccaaaatatcttattgaagcacacagattccagccttgcatatatataaagttattttagtgtacccgctgcaacatgcagggaatcaaccagtactcttgtgtacatacgcatgcaaagaaaatagaccatggatgcatatgctctctgttccgtaagttggtgtgcacgatctcctcccccaacaatatatacacgttgtagctagtgcgcatggtaggcactaacatatatagttgttgacaaaatgacaagttaacttgccagctgaactcaaccctgtgacatctgtcaatctaggcttgggaggcaccaggaagtgtcgatgtgagaacagacgttgaaacatgtcatgtccattcacatccgttatcaggcatacacggcggtgtgcagccgccaccgggcaccctgcctccggcgactcttccacggcttgagacgatgagaagccgtggcgagcggcgacactttggagatggacagcagctaagcgtagggtgaacagtccgttgtcaagtactatcatatttgcctgaccacacgaatgctaactataatatactagttaagtgcccgtgcgttgcaagggaaaaaaataatacatcaatttcaaattattgaataaaattgtgctgaatagttattgagtgtttcttaataaaaagtagtaatgcaataaaatcctaattcagtccggggatatacgtatttagctgtatttacactcatgacatcaaatcaagtaactaattgcaacaagtatatacagatggcattatgtatttcataacatggcaagtgaatgcaagagaagtaattttgcgagtataggggacaaaaccaaacaatacagcataggacaacacgtccgcaattcaaacccagagcaatactataatgttcgcactgccaggacatcatagcttcaacgattgattgagaacacgcacaagtatcttttgtcatgaggcacatattctctatgcctgcaatatattcaatataaaaatctaatgaaccacaacacataaagcatcaatatgtcctccagaatcacacaccacaggtgcaccacaagctagcttgtttggtcatattcatagcaggtgatattccaatgggagaggaatggaggaaggttaacttgctggagatcagagagtgacttagtttggtttgcctggataagaggaaaataggtcagtccttatttgccagtatatagtaatagttatatatgtatgttataccattcccgtataactattttctctatacgataatactatgtgttttcttctaatatactggagcataacatgtaatttgtgcaaagatgaaaacatcagccacagtaaaatctttaaaaaagaagggaaaatagttgcataaaagagaagctttgaaatctggatcaagaaatgacattgacccatgaactatttctcaaaaggacaaatccgcattcttaaaagtattatttcttaattttctccacaagttcttcaacaacaaagacatttcatgggtcaattacagaaaatacagacctaaaaacaaaggataaagcctcttctttataagagagaagagggggaactttttggtggatattttagaacagtcgctatggttcaaggaaatagctaatcctcaagtgggtaatggacaatcaattctatgcttggatgatacataagccaaaaaaattgaattgaattgcatatgtgcacagaggtagccgttcagggctcctggacccactaaattgatactttgctgaaaaaagggaacaaatcaatccaaaagtcagctctaaacaaatgacattgatctgttgatgtagcataagcagtgcaattaaaagctatggaatatgagtacacagatggaaggtttcgtacagaaaaccccaatttctgatagcctaaccagaaccaattcagggagccttataaagctttctacaaaatgcaggccacacaggaaatgctatctacttacatcaaaaggaatctagttttgttcttctgaaaacagatttgtaggcactcctatttgtaagttaaatatttctttaacttactgttaaaaaaaacatgttcagcatccttgagtctagcttgcatatatctatatcaacactggctacttcaatcccatgtaaacatatgaatatgacaggcaacatgataaagtttaagagaaaaatatagagcaaaaggtatgtagttgcatcctcaatcccatataaatgtttaaaagcttgacagcctaatgtaagattttttttggttttccaccgctggttgtacgattttgggtagcaatcgattgggtgggctggacagctgcagccaaaaatgccgcaacaatcagaactgatcagcctcaatatgttgttttttagataatggaagctttatttagactcatttaattacatcaagatgatagaatcaaactgagtcacccccggcctctgcataaaatgcacatagccaaaaaagaagaaagaaacaactagaacatctcccaagcacaaaagtttaacagaaacatatatcttagtggctatcaatccgtaggctagaccgtcacccatgctcctgggtaaaaaaactcctgtgccacctggtccaactgtcgagataccaccgtatatcttagtgactatcaatccgtagactagaccgccaccatgctcctgggtaaaaaactcctgtgccacctgctccaaacgtcgagataccaccataatagtatcccgcagtcccggttggtggaggatagcccatgtacgtagccaccgggtaactaaggtgataacctgcaaaggagaagacaccatcttgttatcaaaaattactccattcctacttaaccaaatggacccacacagagctgttgcacccatcaaaagtagattcctcatttctttggggacacatgatagccaaatcccaaacatataaccaacattgcgaggaggtttcagattagaaaccaaatgaattacagaccacaccaagcgagataagcggcactgaaagaataaatgttggatagtttcatccttgtggcagaaacaacatgtcttgctgcctttccaatttctcttagcaaggttgtccttggtgagaattacgccccgacgtaaataccaaaggaagattttaacttttaggggtactttcaccttccaaatccgtctaatgatattcggaaccccggtatgtgttagagctagataatgagatttgactgagaagaccccattcggggtgaggttccagtgaaactcatcttgctcctgtaccagaaccaaatcagctatgcgaggcaataggttatgccaagcagctatttttgcaccaattaaatcccgtcgccatgaaaagcatggaggattggtttggaaaatctgtgcgatagtcgactgtttatgcctaactatgttatagagacaaggatactgttctcttaacaaggcattacccaaccatttgtcttcccagaacctaacttgggagccgtccctaatcttgaaggatccaaaacggaaaaagtcatgtttgaccttcataagactagcccaaaaatgtgaatcccccgctttccaataggcttgagataaaggttgtgatcccaaatatttattgcgtagcagttgttgccatattccatcggtgataagtagtttgtataaccacttactaatcaacgctttattctttatctcgaagtcatgaattcctagccccccttgttctttgggacgacaaataatgtcccacttagcaagccggtatttcttcttatgtccatccccttgccaataaaacctagatcgaaggtaatcaagttttttaagtaccccactaggaattgcaaggaatgacatcatatacattgggagactgctaagtactgagttaatcaaagtaagttgtcctcccaacaaaagaagttttcctttccagctactcaatttcttctcaaatctctcgaccacttctttccattccgcatttcttaacttcctataatggatcggaatgcccagataatggaatgggaagttgccgacctggcagccaaagagctggttgtattgatcactaaaatcgctctgactcgagaatttaatgcattaagaaaaatagagcagcacttaatcagaagttatgtgcaattgatctgaagatagcattatatagtttaggaaggatatggcatcgaggtggggaacaaaagtgtgaaaatccccaatgatggagcagaactcgatagtgaagcattacctggtcatcgaacatcagtttcttatgccaacaagatctcaactaaattgcaagctcaataaacaaaagaatcaatatcatctcttgttctttacactatacaaagaccatttcgtttgacctaacccatccatcctgcccaagtttttcaagtctaagccattggggggagttcctttagttggtttgctcagtgtttcacaaccactattttcgcaaatttgcatttgaattgtaatggttgaaagaacgagatctagcaatgcttaccttgtccacagcgtggtggagagagttctggtggcatcggaatggagagcgtatctgttaggtagcctcctagtcttgctcacttggaaaagcagataaatcaaccataagagatggtggaatatcattcccgttgtgtttcaaagccctagaataacaggtaatcaagcatgcatatcacacattttatcctataaatgatggacctcatgcatgatttcaagatagagtgaattcacattgaaaacctaaaaacgggccagtgcaatttacggatactaaaggaatgtccactcttacgtgagtgaaaatgtcaccaaatggatgactcccagagaagtcatctgggccaccacctgacgcttggcgctcagaaaatccagtagaacaatcgatcgcaaatcgaaaaagacaaatcacatattcactatttatgtcagtagtaaggaaggcaccatttggcattgaggcagattatcatagtcctgtttggtgcaactgcttttaaatattattttgttgtttggataactcttttccttcgtttgatttataaaacaaactaccaggaagatagatttatgtctctgcggaaacttaaaaagcacatgcatagtcacagaaaatagttaataacccggtcgtatgtttcacgcttatcttcatccttcaaaacctgagataagcatgacaaaacgcaccctttagaataagaatgtccaatggttaatgtaggacaagctaagatggtgcccaaacaaagaaaccaaaaacatgttcaatgtaggacaaactaaaaatactctgttacttccttgtttcaggcttccattctaatttatgagtttccaaatggatgttacatgcagcttgcactcatgcggttgggtcagcctagcgatggaactccacccgccagatctacgctgagatgacagcgaggaaagaagccgctgaggcgctgacatggcccattctcctcccgcatacggcccctggtcatgggcgtggaccgtggggaagggatcccgaagacgaagataggagcgtggaatgttggaggtgaggaaatattgcaaaatcagtatgcaaaaaacatcttaatggactgaataatatgcacataaataaatcgataaaaaaaactcacatgatcttgttaacgatgttggtgtgatgcccccaatattgttatccatatcttaatttagtgttagccagctgaacaatcctaacagcatacttcacatcgagagttaaaacttgtttctgtaaatcagaagaaaaattcaaaagtaaactaatgagagtgaaaataaattattctgaacttaactctgaaaacagcttagaatgatattcgcaacatcatgttccttttgaataaaaagtatgaactccaagcagctattatatctgtttattccatcgattaaagatactttccattaggaaaaagatatattagctgcacatttcgtagaacacatgaatgcttggaggtatatattagctgcacatttcgtagaactcatgaatgcttggaggaactctccatgcattggttatgtatatgtgtgtt

SEQ ID NO: 22840 - DNA, 25262 bp, Oryza sativa
atacactgtgagaggtctttcttgaaaggaagattactatgatctcattaagaacaacaatagtagtgcggcatacacattttttctcaagtttctagtttgcatgaaataaatatcagttatcaatgttgataattcgaaaccacaaacaaaactacatacttattatgccgtaaggctgcactatcaggtcacttcttgctattttttgggttttaaagaaaaaatcatcatacacatggagggtctatattcttattactatgtgaatttggaatgtgagtcttatcctataaattattggaagcatacactaataaaccattttattttatttgcactgtacctcaactctgtagccaagttaaacacagaagtatttaatacagtaatgaccttttcaattcagagcttcgaggcaacattctgccgcggcagggtgatcggttgctgctcggcgcggggtcgtgtcgtcgggggccagctcccatgatccggtggcaactgcagagggcgaggagggaggagagccagtgtggggtcgtgtcgtcgagggccggctgctgcgatccggtggtaggagaggagggtggtaggagaggagggagggaggcgcagagggccggctgccacgatccggtggtaggagaggagggagggaggcgcaggcggcgatgggggtgggggcgcggtcggagagaggcggcagcggggtgaccgtctgctgctcggcgcaaggtcgcgtcgtcgggggccagctcccgcaatccgacggcagttgcggatggcgaggagggacgcatcgtcggggcccggtgtctcgatccagtggtaggcgaggagggagggaggcgtcggcggcgctggggccacgggcggaggggcggcgcaaggggtgggtgtgggcgcgattgcgctgggaatcgggagcgagcgggggcagcagcgaagggagcggggagcgtggttgggaagaggggcgcgatagagggagccaaaaggggagatggcgcgcgtttgaagcgttgattttgcgggaggatcctaaaagcaatcttaccccttgaattacctaggactcaccatcaccactacagaatttttaaaagtagtagagatactctctctctatttcaaaatgtataaagccgttgatttgtcgtacaatgtttgataatttatactatctaaaaattttgtataaatattatttatatattttattgtgatttattttatcatcaaataaaatatagtctcaacttataccttaacatatttatactaaattttttaattaaacaaacagtcaaacattataagaaaaatcaatagcgaaatatactttaaaatggagggagtatatagttgcttctttggatcaagaaaatgcacagctcgtcaccatgctccgtttagattgctaagtagtactccctccgtttcgttttatttgacaccgttgactttttagcacatgtttaaccgttcgtcttattcaaaaacttttatgaaatatgtaaaactatacatatgcataaaagtatattaaataatgaatcaaataataggaaaataattaataattatttaaattttttgaataagacaagcagttaaacaacatgtgctaaaaagtcaatggtttcaaataaaatgaaacggagggaatagcagtggacagcagcatctgttaactttggcgttcgccgccgtatgctcatctgttcaccagcacgcactatcgatctgcgttcttgccggtggattatcaatttatcatccggggatgagaaaaacgactgtagtttaataaaatttcagaggcttcaaatacagatactcctataccaaattagtgaatccagctgaaactaagctctgttcttttctcatgaagatatagattttacctcggtttccgttagcacgcttttcaaactactaaacggtatgttttgtcaaaaacattctttataaaagttgctttaaacactactacaaaacatcaaataggtgtcggcactataggtaccggaagtgctaaaacaggcacctataggccttttcacacttccgcgggttgaaatcgtaaaaaaccggcacctctaagcaattatagataccgattctatatagaataggtgtcggtttttatttaaaaaaattacctatgtattataggtgtcggttaattaaaaacggacacctataatatattataggtaccagtttttttaaaaaataccgacacccacgtaaatcgagccgagccagcgggccaggtttgctcgctagtcgcttcttgatctctctctcgcccctctctctctctatctcgtcccctccttctccccgcatacggcgtcgtcggtgacggcttcgcggatacggcgatgcgcgaggcggccttggcggcggccggggtggcgacagcggacagagacttctcccgtgggctccggtggcaacggcgactcccgcgatggaactcggcggcggccggggtcggcgtcggcggcgaaggcttctcctgcggacagagctgtggcgacggcggcttccacgacggatccggcatcggcggcggccggggtggcgacggcgggctcccacggacggagtggtggcggcggcggctcccgcaatagatccaaccctcggcggcggcccggggtgcaggacgacgggcggaagactgcatccctgggtcggccatcggcgggttggagctggtggtggtggccggctccccccaacaaatcccggccacggatcggcaacggtaatttggttctatgaaattgttgagggatttgtggtctgtgcttttttcatctgtgatttgtgtgaaatttctgtgatttgtgctttaagggatatgtcttggatggatcaatggttacagtgtgtgaaacttctgtgatttagtttggatagatggtggtctcgtgtgtgaaacttctgtgaattgctttggattgacggtggtctaagggtgacgaggaatggctcgatgcatcgtgccgatgcattgagccctttttttttattcttgagacctcaaaggtaactttgaatattcacattagtaccgcgcctcaatggtgccggttgggaaaaccaaccggctcctatatgtggggttcctaactggcactatggtagtgaaaatatcaaatatatccatttatcaagtttgtaataattaaaacttaattaatcatatgctaatagctttttcgttttacgtgcgctaacttagaccctgtttgttttagcttaagattattataatatgtatttgtcgacgtttgatgtcgtgattccggcatttacatagtatggggatcgttggtactaggatatatgcgagattatagtaaaaaagatggagacggggatttttatacaggttcgggcacctgaattgtcaggtaataaccctactcctgttggccgaagccggtcgttgctcttatttaccataatcacaccagtacaatatttggggtagcctatctatcttttgtcgacatggcggtctgaagtgctgacacgtagtcgacaacagagtagtatttctcctcgaatccgtgtccggcgagatcagagacagcgttagatccttcttgatggtagtcgtaggtaccgtatggggactactaggcttatctccaatgttgatatccggcggcttgtcttggcgtatgttggcttgtatgttgatctattgttttatgtcccctcttcttctaggggccttgtatttatacccataggtatccccttatcaaaatagaactagggaaaccaatatggatacaatccgagtagtccttatcattttcatgtagaaccctagttgtctttccttatccggaactcatcctatatctgaaaactatttccgtataatacatggtatgtggtgggtcctgccgagatttagtcaactactatcaggtatgtggtatctataaccctgacagtattatttggagtaatttgaaacaaacaagtatcaattattataatctacaagctagattagtacaatctagtaatccactttagaggtgcaatttttatattattggatggctaaaaatccactgcccgtatatattttaaaaactcacccacctttgctatggaacggaacaaatcaggctccatccttcccactcaacacgcacattgaccttctctaccctccagctgcacgcgcattggctcctcttctattccgcgtgtcatctctcatcctctcggcacatccatctccatctccaagccacgccgccgaagccgtctccttctcatcctcctccgtgacttaacgattcctcgttcatggaagttttatttattaatatatgacattaatttttagctatttcaaattatgtatttattgtatacaatgacaaatggatgaacaatacatccaaaatagttgaggacattatagacattaacatttcaaatccagtaatctatgcctccaataatccagagaaacaaaccatcatagcttattttatattaacttattataatccaagctcccaacggatggcctattcagccaaagaaaaagccaaattttaaattttcaaacttaattttgatattgattttaagatattttcaacatagtttctttttcaaaattgacttttaagtcaccgagaaaacatatgtaaaagttttacctacaaattcatttatattccctaataagccgttttggcttattatagaaaaagccaaatgatggggcctccagatttcagtaatctcgctcaataatctagattgcaataatctaagctgaaagaaacaaggccttaatctttatcttcatgacgccatcctcaacccaaaaactatcaattagttttcgtactcgccaactgtatatctaagggatgatgtcttcaaattaaattctcatctaatcacctctcttccttttccttttatctatatatacttttgttttcattcttggttattgtgttgaggcagtttcttgaatgagaaattattcctccatctttttatctctcttctcattaactctttttccacattagatttttacttatgtgataatgtatttaatgctataggcgtatactagatgttacggaggattgatgacaatgagggctgggaatggcctgatcttcaaacaccacccaagtgagtcatatgtgtcccatcatttcagttgggccggaacagatatccagtgagcctgcgggccatatcggtgtgcgcatagcagctagcacacatactccctcccctccgttccaaaaaaaaaaaaaaagcaaacactgggtttctatgtccaactctttccgtcttatatgaaatttttttataattcgtattttcattgttgttagatgataaaacatgattaatattttatgcgtgacttgtctttttaatttttttataatttttttaaataagacggatggtcaaacattgaacacggaaaccagggtttgccttcttttttttttttgacggagggagtacactgcatcgatggtatacagtgtacgtgcaacattgaacagtttctcgtcccctttctccttgagattaaaagatgtcagggtcctgaatctgcgtagtccaggctttctaaatataaatacatttttgtaactttgatttgtgaacgagtacttccacaaaattgaacagccacatggaaatgaatatgttaaaaagagctttaatctccgactaggaagaaagcccgtgccagatacgtgggcttcttattaaatgttttatataaacaatgctaaaagaagttacatcccgccatttccatttaaatgttattaaacaagaagaatatctctcaaactaaaaaaaacattttgaccgagtaacatataaattctcctattgtcaccattacttattatgctttaaaagctaagtgaactgcatatgtaccaataatataaaactaatgtatcattaatacactaaaatatccactacttaagcttcatgtcttactatagaatatagacattgtaaaaatactaccgcttctatccattaatgggatagcaccattaaagttaaatagaaatgctactctaatatgggtgaagcccatcatagcctcaagactttctttctctattgccttgaaacatgtagccatgctccttaagaccagcttgcagcataattttaatgcctaatttgttatcgcacgattatggagtattacatcggtaagtatgaagttgaggactattagcgatggtggcctccattggggccaccttcatttagccatatgtttcatgctatacttatgacaccgtagtaaacactatttttcatgtttggtaccctttagtgaaggacaaagagaaggtggaggtgatcaaagtagtttttctaaatgttttaagtagatttgtggtatagagtagacacaatttgtttatggtgttgatcattactactcaaatttttagatatagatagagtattctcttttgaaaatgagcgaggttaatcactctatgatattaaaaaaaattatagctagagtcatactaccatgataatatccagagcaccatattattctttatattttgacaatatgtatagtttagcgcctagtttgttttcaacaccaattgttcatagccatatgagacacttttactaatttgaagaatgtatttattttctaaacttatttacaacaactaatcagttggagtacgcttatagtcatgccagtggattttcttatatatatccatcagttatgtctaacatattgaaaatccttaagtataagaaattatatcatgattattttattgcgcatgctacttcattgtttatttatgtcaaaactatttggcaaaggaataaaagtatgatcataaatctcatgatggattaagaggttgcattatagaaagttcattggctggaaatatttttgatattttttttcatatctactaccttcgtcccagaatataagttcttgagttggacatggctattaataaagtagatagaattaaatagggagaggtttttattggttgaaagtgaatgtatgtggaaaaaatgaatagtagagggttgtgattatttgggaagagaatattgatgaagaagttatcatatttgggataatttatgcatgttagaaattgatatatttggggatggaaggagtatgtactatgtatgctaatcagttttcaaatactaatcaaacagttctgaaaatataaaaaaaaacatttgagaattttagtctcaaacatattataatttaatcagatctactttgaaaacacaattaaattttgttgttttcattttttactttgtagatttaaattagtgttgtatatttgagaagtgatattccaacccctaaaatatgatgcaaatgttttgaaaattatcatacaactatctattatatattagccccatatgtcgtgatgtatttaggaccacaatacaacttctatagttgaactaaagtaatacaacgggatcacaaattagatttatttaaaaataaattttcttaaagaatattgattggatattttatattttttattatagatcttagtttaactatatatacttatatttgtgaagtaaaatatttttatctaaaatcatattttaaaggccgtcgttttttatggatgtacattttttttggctgtctgttttatcttagttcctatggttctcttggtgaacaataggttagctttattgtttggttttcaatcgtacgtacgtacaagagtatagtagtagtgtgtatcgtataaatagggggaagttattactttgtaataattgaactgatctaatggtataaaataacggatccaccaatttaagtgaaaattaatggtgagattagatagtaacatgtggcgacttaggaacatttataagagtgccccagtcgatgacactatcacctcaaagtccgacgtgcctcaagtggtcagaagccacgactccaagtataaggacaaggaaaaaggagaagtagatggtttccattttcagaggtggtaaaaaagtcccaaggagagaaaagatgatgagaagaaggccgctcaacttgcgagcccaaaatactttccaacagttgattgcccggatatatatgaaaatggcaaagctttttggccggattatgcacttgaagaaggtccatgggagataagaaggctacacaaatggtacatggacaccagcaagaaaggactagtatcattaaccgttcgaccaccgcccgatgctttcatggccaaagatggtctcttgtggcttgatttcggtgatcttcgtggcatctatcatcaggaaaagatggacgtgaactttgttgctgcgtggtacctttgaggctgtgagtaacgatatttttatacacaaataaataattacactagaaaagtttttgattattaataacaagcttttttggtaggatgtaatacatggatgttgagaaaaccaaggaacccatcgattatctagatccaacaaggatctgccaaacccagcatacggtgacattatcaaccgtgactaactgcaacatcgttactatttagcgatcgttatatatgtttcttgctctacccaatgtatgggagcgttgtggtcctggacccccttgattatgaacacaagacgtacagacaatttctaaccatcttacaatagtaggtgattctaatcgatgcgtgtctacttttcatgaattataattgaacctccaccttcatactaactaatatcgaaatcctacggtgcgtacaattactgcaaggtaaagggtggagaacaactgcaaacaagggagaagttgctagtgcatacatactggccggcaatactccgcacacttaatatatttaaattcttttacttacaatgtttaacgaattcatcctatgtgtatgccatgaagtgtcacaagcgacctcgaggcagtatcctctacggttattacacctgcgattacctcagggttaatgggaggtacatgactaagtaaagtaagaggatgtaagtatttcaactcaaacatataagtccaatggaaaactacacatctaaatgatatactaatatattcttgtttcattcgtggatgcagttgcctagaatcgagctccaaataaactttgaagacatagagatctctgccactttatccactgcgagtcctgtcataaagatgacagttcttcgacccagaaggaaacctagcgacaagtgatgattacaagtttcttccagagtggaacaactcgatgctataaaattgtaaatgtgcatttgaaatgacaattgtaaaaaatattgtaaatacatgacgacacttttcactaatgcaatatatgcatttatgactaacaatattaatgtattaataaagtaatcagttgtaccgttattgattaagcattaataaaaaaattggcgggagattttaaattttggtgccaatttttttccaggaagccccctaattatcgcaggcggctagctgtttgcgaaaaatttcttcccagacggaccggttgcctttgcctacaagtgggccgagcatccgcataggaagaccttttttgccgccacagaaatgttttttttagtaccaaacaaaactgtttgatccagattctaaaaaaatatagttacagaatccagaaaatgaattagaggtagaagctgagaaactcagcttttctaatttttaaaagctaactaccaatcagctgctttttataaaatcttctcttaaaatatgcttttataatgtgggagggagttctacacaaatagaaaaataataagcggtggtaggaaggaaattctgccttttatccatcggctgccacggcagctgcttttctactactttccggcggcgccgctctcctgtagaaaaaatgcgaaaccactgccctcacgcgtggcatcagcagcagcaccgcggccgcatgtgggccgcctcaccggccttccgcaggcgcctcttcctcctccgttccctttccccctccccctgcgccgccctccccggcaacgccgcctgctcctcctccccctcgccgtcgacctccattcgggtcaacgcgatgtcggcatcgggccccgtgtacgaggcggacgctgaggcggtggtccgccggatcaccccgccgctcgaccgcgcgcgccacaagggccaggcaggtgagccagcgcgacccctatccctctcgtgcgcgctccggggtggtggatttcgggttgtggtgttgctgatgatgcgctctctgtgtttgcgggattgcctccgtagggagccattggtgggatatatagataatactcgaagaagagggattttattcggattgttggggctagagaggccgtgcgggggacttcttgagactggggttgctaactaaggcgaactcgagcactacacagtcattgcttcacaatgaaccgtgtactgaaacaggacagaaattggtggatattcagggttagcattgctgttctgtctgataggacagtgttttgcataagggtgttttgatcggcgacgagtttggtgatacgttcgcagtgttcgttgtttctccgtatgatttgaagttcctgtatgttatgtgaaactataaataaaggaatattttacaatggcgtgaaaggattttgctgaggtgtagaattcacttataaaaaggtttgcgctcttgtagagttaagatttttctgtgatatgatttgctacgaaagaccatccagtaagattgcacagatacaagaattttgatccaacctctaagcatgtgtcgtcttcatatttctagtgcataatctacaagaaaaatgtaatactgtccgtgtctaggaacttttctactggtgtatacagtcagaaacatatcaaatcctgtatggacatacacatgttgttatgaagatgtgagctgtattttccagtttgttattgtttcatgttcccaaaaaattagtttcctgttgattccttaagtttacttacatatcaaattatcgatacatttcccagggaaaattgctgtaattggtggatgtcgtgagtacactggtgctccctattttgcagcgatttctgccttgaaagttgtcagtatcatctaaatgtatcattccataaattacgcaacagtacaaatagttcacatgatgttattcagggtgcagatctctcacatgttttctgcacaagagatgctgcaacggtaataaagagttatagccctgagctgattgtacatccaatactagaggaatcttacagtgtaaggtaacattcatggtatttatctttgccgtttatactataatcacaacatcatcttcgagaatctgactttataattactgcacagcgatggtgagagagaatctgtttcttctagaattctcacagaagtagcaaagtggatggagcgctttgattgcatcgttgttggtcctggccttggaagggactcatttcttctggtcagcttacatacctaacatcttctggagtataaacactatctctgtcctgttgaggtcttcttcattagtcttatttgttgctacctttgcgttttatacagtttaagatagttaattatattgattgacagttgaaaacatctttgctgtcataattcttgttttctcttcctttgaaactaaccatatttcgaatatattttattttcagtttgcacctttggtcaagcattgttgcaactgtgtctacctccattcctaattgcattagtagctcccagggccaaggatagaccagattggtgttgataactcatcctgtatttctgaagatctacagtttgaaattataaagttccttgatagtaaggaccttgtgtttcatatggttaatgctctatgtagatgacaacctcagtcctgaaactttttccatgctagaaatggtagcttcattttgaaggtgtggaggagttttaaccatgcatgacttttttcaattggaactgaaatttctcttttgtattaatgtcccatgtcatctatttgtctaatctcctatatggagatcatgccatcttgccctaagtacttacgatagtattcaaatttgtcagcttatgtttgttttgacatatcttacttgtaggactgtgtaagtaatatcatgagacatgcacggcaggcaaatattccaacagtcgttgacggggtaccatttgacttttttttaaaaaaaaaacatacttgaaattataaattatgaacaggacttgatattttttagtgatctgcaggatggccttttccttataaccaataaccttagtcttgttgagggtaacttgcttgccatcctaacaccaaatgtatacgagtacaaacgtcttgtccagaaggttcttaactgtgaagtaaatgaggaaaacgcttctgaacaacttactgcactatgccaaaagtatgatcataaccattgcaatcatttattcttcactggtcatctgtgatgttttctgattctgttgaacagaatcggtggcataaccatcatgcggaaaggaaaagcaatataatcagtgatggcaaaactggtatactagaaacattctttggctacttcaaattttggtgaaactataattggtttcaccagattttatatctcttaactatttggtatgttgttttattcagtaacacaagtaagtacctttggttccccaaggagatgtggtggtcaaggtgacattctttcaggaaggtttgttgccaatgtggtgctgagtgtttccttctgtagttatttctgctccttttctttggaatttttttcccatgctgctttctacgcttcatatcaaacatatgccccaacataacctttacctccatgttttgctactgccaaaaccagtgcttaaatcgaaagtactcagttttggatcgactcatttattttccttccgttcgtcataaacaaataacaaagaaacttttctaggaatacagttttagtttgttctttgatgatttgaaaaccacatgctatggtaacatgaaaactagctatgtgaacttcaattttgaagataacattgaacttaaacaatgagataatgaccagaactttgttctaacaagaactgattatcccgccctcaaaataaataaaggtcctgcagttgcactaactgctaccacttttgtaatgtgtgcttcagtcacagcacactgcataattacccagtatgcaataagtatgcaatgggttcttgggaatctgataattgtgttcaatcatctttgtgtttctgtaaatattggctattcaattatttatcatcctcaaataccatataactattgcatactcgttgctcaatgctaacaatcttctattgaatgtgagctaaaatcacgttcatatgcaagcatatgtgctggtcatgaacttacctatgagaactctgcttgatgtaatagtttagttccattcttaagcaatgccatggtagctcaaaattctggcattagtacttcaaaagtgtgttttattcaacgttcatttttgctggtttcttaccttatccggtttactgttggtggtagtgttgcagtatttgcatcatgggcacgtcactttctcctgacgaatgagtaccctacagagaagaggttatgatcaatcactgtttcccaccactcttgactaccatgatattaaataatatttgcgttggcattggtgcggtacagcgtgaatccgatgatgcttgggtgcattgctggctctctactacttaggaaagctgcatcacatgcttttgagaagaacaagagatcaactgtcaccactgacatcattgagttactgggcaaaaggtccgcgtgcgctctcactagattttttgtttcaacttgtatcgtatttcttcattttttttacaccttgcacttttcctcttgcagcttggaagatatatgccctgctggtcattagtttagatctttaccatcattggtggtacggcgccttagcacctgtaataatggtaatccatatgttcggataccagtctctccctgcttaatgtacatgtttcttgactgaaaagatggtgttacaatgcttggttttgtttagcctccgttttgctcagaagaattctacagaatgaataatgaattgccccataaatggggctttgattttggaaaaaaatagcccaaatttgctggagtatggattaggcccgtttgagctccggggtggtgatccccgcaaggatcaaagtgcagctgcaagaagaaaaggaatggaggggaaactgtaccaaacagaattctggcacagctcaaatgtctcatgatatgcctatgcaaattccagttgtgtacagttttgagcacacgtcattggagccaaaggttcttcactccttcactgtcttgtcgcatctacactgaaggaagctgtttgcgtcacgctgtattctgagattcgaaattgtttctcaacaagtcaagcagagctgtgtgcctgtgacatctgttgtcaattttttcatgcatgattggaagcatccttctatccgtcatgttccattgtcatctgtgagttccatatcttgtttaactccttttaagaaattactgctgatggtgagtttattaatctatccttgctgcagcacaacacatgcttattttttctctctagggtgtaacagaaatatccttattggtcaacagacatgttgaacacgaagattcacaatggtctcatgataatggataacaggtcttctttcatccacctcaaagatcatcctgaatgaaatgccgggggaggcaatcaagcaagaaagggcttcggaagggtgaccccctatcccctctcctctttattctagcaatcaaccccctttaacgccagcgacacaaggccactaagcttggggcgataagcaaattacgaagagagcggtacgtttctgcacatccatgtatgctgatgacgcgactgtcttcataaacccgaataaagaagatgtgtgagctttcactgatctccttggtcgctttggacatcaagtatcataatattgcctactaaatacgtgcaacatccaccgcggctaggatagccctgttccccccatatatagaagataaatgatccctcacagcgatgcattacccttgaagaacagacataagaaagaactgaaacgaagagattattatgagatgaattcatggggacaggatgtcacgcccagaaattcacaaaccagaatttctaagctgaatgtgcattaaacccctgttcaggaccagccagagtacacaaacgacaattgttgacatacagatccacgtcttacaaaaatacaaaagattacaaatgcaacggaaaaggataaaagcgagctaagcctgaagactttactcctgcagcgaggcgactccattccacaggcatccttgacggcagcgacgaaaccaactccttcgagacatctccaactgagaagaactttaactctggggtgggggaaaagagagcaagactgagtactacccactctactcagcaagtcataccggaagagaaggtatgatgcagagtataaccaaaggaggctagaggttcatttgcataaagctagcatttaaaagcagtagttgaaagcagtaaaacagttgtagcaattaatcaatattaaccaatcactgtccaacgctacaccacgttgcaacaggcccaaccaaccacctgaactacaccagttcattaagctaaactaggggtgagactaatcacggtgaatctggtcgaccgcccataaccgcgggcacggctattcgaatagttttactctgatcagaggtgtacaactgtacgcacaagacacagccccacgacacgttaccgtgcgccgacatgccaccacgacataccggaaagaggccgtgacaggacccttcgcataacccactctaaccgatcgcaccacaccttagggttcacccccgtcctcagcaggcaacgggcagcccccctttcgtgccgcggtgaattaggaagccgatcaaccggacaccccggccaacccaactccatcatgcccaccctcgcctaggtacgtcggctagaggaaagctacactacaagcccagccgttgcccacgctggcttgtggtaagtatgataagttcttccagggcatcccgcgaatcggtccttaattgccatgagcacgactagcaaaaccatgcacccacagcccaccatgtagtgtattttgattaactaacaccattgcggtggcactaatccaaagctatgccaataatcaaagtctatacattaatgtgattccccttttgtgtactagttgaactaagcatggctaagcatttcctaagccaacatctaatcattttgatacccaagttatcaatgacataaggtaaacaatatatggctgagtagtaggacccatcccacatgatattgtaaaacgatgcaacatttaatagaaatgcgggacatttgtaaattgggtacaatataatcaatcgtaatgcatgacttgccttgctctcgcactgatgagaccacaacaacgtcttcgagaaaccgtggagcgacgaaacggccgagatctacacgacaaacaaaacacacacgcaaaacatgctataagactactgaaacatgaaacaaaaccatttttaatagattctatgcatttttatgaatttactgagacttcaatgaacttaatcggagctcgaatgaattagatatgaattttagaagattaaatgtgtttttactataaaagaaaaggccttaatggattttattgcgcaataaaggtccctgctgacatcatcaaaggggaggggtggcgccgacagatgggccccacttgtcatagactcaaaggcaccggtttactgtggactgagtccacgggaccgcggagaggagcaccacgtggcgcacatgtggcgccgacgtggcggccacgtggacggccacgcgggcggcaggcgaacggccccgatctactgagcgatagatcggacggctgcagcggctcgcggctgggcagtgcacgggtggctcaagccggcccgggcatggcgtgcagcggcgcggcacggacatcggcggtgactggcggcgcaagacggcgagcggcggtatgcggcgacgcggcggtgcgacaaagagagagagagggagaggaagggagggaaaccgatcctcaccgaggggctcggccggcgcgggggaggagcgacggcgaacggcgacgacgagcgacgggaggacgacggcgacgggcggacgagctccgggaccacctaaggaacaaaatgggagggattagagggagaagggtggtccacggcgagcggattcgccggccaaaggcggaggcaatggtggtgctcaccggcgcgcgagaagaacggagctacggctaccatttgtgtcaaccgagcgttggacggggtagccctcgcaacggcgaagctagtggcggtggttgcgcggcgtggtaacgacgctagcggcggcggcgtgcggccggagagtggcggcggcggcggcgctaggggagagcggcgcggcggcgatagagggctcgggagagtgcggcgtcaaaaggaaaaagagagagggaggtgcggaggtacttaaataggagcgggggaggcgagtcgtggccgggaggggctcgattttgctggagttagtggggatgtgggggaggagagagagagagagaggcgggattcaaatttgaatcccggccatctcgcgggcgcgggtgtgagcgggtgtggggcgtgggcgcggggaaggcgtggcgcgtgggggagtgggcaacgtggcccggggcggcggttgaggagggaggccgcccctccggctggaggttaggggcgaacccgacaggtgggccccacctgtcggcgcccgggaggaggtggggaggccggatggacttcggggagggggaggaaaaggaatgggccggcggcccaaaaggaagaaaagagggggggaaaaggaaaaagggaaaaaggaaaataaaaggatttccagggattctttaatgcttgtgctcaattttaattggttaaaattatttccaaggctctgaaaattccactacaaatctcgttagcatattttgacatgtagaatccaagaaaaattccacatgccgattccgattattatttgcatttattaatttgaggagttagctctaggttaaattaaatcatttcttcggacgatttattttatgaattttaaagcaaggaggggaacttcagggcgtgacacaggaggagatgctgggaactacagcatcagatgttaacagttaacttgaggaatggtagacatcaagaaaggagaggcgtggatcaatcgtcaggagagtgtggggtcacccaaacaaggatgcgaggtgtcaaacttcagtgctgcaacatcctattgtctctctgtctcttgtacccacctcctcttcttcctgcgtcctgcaccatcctcctatgagttgttcagtgccgtaaaaatatatacattatcctcctgtttgtcacaatttcagatttaggttctctgtgttatagaagatctgtgtaataataataagtgtaatataatgtgtgtgcccttttttgcctattgttcttgtatactctataacctttcacccgtctcatgtagctaaaaaaagcttcattcctccacgaagttaatacacatattgacgcgttcaacacaggtgcaaactattagttgtttgataaatgattccatcgtccattatgcccaaaacatgatttatacatcatgtttcgtggttatgaacgaactgtaagcaggggcgttcctacactaaactactcgggatcaggtacccggggtcaccggaccagtagaatttccatctctaatcgttttagcctatattaactatattgatacttaaaatttaaaaattagagtattatatgtattatgatatgtaaggaacctccgataattttcattgtgagtttcgccactaactgtaagggcatagccttgacatataattgggatttagtaatatcatgttttttctctagtagtgtcatgccctctcactaaatggcgaaaccatatggtatttccaacaaaattttgcctctaaaagtagtcacattacactattggttatgagaaattttactgttagacacattatctcgaggtacctgttgtatttcccaggaaagctcaccatttctacctacgtgctggatgcacctactcatgcttctgttagctaacagccagagcaaaccaacaggtcaccgtgtaggccgccatgggcttgtggacgcggatacagcctgcatgcacgtgtaattgtggccgtattttccagctatacgcgtgagtgctttcaccagaacaagtaacaaccaacgagagcatgattatataattccatctatacatttaaattattgaagcggcagggcatggcaattgggttttagggatttttgtccccagtggtattttgatcattagaaaaagataaacagtacaaactgaggataactgacgatgatagaagttaagcaaaaagtgatggcatatattatagaacagtggcatactgttaaactagactaaagtcagtggtatgtggtatgtagtagattctctctaaaatttttgatatctctaatacaactaccatgataccttcggatgccttcttaagaatggtaagagaaaacaaaaaccccttttggttaaatgggatctcgcgacatacttgcctcctctatcaaatctggcatcataagactttagtattcaactcgctagctcaacttaatatttttctatgatcgccttagtgctctctttctctccaccagtatatataacatactctgttgcctcttctcttcagccctccgccaggcgcccttccacctcatttacaaactactgggtcatacttatcgaacaaattcacggaacgaaagggaaactttgcatagcaaaactcatgtagatgcaaacaaatattatttttctgaagcataaaaattcgtaacaactcccaggaaatctggactccaacaactattgccacaaaaaactggtatctcctgttctctccttctcttcatcccttcaaaagctcaaggtcacataagttgcaaaataaaaaggaacacaattagtaagcaacaagaccaaatgtcatgccactagtacactgtaataattgtcatgcacttgaaacaaaaatctgcactccacggaattctgttcgtaatcaaacaaataaaagaattggggtaatcaaggaggcaatatcagcctgatcatttgtttcttgcaactgaagaacaagttcacagaaatcacaaaagtcataacccatgagtattcttgtgagcatctgcctacaaaattgaatactattgatcagtacctcacatgcattgcatcaagttaagaatgtgccatgttgacacatgttttatagtggaattgctagctacaactgatgatttactgtatacatagcacatgtatacagctcaataataccgaaactgaaagtaaccccgcaggggctctaccaattttcatgccctttagcccttacaatatttctgacaaatcctctaaaagaatatgaccaataaactgcaatagtctgctaggccactacatttgtaaagttctgtacgactgtagatgtgcatctgaaaagcgtacatagctagcacaacagtctgaacttatataaattcaagacataatccgaactagtctgaccaaatatttctgaacatttcagaactaatctgaaagaaaatttctggaaatttctaaattgctagctagcacaacattgctgaacatttctaaaccaatctgaacaaatacagttttctttgatgcaggaaatccacatccagatcaactcaatggaaagcaatgcagcttagaatgcaatccagtatgttaaatctttcggcctcaaaagccaaggttcagaccaagattattcaatgattattctcattctcaatctcaggcactttctactgataatcatatgctaactgcaaatgaaagttattgattgctcaccgatgagggagaatgttggggatgcggcaaagatggactacctcgattcggcgcaggtgcattggacgagggaccctgatgcggcgatcgatgaggtgagggctacgacctacgacctcgatgcgacttgggtgctgcggacgagcgagcgaccccgatgctggaacggtgcagcggacaaacccgatatggcggtgcgaagaggccgaaggaggttgacgaggccggcagcccggcctggagcaagctccgatgcagtgcccagggaagcagcagcaggctagttggccgtggaggccttggcgggtggtggattcggagagagcgaggagatgagaggatccacgagattgcgtgatggccaattttctcctgcgctggctctattgggagtgtggaacggtgccaaaatttggctcgatttggcacctggattaggaatgcggcaaaattgggaacctgttggaggcctggtttttatcttaatttctaaatgaagttttgggactgctgttagccatctgttggagatgctctaactgccattcttcaatgcaaaatacatttcaagttcagtttcatattcttgccatttccaacttaaatcattatcataatacacgataaagccatgcatgttgtgctcgttgtgtgtttgaataccacctattacaaatgctttgtcactacatatcttccacactcacttagaacattaaactaattgatcaatcgcactacagcaccactgatcctggcagacttaataataatacctaaaatgccttaagaatggttcaaaaatgttttaaaatatcgagaagatggcactgatagttttttgagaaacataattgctgcactcaaagcgaatataagaaaaaaagaaccaaaacatcatccaaaagattcatgtcctttaaaatacccttcatgtattatgcctccaaattttaagaccttttaaacacatccaagcatggctatactaaaacacgcacacgaaaaaataactagtatgtttatttcaaaacagaacctagattcctttggagacaaaattcaaccacattacagttctcttctagtgtcaaaaaaaactcaaccagtttgctcaaatgatcatatgttcaattattttagcaagcgtgcacatactagaagtcctaaaaattatatggttttcaaggctgtgctctgtaaatcagaataggcaggtgaaaaataaccacattttattattgtattgaaacagtactgaaaaaacagtgcacttcatttggtaatcatggccgattcttttgttcagtcctcactaattcaggacttatttacatataggtatttcatagcaaacaatttaagttctgatgaaatcaggtaaaaagttgatatgttttaaagaagccttatatactgtctttgaaaagagacaaaataatgttagtgaataccaaattcaattgtattttcttcaaacatacatttgaccaaaaagataaaataattatgcgatacatcctacaataaagtacaaatggtactaatatgtaaaaagcacaacagcaaaaatcaaagaacatgtaccttgtagatgtgctccaagagcaaagttgtcacagggaagctagggtgtctttcatttcattcactgaaattactgtttcactgggatatattttggaaatcaatttgaggaaggttgcatatttgtcaagaaactccttctgtaagagcaaacaaaatatttttgttatatgcaggaattaacatccatttgcttgaacagtaccagtgactgtatgctgttcatgattaggtgtttgattcgattagacataagaaatatttaagataagaagttagagaaaggatttgtcctattaatattttagataagttgttgtatgctaatctgcttgaagttgaacaatgaattaatctaatcaactcccaacattctccatctctcaactatcaagtctcaactatattttttcccttaacaagacggcattgaatttcatttcctttgcattgtaaacagaatgcaaatagtttacccatgtagtttactatttcaagtgacatgagaacataccttgcatttatcccatagagaaggaagtaattcttcagccgtaatattcttctgtagttttctatacattgcattgattgtcttgtcaagctgttgtgaaatgaaacagggacgtgcagagacagatatgaggctgtagtaaaagaaaatttcaaaaaaaaaaaaaaacatgagaaaggggaaaaatgattatattgtttacttacaccacttaagctggacttcaacatcttacggaagtctaccttcgacattccaacttggaaaggtatctgtataataatgtaatatgaagcatccataaaaaaattaggcatcacagtatgctaatataacaaaaatcatggagaactagtcccctgttttttaaatttcaatgcataaaactatgaaaaatgtatgtaattaatggaatagaagtgtatctggccaaacaaatctaaggggcattttgcacatatgagtgttcatcctattatagatcttgaaaaaataaaaataagaaattcatatgttcatcaccatcaatatttcggtggtattatttcaacaaaagacggcttaagtatttggtcatctcatctaattatcttgaatcctctgccagaacaggtatctgcttcaaacttcaagaaatggaccatagtccgaaaaaggatcaatattgtggtgcactgtcccgaagaagataataactcaatgatatcgcctttgaaactgaaatgcacaaccaaatgtgatgggttacctcctcagggctcatgttgtacattagttcctcaattttccgagcaaactggaataatttttcgaagtgctgtaaaagaaatattttagtggtgacagaataaaataaatggcactaccaaaaatctgaaccatgaggatatacagatgacttacgatatatatgactaaattgatgtggcgtgagcaagcttgttcataagcttcactagcttggtgataatacttagcaagtgttggtacaacatttgctaaatcgtacagactgcatatcatacaacatgtaccaagttaatgtgagtagtacaggccactaggtcctcgtaagtatagcaaattctgttgggtagagttttttttcggccttcaaaaaacattcatcaaagtcgaagtttcaccctaaactacaaagtaggtaatttttcaccctaaactttaaaaaccagacaaacttcgtcccgtgatggtttttttgtggtggttttagcaatcttaagagtagcattgctattttttcctaacttgatattgcatcacatatcatatgttctgtatcatttttcctctttgcatctccctctttcaacactgtactgtgtgaggaaatgagaggaaaaaatgtggcatgtggagtcacagtcagtggccacgatagcattaaatcgtgttgccactttagacatagttcaaaccaccattaaaattagtctccaggtgaagtttgcggtattgaaagtttagggtgacatataagtgtttcatagatgagggtgaaaattagacttcactgagagttcgagggtaaaagatgaagtttacccaactctggtaaactacacctgaaacaggagaacaaagagaataagaaatagaataaacctgtgctggaaagctgcataattctccaatagtacaatgtcaacatatttaggttccacttgagcaattttctcgagggtcacaaacataatggtcacctgttcagaaaaaaaaatttaatgactaaaatagggttatgattatatttaactttcataaaaaaaaagtcacagaacactgagatctgcg

SEQ ID NO: 22841 - DNA, 1157 bp, Oryza sativa
aggggggtttatttcacacctcaataggtgtgaaatatatatatagtttttgatactgtcaaaacaataatttgactcagctaatagcataatattcaatgtccactgaaattcattcaggtaagggagaaacgtgcagaatttgtacttctaaagtgcacatttgtgcggagggcatccgagtttttaaggaattactttcccagtttgattgattttatgctaaatgacaaaggcaacttctcacaggtaaatttagtctagtaattgcagattatttaactttaaccggatcatttttctcaacataattccttttgctttcagagagggcaactccagaggcctgaccatgctgatatgaggtacaaatgcaggacatatgcccgacttctacagttcatcaaggttacatgcaagttgtcctgttgtgaaaaacgatactattttacaaacagtactgttatggctacaatatgtgaaattttgcaccatattctcatgctttatattataatttttttctagaacctggacaagagctgtttgatgcctttacggaaatcttactgccattctcttaacttgttaattcgacgggaggtacaattcttcaaaaccttttttcaattatcatgatatatgttatggcatggcgttagacccaacctattatggattgagcacagttgtggttcattggagtatgtgctttatatgcatgatgacagcatgaatatatggtagatagtaccaacttgctagttgaacaagttgcaccaacatataaaaccacacatttcaaccagaaaatcttcagttaacctacattttcgtcctcattccatgtctgcaagcttattacatttagcatgcatagttcatagcctcttttgtggcatctagtatggaactatggacctatgcagaataaatgggtgcatgggagagataatgaatggaatcttttgtccatggtactatgaactgtacactctatagctccttgggttaattgggccaactccttggattaattgattattaaaccggctgattttttagtgaactgggaattaaactgcatgcatgtccagtatttgtttgcaaccggacagtggcaggcgctgtttcccttttttttggttgaagcgtcg

SEQ ID NO: 22842 - DNA, 5776 bp, Oryza sativa
ggtgacactatagaatactcaagcttgacctcctcaggaaacacttggatgacgacaagaaacgaccacaagtaaccgttaaggccttggactcacacgttacatacgaggtatgcagcaacatgggtcattctgggaatgactgcccagaaactcgtgaggaggcgatgtacatgggcaacaacaacaacgggcatcatccacaaggaggtcaggggtggaaccagccacgcccagattattaggaggtaacaacaatggtaacttctctaaccaacccttcttgaaggatctcgtttctgcgcacaccaaaactactgatgctttaagcaaaaagctagctgctaatgacaagatcctagagaacataaatgcttagttagatggctttgcctccgctttccaaaaccagctgagattccataaaatgatagaaacccaactagatcagttagcttccttagtccctgcaaatgaaactaggaggattctagggcaacccgactcctccgtagaaaatgtcaaggcgatcacgacgaggggaggtaagtccactcgtgattcgccatatcctaaccctgcaggaactaatgggatagccaaagaagcgccatctaatgactcagctgacaaagaggttcagccagaaaagaccgtgccgcagatatactgcgacacacgattgctgccatttcctcaacggagtaggaaaccgttagcggatgagcagcttgctcgttttgttgaagtaatccagaagatccacatcaatgtgccattgttggatgctatgcaagtaccaacatatgcccgttatctcaaggatatactcaacaacaagagactgctcccaacaacggaagtggttaaactgacggagcaatgcaacgacgtcatactccacaagctcccggaaaagaagaaggatccaaggtgtcctacaatcacctgttcgatcagggcacatcagtttgaccgggccttgtgcgatcttggagccagtgttagcgtcatgccaaaggacgtctttgacaagctcaacttcacggtgttggcatccacaccgatgcgcctacaactggctaattcgtcagtccgttacccggcagggatagcggaggaggtgccatttaagatacgggacttcttcatcccgtttgacttcgtggtgttggatatggatacaggaaaagagacgccactcattctggggcgttcgttccttagcaccacgggagccaacattgacgtgggaacgggaagtatccttttccatattaacgggaaggaagagaagtttgagtttcaatcaagtacgggccaaacccgtagaatatacaagtggtcgaagtggagccacccaagatggatagcctggtgaaatttatgcagaactttctggagaaggaaacaacgatgcccaggaacggttattggaagacaccggtaaaaccaagtacactggccaaaaagtcagagcagtcgactcacaagaagccgtcttccgcatctaaaccaaagaaggtatggaaggaaaagctaaagatgcccactccatcacctctagagtcggctggaaaattcgtgcactaaactaaaaggaggtacagtcctgcacgtcggacttaaaatgacgtgaccttcgccaacaggtaaaatggtatgtatccgcatatttgttttcaccaatttgaatttttgcatcaacacatgtttgaatttcaaaattacatttaggatttttgaattttgaggaaattcttcaaatgaatttttcagagcaaaccaaaataaaattttcaacgaaaattcacaatgccacgaccgcgctgaccgttggaatccaacggccaaaagtggggccggttgggcataccaggggtttggctgaacccactggtgggttcggccgaaccagccaggcaacgactatttgccatttttggtagggtaacatctagtggtcccacatgtcatttttaaccgttgtgggtaccctataaaaaccagtcggccaagagagggaaatccaccccatttcagcaagctttgatagtttccctcaaattcaaatactagttgcatacatacaagtgctttgctgaaactaatcggcaggtgaaactcttgtcatttctaaaccctgccgagttaatccgttcttgctccattgtgcagaatgaggaggcgattgtctcgtctgttcaaggggtccggctcttcatcaagtcatcatgacgagtctagcactcattcatcagctgatgtctcgatggaagacgccgaagctccgcgacgactcctgaacgataccgacctcgacctcgtcggtgatcgggaaagacaagcctactacatgctgagtgactaggaatatgctcacacgcgagaatactctccagagctgctgaaaaagataggtatggatgttgaatttcgtgctatttagaaagttgtttgatggcagagatttcctgtggtagataaacctggttctcgtttgcttactttgcaaattctgtgcactttgaaagaaatagaagatggaatttattttcgcttcttccataaggagtatacacttacatggaaaggcttaagtacacttcttggttttcacgattcctgtaaaatcgatctctagaaaggaatttctgggttcgagaaaaaataggtttcgggaagatatttctggtgctccaatttgcaagaaacctaggacgaatgacattcataatcctacactttggctcatgcacaaatggattgctataactttgtttcctagaggtgatcttagacccattaggggggatgaattgattatcatgtttaccatggtttgaaagatcaaaattgctcatgtgaaatgtatgataagacaatgattagagaatataagattttcttctcctgttgactgcacttctctaattactcggatagcaaaagggctcggggttgttaacaaccaaattgcttttatgtcagccgctcgtccgtgtattgatgagacttatctagtgcaagggcatattctgaaacatggagtagatggatctttgttatactttttctccagttgtacaaatgaaatcccgttgccaaatgcgaggaatcatttgtacaactgccatgaactaaccattcccctgcagaccatagaagaatctcgtgtaggtggagcaaacagggagacgcgcaacatgacaaggaacgaacaggaaagttcaccatcctcaacacccgtgcagatgtatgaggcaggttgggaaccaactggggatgcacccggatggacccaagctccatgtcacaacatcagagtctcaagatgggcaagtgccagtgaggaccgatggcatgcgtctcatgacatacattcgggggacaaccaacctcccagatcaagtggtgtgcctccatctcgaagtgaatagcgctcgagatcctctcgttgggacttgggtgaaattactaggagaatggatacccttgatatgcagacgggggagatccagtacaacctcatggaacatgtagcacaaacgcaagaatggcaacaatctgctgatgctcagttcgccagcatcaacgacatgatgcagcaacagcatgatgaccttcaagcatagttccgcttccaggggttcaatccttatcaaggaccctgagcgaaagccaagcttggggggagacatttcttcccccactaaggtaacttgtatcacattgcatatttccctttccaaattgcatatttgctttccaattgcatcttataaactgaaaacaacataaaaatttgcaaaatagaaaataccaaaaagataggataggtttgagtcatgctaggtaagacaagctagttctctttgttgaaatgatgaatagttgctctgttttatatctcttatatatgggttcataggtaagtgctctctcaaagattaaatataagtagccaacaattatctgggaacctgaggtaaatgagctgcacttgctaatctgagtctaagttattgcaagatacgagatagtaaataagagttactatgatcctaatcctagtttgacttaaatttgaaagttcctcatttgatataaattcctaccggagccaaaaatgtactatcatggttaaaccttatacattttggttactcgccattccattgaactttgtcaaactcttgtgacttgtatagatactcctcatgcactatgatcaatatcatacacccacatatatgcacatgctaaactcctaccaagtattaacattatattaacattggacttgggagcagtatattgatacaccctggccaaggccattcacacataatgtgattattgcacatcaatgcaaggttaaggctatgctcaactccaaatcttactgtattcattaggaaaggctgctgcatggcttgtatgattgtaggttaaagcatatatttgtgtttaaagagagagacttgactcagatcgattaccaccagtacaccaaggcaaagtaatcgtgcaagacacttgctattatatgaacttaaactatcaattggactagtgctaccatctcaaggaccgactacgccaagtcatgttgttattccatcactaagagattgtgccaagcatagatggagtactcaacatcattaaatcaaaagaagacaaaaggttaactcgtttcttgctgaattgaactttactaatgatgaaaattttataatatctaaatggtgtacatttgcatttttaagttttatgtcaaaggatcatttcactgctacaacaacgaacgactgcatcgaggatgtgatgtattgcacagaagatgaagtgacacttgctcaaattgagatggttcacaacaacgagcagaccggttacgcgcagatgctccaatttccattggatgtgtgatccagccagtcgtcttcctccatgcatgatatatatgattggaaatataatcaagtctacttttatctctaacaaacggctcgtcatttcgagttcccataagagaataatgtctattttagtggatactgcacagaagctgaaagggcccagcgaacctgctcgggaatgactcatggagacccttgagctagctcacttactttgaatttcagcagtcatgtttatccccatctagtagggttgttcgtaatataaatatcccctatgttttatcatttgaaaaacttttgacgatgagaatatgcttgtttagctatgtgctaacaaattcagagagatatctacccctttgctgttgtgatttccttgtgggattacaaaagtggtgttcgatgccccctaattggtgtttctggtccctttgaggatttttccttgattggttctaggttgtgttggttggtaacttagagtgtggttgggtgaactctcaatttaggttgccataatagagacggtggtttgcttcgagtatgatcgtcaggaaccacggttatcttggctgcttgtagctagttttcttggtctatttgaggctttatcggttcttgatcctatgccgtgaagatcgggacatcactgtacacacacacatacacacacacacacacacacacacacacacacacacacacacacacatatatatatatatatatatatgtatgtatatatatatatatatatatatatgtatgtatgtatgtatgtatgtatgtatgtatgtatgttgatcagtcaataaggattgcacttcgttgtgaagggctgcaggaat

SEQ ID NO: 22843 - DNA, 703 bp, Oryza sativa
ttcctgcagccctgaagcgcaagtatataatgatgcaagggcctaggcaacctagcaacattatcgatgtctagttcaggccattagtggatgatcttaagttactatgggaccggggtgtgcagatgtgggatgcatacaaaagagagtacttcaccttaagggcaatgttgttcgttaccatccaagattaccctcggctagcaacacatccgggcaaacagtgaaaggtggttgtgcatgtctgtagtgtatgctggaaacaatgagcatgtggctgaggtactccaaaaagaccgtgtacatgcgccattggaggtttcttccagccggccaccactactatagcaatacaagagatttcgatagcataatggaggagggtacaactccaacacaccatgacgacatagccattttttatgaggtaaaagatattgaatgcatatttggtaaggggcatggcaatacaagcgcagcgggtaagggtggtgagaagactttttggtcaccacctgggatgttaagtctcctaagatgtgtaatacatctggtcaccaccttcgtgtggtttgacgggcacatctcaggctggagttgactggcacggtgagtcccagcactatctcttatgcaatttagtgatgaaattgtattcgtgtatgtttacacattgtggagatgaaattcacttgtgtatata

SEQ ID NO: 22844 - DNA, 37689 bp, Oryza sativa
  unsure (1)..(37689): unsure at all n locations
ttttttggcttttattattatagctgccggttatttgcaggaaccgacacctatagtaccatataggtcttggttcttggggtacaaccagcacctataaaattataggtgccagttctggaatcggcaccaatgaatttgatcgtaggtgccgaccaaaaggtgtcgggcccaaaaccggcatctattaggccttaagaaccagcactaatgggtatttctgtagtagtgaacatgattcattaactagctaactactagctctgttcagtgctcccattcgccttagcaacccactctcaagaagacccccacggcctctctagccccaacaatccgaaaaatccctgttcgagtttgatctatatataccatatcaattagttctttgtggagcattcccacaaacacagagcgtgcatcaacaacaattgctcaaaatccatctcggacactcatcctgctcatccccacgcgtgagagagagagagatatagagatagagagagagagagcaagaagtgctcttgccatactcacccgcctggcccttgtgccacgtgcggtcgagtagcggggtgatcagctggacctccgcctcagcgtcagcctagtacactggccctgccagcgccaagcccgaggccaccatcgtgtggcactgaatagaggtcgatgatcaggtgtaggaggaggagatgcatgctgaagcagaagcacccactgcaactggcggcggtagggaggagaacagcggcgcagggaggaggggttgaggagaggaagcggagcaggaagaggtgtttgcagaagaccggtgaggcaacccacaagcagacgtggtgctattgccacacgtgagggcatacgcccaagggctcaccatgggtcatcgcctctgttggcgatatggcatgaggcccttcgaccaaacctgccgaaagtatgtgaccgatggggattcaagcccgagacgtcatggctagtcaaggcgaactcccccatggcgaagactatggagcaaggacggcgagaggcagggaatcccagccaagctagaggcctcctgggcgaagagcgcaaagcgaagggcatatgccgaagggggacgacttcgccgtagctaagggcccatggaccacaattatgctatgtacccatgtaaatgtccctttcataaaggcaaccatgtaaattcccctgtataaccaaagccctagtagtaagacctgtaatgggggctataaatagccccatagggccatgtaatagggggatcccaagtaaaaattctcaaattaatacactttacttcttttccaaccactgttgagtgaccacgtctttcgacgtatgcggttgtcgtttcgacaacagctggcgccgaccgtggggacctccaagcgaaaccactcagagcgaatgccaccaaaggtcgtgaaggagaaggttacaaggcgaaaggaaagcgaagccagggcggttatggccgccgaagagggagcagagccttcggcgcccatcgccgaagatggaggagcgccatctgcttccgcacctgcgccatcactaccgccatcggctcctggcccctccacacaggtgccgaacgcggctgacatggcgaaggcggctgcggtggcaagggcactccagaccaaggcagagatcctttcgacaagccagctgctggtgccccaagccgctccgtcgcagtcggcagcggccccaactgcgctctccgctgtgcaagcccaagtcaaccctgaccccgaaacacaaaccgaagccgacatggaagccatgcgacagaacatgacatgactccaagacatgcttcgccaaatgcaagaacagcagtaggcataagagacggcaaggcggtccaaggtcactttggccccaatcctccagtattggcaggctatgtcccaccccaagtctatccacaagtatcgacccagccccttccgccacaagtcgcgcaaagcaccaatgtacatcgccgggtagccatcgaccgcagcagcacatccggcccctcacgtgcaactgcaagctcaaccggtcgctgcccaagtacactctcaaccgcctggccaagtgccacaaacaatggcagaaggggcttcggctttgcaggcgcagctccaagctttccttcagcagctcagccaaccccacaacatttcaggaacagccccttcggcccacccgaaggggaatacaagtcagggtgcgcctagttggttgccgtcgaatcagccaggtctgggggcttcaccgtggagtcaaggaccgcagttcgacttcatcaatgctgctcaggcaccaaccgttcagccgcaagcatgtaacgccccgattttcgttcgggaataaaaatcaattaataatacattttctagaaattatattaaaagttaaatcaatttaatcaagtgaaattatagaggaaattaaaatttcctttaaaaaaatcttgggccgggaatattttgtaatattctttgtgccctaatgtactctccggaattttccgtgaattttcggagctcgagaaatagttttaatagcacaaagttcatttaatcaattaaaataaaaagaaaacaaacaaaattccccctctttgtctttgggccgctttcggcccaagatcttttccccctccttggcccgctcgcccctctccccttccccctccccctctcgggctctctctctccctcggcccagctcgccgctcggccctctcctccccgaagtctactttgcctccccagccggcctccctctcctctttggccgacagatgggacccatgggcccacctgtcatccccaacctcaggccggcaactgccgttgccgccatggccgccgaaaaccgcccacgtcgccgccattcccggcctcctcgagccctctctcgtgtgggaccggaagccacccctctcctccacctcctcccccgtttttccccaaaaaccggcgccagtttggcccccatgatcccacgatgcctcgccacttcgccggccgttgccgccccactcggccacgatatccccctccggggcgtataaaagtgtaccccggcctcccctcatccatttccccaactcgccgccccctcccgcgcgctctctcgagctccctacgccactctcgtgcgccgccgcacgccggcgaccatccagccgcgcgccgtcaccgcttccgtcgcccccgcactgcgccgcggccacctatagctttgcatcgtcctaccgcaccccggcatccgctccatttcccctccccgcctccgaagcaccgccgccacgcgcaccatctcttcctccaccatcgccaactccagccgcacaccaccgccaccatagccgtcgccgcttcgcgccgccaacatcgccagcttctccgccgcgcgggctagctcggccaccgctccgttttcccctttccctaccgaaaccaccatttcaccgtgcacccgaggtcgccgacatattcaccacctcttgccgccgtccccatctacctcacgccgtgccaccgcctccaccgcattcgctgcatcccaccgcccctcggccgcggctctgccgtggtcgggcgtcgtcggaacgccgttctcgtcgcctcccgtgccgaccgccgccatcctttccgccgccggtcgcctctccgtggtcgtctcgctgtcgctgccctcggtgagcactcctctccccttccctctttctccccttggccggccgcctcccgtgcttgcgcgcgccgtgccgccgccgccggtggcctcccggcccgtgtgccgccgtcactttggtcccggccgccgccgccgccagccttgtgtgcgcgctggccaggccgcgccgcccggccatccccagcagtccgatcggccttggccgatctggaccgtcgggtgcgcggccgcgtggccgatcgccaccgtggactcggtccacggtgggccgtgccgctgacgtgtggggcccgccccctttgtggacgtggtccgcgcctcaccccttgctgacgtcagcgaggtccatttcctttgtaaaaataaataataattgcgcaataaatcgagtttaattctagaagttcatttaaatggctcaaaacttctaaaattcatatctaattcattcgaactccgaattgagccattcaacttgcaaaattcatctaaaattgagctctacaggtttgtttactttttatatactgtttccttggtttttattagagtttttcgtcgttttgcgtgccagcgtgtagttcccgtcgtttcggaagatcgcgttcgcaaggataagagttcagaagatccaagtgaagaagcaaggcaagtcacacattccccttgagcatgttgatcccaatttataaatgttttaccgtttacaaagaaatatgcatgttttgctaattacatgggatccgggtattacctatctgctcgcttgtgccatgtttacttgatatctgttctttgtcaaccttgggtaatgaatcgactagctcatgttacttatgtgacctagctagaactatatgcttagccatgcttaattaccactagctcagttgatgggataattacagtattagaccttttctagtatcttgttgagctgcgtgctcgagacatctggccatgcttcatggtcgtaattatccaactaaaacgcgactgaatggtgggctgtgggtgcatggttttgttggtcgcacccatggcagttaaggaccggttcgcgggatgccctggaagaacttatcgtacttaccacaagccagcgtgggcaacgactgggcttgtaacgtagctttcctctagccgacgcaatcaggcaagggtgggcgtgatggagtttggatgggccctgcgaaggcctatgcggcttccggattcacctaggcatgagaggggactgcccgctgccttgcgaggagtgggggtgaaacctgaggtgtggtgtgcttggttagagggggttatgcgaagggtcctgtcacggcctctttccggtatgtcgtggtggcatgtcggcgcacggaaacgtgtcgtggggctgtgtcttgtgggtacagttgtacacctctgatcagagtaaaactattcgaatagccgtgcccgcggttatgggcggtcaaccagattcaccgtgattagtcccatcttaataaatcgacccaatacactgtagttcaggtgggttggttgggcctgttcaacgtggtgtagcgttgatcagtggagattaaatgttactttaattactcaacagttttactgttttgctcaataaaatgttttacaaccgcctttatgcaaatagccacaaacccctccttgtatccccttgcatgtctgcatcgttggtgtggcttgctgagtacggtggttgtactcagtcttgctattattcccccttttcagaagtgtagtgcttctgagctgaagatggagttagaggaccaaggctcagaccccagttgagttttgcctgtggagtggagctgaagccccgctaggatcgcctttttccgctgctgctgcttttgtttcggtgtgaggactaagtgcctcttccgtaagtattttacgctttatttacgtttggaactgtatattacttgtcgttttgtgtaccctggctggtcctggacagggatttaatacgcaaaatagtctggaaatttgggttaaatttctggacgtgacaaagcaccaacgccaggcttcagagcaaaccaagcaccaaaccaggtcgccatgacatggccacagccaactttcgacccatccatggcggctcagcaagcatcaccaatcgaagccgggcagccgaatgccatggcccaacctcacgcgcaagccgtgatttcgcccttcaccacgctgtacccgcagcaaggtgctgtgaatagggcagggggcgaaaaggggctactgctgagtcggggaatcaagacccgtccgatcccaccccagttcaagttcccacccttcccacgctactcaggtgaaactgacccaaaggaattcctctccatttatgagtctgcgatcgaagcggctcatggcgatgaaaataccaaggcaaaggtaatacatctcgctctagactgcatcgcccgttcttgatatttcaatttgccagctaatagcatttactcatgggagcaattgcgcgatgtctttgtccttaactttcgaggcacctatgaggagccgaagacgcaacaacatctactcggcattcgccagaggccgggggagtcgataagggagtacatgcgtcacttctcgcaagcccggtgctaagtccaagacataaccgaggcgtctgtcataaacgccgctgcggccggtttactcgagggcgaactcacaaggaaaatcgccaacaatgagccacagacgcttgagcacctacttcgcatcattgatgggtacgcaaggggcgaagaggattccaagcgacggcaagcaatacaagctgagtatgataaggctttcatcactgctgcccaagcccaagcacaatcccaggttgccgaaccaccttctctcgctgttcgccaacctcagccggtgatccaaggacaatcaccaaggctaggccaagcccccatgacctggaggaagttcagaattgaccgtgcgggcaaggctgtgatggctgtcgaagaagtgcaagccctccgcaaggagttcgacgcccaacaagcaagcaatcatcagcagccggtccgcaagaaggtctgaaaagacctctactgccccttccacggacgctcttcgcacaccacggagcaatgccgaaacattaggcaacgtggcaacgcgcaagatccaaggccgcagcagggagcaactgtcgaagcaagtcgtgaagtagttcaagaacaagcacccctagccgaacagcgccaagatgcgtagcgaagagtaatccaagtgattacaagggccgacccgccaagccagttgtccaaacggcagaataagatgcagatccgaacggtccacaacatcacttcggcgggtgcaggggccccgcagtatctaaactagctaatttcttttgggccaaaagacgccgaaggagtaatgttcccgcatcaagatcctttagtgatctcagccgagatagctggcttcgagatccgacgaatcctggttgacagagggagttcggccgatgttatcttcgccgaagcatatgccaagatgggattgcccaccctagcccttaccccagcaccggcctcgctccgtggtttcggtggagaagcagttcaagttctacgccaagcacatttgctggtagccttcggaacgggcgaaaatagacgcgaagagcaagtattgttcgacgttgtcgacatcccatacaactacaatgccatattcggctgggcaaccttgaacaagtttgaaaccatttcccatcacaattatctcaaactcaagatgccgggcccagcaggagtgatcgtggtcaaggggcttcagccttcggttgcctcaaaaggcgatctggccataatcaacagagcagtgcacaatgttgaggccgaaccgcatgaccgggcgaagcacgcggcaaagcccacccctcacggtaggataatcaagatacagattgatgatgccgaccccacaaagctcgtatcgctggagggcgacatgggcaaagaagaagctgagatcatcctagaggtactcaagaagaacattgatatcttcgcctagggccttgatgaagtgggaggtgtttcgacagatctcatcatgcatcacctggcagtcaagccggatgccaagccaaggaaatagaagctacgcaagatgtccgccgatcgccaagaggcagcaaaagccgaagtccaaaaattgctcaaggctggggttattcaagagatcgaccatcctgagtggctggcaaatctagtgctggtgcggaagtcaaacggcaaatggcgcatgtgtgtcgatttcacagacctaaacaaagcatgtccgaaggacgattttcccttgccacggatcgaccagctcgtggattcaacagctggctgcgaactcatgagcttcctggatgcatattccggctatcatcagatccacatgaacccggccgacatccccaagacagccttcatcacactatttggcaccttttgtcacctcaggatgcctttcggcctgaggaatgccggagcaaccttcaccaggctggtgtgcaaggtcctttacaagcagttggggcaaaacgtggaggcttatgtcgacgatatcatcgtaaaaagccgtaaggctttcaaccacgcgtccgacttgcaggagacctttgacaacttgcacgcagcgggtatgaaactgaatcctgagaagtgcgttttcagcgttcgcgcaggcaagttgttgggcttccttctttctaaaagaggcatcgaggcgaatcccgagaaaatcgatgccattcagcaaatgaagcctccgtcgagcgtacgtgaagtacaaaagctcgcaggccgaattgtggcactcagtcgattcctctcaaaggcagccgaaagaggtttgcccttcttcaagaccctccggggcgcgggaaaattcaattggacacccgaatgccaagcagcgttcgacgagctaaagcaatacctgcaaaacccgccaactttgatcagcccagcaccaggaaacgaactgctactatacctggcagcttcgccggtgccagttagtgctgccctcgtccaagaaagagattcaggccaaaaatcaatctatttcgtctccgaagcattgcaaggagcgaagacaaggtacattgaaatggaaaagctcgcttaagccctggtgatggcttcgcgcaagcttaagcattacttccaggcacacaaagtcatagtgccatcgcagtaccctttgggcaaaatactctggggcaaagaagttactggccggcttagcaagtgggcagcagagctatcccctttcaacttgcattttgttgcccgcactgctgtcaagtcccaagtgctagctgactttgtggccgaatggacaccggcactcgcccccgagcccgaacctgtcgaacagccctgggtgatgcattccgatggttcgtcttcgcacaagggggcgagcattgcggcagtactcacttcgccaattggtgtgctgattcagtatgccgcaaggctgcagttcgacacaaccaacaacgcagcagaatatgaagccattcttctaggcctaagaaaggtgaaagcattgtggattcggctctagctaatccgaaccgactctaagctggtggcgggccatgttgacaagtcctttgaggcaaaagaagaaggaatgaagtggtttttggaggccgttcggtctatggaaaagtgcttcaccggcataacggtcgaacatttacttagaagccagaacgaggaggcagatgccttggtgaaatctgctgcttgtggtggcccacattcgcctggcatcttttttgaagtcctatatgcaccaagtgtgcccatggacagcttggaggtcatgacaattgaccaggtgaaattaggcaaagacccatacgactggcgaaccccgtttgtgaaacatcttgaaactggttggcttctggaagacgaagcagaagcaaagcgcttgcaactcagagccacgaagtataagatggtctcgggccagctctatcgctccggggtacttcaacccttgcttcgctgcatccctttcgccgaaggggaggaaatggcgagggagatacaccaggggctatgtggcgtgcaccaagccgcaagaacagttgcctccaaagtgtttagacaaggagtttactggcccactgtgttgaaagtctgtgttgagcaagtcaagaagtgcgaaagttgctagcgtcatggccgaagccaaaccgcacccagtatgagttgcagcccatcgcatcaatctggaccttcgctagatggggactggacatcattgggccgttcctggtggcacgaaacgggtacaagttcgcaattgtggccgtcgaatacttctctcgatggattgaggccgaacccctcggagcgatcacttcggcagcagtatagaagtttgtatggaaaaacattgtttgccgtttcggagtgccaaaagagttcatcactgacaacggcaagcagttcgactctgacaagttcagagaaatgtgcgaagggcttaacctggaaatcaggtttgcgtcggtcgcgcacccgcagtcaaatagggtggccgaacgcacaaatggtaagatcctagaagcactaaagaaaaggcttgagggggcagtgaagggcaaatggccagaggaaatgctatctgttctatgggccctttggacgacccccacaagaccaaccatgttcagcccattcattcttctttatggcgatgaggcaatgaccccgacaaagttatgggctaactcaccaagggtgacattctctgggggcgaagaggggcgcgagttatcgctcgaactcttggagggggtaagagtcgaagcactcgagcacatgcgcaagtatgccacagtcacttcggcaacttacaacaaaaaagttcgaccgacggagctgttgcctggtcatcttgtcctaaggaagaaggtgaacccgatagccgttggcaagcttgaatcgaattgggtaggaccgtacctcatcaaacacaagtccaggacggggtcctttcgactagcgacagtggaaggtgtcacgcccggaatttctatccaaaattccaaacgcttacatgtgtgtaaaccctcgtccaggaatcagccgaggcacacaataacaaattgataatagagtaccattattactctaattaataagcgaataaaatgtcattacagaggtggatagttcctctcaatcaataaagatctaagcagcggaaaataaaataaacggcgcagacgactccactccacaggcaacttgaccagcgctacacctaatcctccacaccatcagcatcattgtagaactcttcctctgatgaatgattgcaaggtgagtatatgacatactcagcaagtcacgcagcaaatatgcaagtgcacaaggataccaaagaatggcatagtatagggctcatttgcaaaagcagcctttagcaaatatttgagaattataaaacagttaagtgataattaaacaatattaatccaacgctatacaacataccctgttgcataggcccaaccattctggacaaccatacccggctgtacagatctatctccaaaccaggaatattccattccaaaccaggagctaaacaaattattaccaattaaagcatcatttactatggtgagaagtgtgagactaatcacgaaagacattgttagacccgcccataaccgcgggcacggctattcgaatagttttactctgatcagaggcgtaccactgtacccacaagacacagccccacatcatgtcaccatgtgcctcaataccaccacggtacctcggaaaggagctgtgacaataccccttgcctaacacaatccaccacagcgcaccatttctggatcataatcacccccttataaacaaggcatggactccccagcgacccccccgtgggcttatctccgccacttctcagtctggtgctccgcaatgaaccatgctatacaaaagataaagccgttgcccacgctggcttgtggttggcacgattaatgtttcacaaccgaaactcgtgaaccggtccttaattgccatgagcacgaccttcaaaaccatgtgctcacaacccaccattgacaagttttaattatcaattaattatcataacacgattaaccatcgtgagctaccattaaatataaccataaataataatatagtatgattcatcccattagtgagctaatgtttctaagcatggctaagcaattatatatatagcatttagctgaaccaaaccaatatataaggttctagctaatcaaattataacccacaggaaaataaagtcatcttcggccattaattaattgggaaaggctcaccacccgatgacattcgaaaataatgcataagttgaaataaaacaatagctttaaacaggttcaacatgctcaaagggttgtttgggatctgtgtgacttgccttgctggccttggaactcttcaaattcttctcctgcgaaaacggactctccggaaacgtcggaatctaaacagaaaagagcaaaaataccaaaacagcacataaacaagcatgaacagtacatgtagatatttttaacatgtagatctcaattttagaaaaatttagagacttgaaccaactaaatccgagctaagatgaattagttatgaatttttgaagatttaatctattagaaaaacaggaaaaagaaaaacgatgatgacgtcatgatgacctaatcaatggccggaccaagatggcgacctcgccggagattggatggtcggctgcgactttagaggacatgtacacgtagaggacgacgagacgaacccaacggtactcaccctcgaaccaaacgacgaacgacgacggccggcgacgaggtctagcggcggcgcggcttcggtcgacggtggcgacggggctccggcgatcggcggcttcgggggtcaggcggccgggcttctctaccctcccgcgcaccttacggcggtgacggcgaccggcggcgacggcagaggcggcggcacgacgcggatggagctcggccggcgacgacggcggggtggagcacgtggcggcggcgctacgaggcacgggagaccacgggatagggggcaaacgaaagaggaggactagggggtcctatttatagccttggattgaagagataggactcctcccgcaagaaatcgatccgggaaatcaaaaactcggttttggagataaactcgaaaacgagttcgatccggataagatactcaacgattaactccgatttttgggggtaaagatagaggaggataagaggaatatttcccctcaactaattttagaaaaacacaagagaaaaggccggatttggtggaggaagcggcggctgcacaggtacaggacggcagctcgggcttctgtccaagcttgaagatgaacagtacatggggatgcaaattagactttctgctgggcttctacttccaaggactgattaaaggagggacaaaaagcagactttgggaaagagagggaaagggctgtaggctaagaggagattgggccgagaatgagaggacttttcctaattcggcccgaaaaggaaaaggtgaattttaattacttttccaattaaattaatcactgaaatgatctttgaattgttaaaaataattctattgctcaaataattccaagaaaaatcttgaacatacttggacactcaaagtatttaatgaaattttatctggccctattttatattggaatttattaattaaaattagatcttctcttctaggcttttaaaatcatttctaaaaattccaattaaacaacaatttatatatttaggatttttagggtgtgacagaaggcgaagagttcgaccattcctagaacgctgcctctctcaagcgttttatgtctagaacgagtggcacccaaatcgccaacttgtaaaaatgtatatatcactatgtaaacccttcggcactatgtaagcctttcggcaagaaaaaaagaagaaaaaaagaggaaaatgaaaaaagacaaaaaactggatgtagggctattatccaccacggaagcccgaaccagtataaaatctctgtgtcctccgccttctttttgtttgtctatgtgactgataatttgtggaaaaaaacccaaggcaaacgcctgatcagcgaaaaaggccagggggcgaaacgaatcggcggaagcatcgctcaccgaacgttgaaaccgcaacagcttatttcggggaacaactagccgaacaccgttacactcgatcaaaaggaaagcacgagtgcttcctacaacgtagaacaaaactgatcgaaaacggaagccgaaagctgaaaagtcaaaacctatttcgctaatatacgcaaaggggccgacacgtttcgacccaatgaaagcacgtgaggtgacaatgcaaaaatagcgaaaaggaaataaaacacacctttattgattttaaataaaaatgtatcaaagaatacaaacccgacaaacatggtacaagtgaaaagaaaagagcaatggcactacagcccagcttacagataaattacattttcacccccgggatcaatatctctctctaaggaaaggtcaggcgaactaggttcgtcatcactactaatatcatacacgaccctaagaggagaaggaggcgaaatacggactagactgtaacgacgctgggagattaactcatgccgatcagtcttctgatggtttcgccaaaagcgaaccatatcctctagtcgtcttgtatgaacaaggtcctagtcttctaaggttcgcccggggtgcgcccacatccagccggcgaccttaaacaccttatagctgcggtcgtttatcaccatttcatgataaacatgccgaaatggacatcgcaccttcggcaaacccttcaacgccatgaacttctcgttgctgtttcgccaattttcagcgggaggtcgaacgcaaacctttcggccgcacgcctgctagcaaagtgccaaaaaaggagaaatacaagaaagaggaggggacgaagatcagccccgatttcaaacagaacaattaaataagcgaaagggttatactttgccagtagaacagagactatattaaatacaaggcgaatgcggcttaaagtcgaacagacaaaaagtctatatacaaaaacataggctactagaaggtcagaaaggattaaggaaaaaataaaaataataaaaagacacgagggcgaagggcctcacacctcagggtggtcttggcctccgtcaccttcgcccttgtgcccagtggaccgttccgacggcccgggatccttttcgaagttggcggcagcagcctcctcattcctcgcgatcctttcaaggttctcgcggagtcgaatctttgcacaatcccggccgccatcctcccaaaaccccttccgaaaggcccttaatgcagctccagagcactatgtgttgctaggccattcttccttcacgaaatcgggaaaattcccgatgtggtcgtagctgtgcgtgtgcaaaaggctgagaacgaaccccgccgaaacacgagcgcaacagtcctcgtaggcgcctgccacttcgacaaccaagccggccgcgtcctgcgtccattcggagaaatcgagtgcagtcccgccttcgcccggagcactttccgcccgcgccccaaggtcgttaagggccagccggagagtgtaataggcctccttggcagactctgaggctggtaccagggtcgcggcagtagcatcggtgacgcaagacgggcttcgagggatttaatcttctcctcggccgaagcaagttgttggtctcattcggtgtcccgcttgcgtgctgcttcaaggtcagagcggagagacctgttttcagcattcgccttcttcaaagtctccgccaccacgcgtctttcgtcttccttgtggcgaatatcttcttcggatttacaaagataaaggcggtacccatctagtcgctctaaggcggacttcttggcacttaggtgcacggcaaggccctggtaaaaaaagacatacattacgttagagaactagcgaaagaggaaaattcagcacacaaaaataaaagtcatacccgcacaaataggctctccacagccgcgcagctttcgccgaactcgttcagttcggtgaagagcccaaggccttcggtcggtgctatgacctggcacaccccgtccactcgttcagcggggacgaaatgtggggcggtaagcgtcactgtcacgtcccaaaacgactctaaaatacatcctctaaattatgcctagcataattaaaatccgtgtgaaagcctccaacaattaaaatgtgcaaagttaaaagtcaaataaggcttggaggatttttgtatatttcctaaaagcctaaaatgcgtaaataaattttagtagaattttcagagcacaaataataattattaagaaataaacaaagttaaaatggttttataaaaagaaaagctctaaaaagtcccctttccctccctctccctcttgggccggctcggcccatctccctccccctccctctcctttccccgcagcccatccggccttcccccgcgcgcgcgccgctgacgggtggggcccacccgtcatccccttcctcccgccgctcccgccgcctcgcccgcgccctagcgtcgccgtcgccgcgaatcccgccgcctcccgccgtccccgcgtgcaatcaataggggggaattattccccgtgattccctctccctttccccccacttttccctctctctttcgtgttcaaacgggcggatttgcccccgcaaatctcgccggcgccattgatggcggccggacctcccgcgcctattcctcccccgccggccgccctctcccccttccaaccctatataaacgctccccgcgcctcctccgtccgtttccgcctctcgccgcccttctcctncgacggattcaagctcgcgccgtcgctctctctctccgccgtcgccgtcgagctccggtctgccgtcgtcgtcaccccggaccatctcccaccccggcgtcgcctccttcggcttcgccacatcctcggcgacctcgtccacccctccgtttcgctcgccgaccgccggaaagccgccgtccccgtcgacccgagccgcgccgccgccttcctccgctccggctacctttccgtcgtcgccgtcgaccaagggtgagccgtggaccgccgcttcttttcccccttcccttcccctctctcggccgccgctccgccgtgcctatggccaccgccggcgaccataggggcgcgggcgcgccgcctcccgccggctgtgccggcgtggccgccttcgggcgcaccgtgcggctgccgcgtggggcgcggctgtcagccgcccgcgcccttgggtgcggctgacgcgtgggacccacggcgccggccggtgtgagcccgggtgcgcccggtccatcgtggaccgtgaggctgccgcgtgggccccactcccgtggacccggtccgcgcgcccctctcctcggctgacgcaataaacctttttttaattaaaatttaaatgaagaaattcgcaaatattcatttaaagagcatataaacttcaaatggccataacttggccatttgaactcggaattggaccgttcaagtctctaatttttccttaagaagtcaagaacccatttttgtgctttgtttcagcttgttatatggagtttattagaataaaagccttttcttttccgttggttgtgtagacgctgcagcttcggaagatccgctcttcgtggaagttgaagccgacgtttgggaaagcgagtaaggcaagtcacatcatccttgaacatattgaatcccagtttataaaattattttgatttaaattattgcattatcgctttacttaaattcccgcgttatcactgttttatctagccatgcctatttacctttgttatgaccttattattgttattgttattatttccttgttcaccctagaataaacaaaaccccaactagtggacactctactcatggtaccactagtatgattttaggtagatgcttcgctggttaattaggcaacattaggtggttttacaactctagactttgggatattcatatcacctggacactatggaatggtttgattattgtggaattggattcacacctccccctctattcaaaaccctcaaaatggttttaggctgggctcggagtgcatggttttgatagtagcacctcagccatataaggaccggtcttcgggcctctgttgcaaagcactaccgtacttccacatgtctagtgggtaaggcttagtttgtggctcagtctggttataaacaaaagtacacggatggagatggacgaagtcaggggtcgatggacatctctaggacaaatgaaggctacacgagctgcggcccggtagtcgagatgtcatggcacagggccggtgtcctgctgctaggggctcagtcttgcctacctgtcccgggggtcccggccgtaggtggggttgggtcggtactcttgtctatggctaggatgggttggaaattatgtcacgtcttccgtccgtataccgtggtggtatgtggcctgtggttacacgtgaggaagatgtgtcttgtgggtaaagttgtacacctctgatcagagtattatctattcgaatagccacgccctcggttatgggcaagccgagcaatgtacccaagttagtgttttaattcttaaaccctgcttaacaactaaaatgtggaatggttggcctgggttggcttgggacgagctaggacctagggtcgggttgccagttcggtctgaatcatcgtaggccttgggttaaggcaggttcatgtgggttcacggccttgtttaataatattgtatagctctggaatcgtgtttacaaaatagctttgagcaactaagtgtcttttaatgctgtttactgcaaaacctaaccctttatatcttaacccccttgtactcccttgcatttatcctgcacttgtgggtgtgtcttgttgagtacggtggttgtactcagtcttgctcaatttttcccaaacccagaagaggagcccttagaagatgaaggctttggtgtctagctcttgcctgccgtcaagcgcctgtggtcgtcgccctagtcttccgttgtttctcgtttgtctttgtgtgtgctgggccttcgctgcccatgtaataaattaactatttacgcttccgcttgataaactctgaaatgtatcaacttttggtgtaccttgcctcctgggacaaggaataatacacgcacgtaaggaacgcccgttgggttaattccggtcgtgacagtcacgtccgaaacgctcgcttcaactgccggggccttccactcctgttgacgaataggtgaggggaccgcatcaacccattcgtcttcagcaacgttggccccagcgtccggggctgaggcactcctgcccgtcgccgcttcggcatcgctagcgggtggcagagacatgcgcctgccacgggaagttgcgcgccgcaacaccggcgatgtagtagtcccgtcggatccttcgctgtcggaaaagccatggccgacctgcacaaccttccctttcttctttttccttttaacagtcatcaccggttttcgcggctgtgctggagatcaccaagagggtgttcgccacgacgatatcttgcggtcgcgtaagtgaaacatgagatcttgccccagatttcgcaggggtagggctgggggtataaccatgagagccatcctcctcagaaccggcctccgcattcttctcttcttcctcctccccatcactttcgacggcggccttgcgctacggcgagttcggacttggccgcctttcgcgaccgcacgcttgcgctttttcgaagtgccagcctcgtcatcaccggcccgagaggggttcgatcggcttggcaattcgccggtatagacatggttcattcggccgtcggcttggcgctggagcaagcgggcgaactcggccgtggttagagctccgatcatcttcaacgcctcaatctcagcgtcttccaaagtccgcactgtgaaaagagaagaacacaaccgtttagcctaaaaagcgcttccatgaaggaagtacgcggcctaaataaaaaaaaaaccttactttcggccccggcggggagaacaaggcggggaagcccaagaacttcttcgccctcgttcacggaaacgtcccacacacgggcgagaggggaaatccgaaggagacaaaactccttgcagagatcccgggtgcttagccgccgggcaaccttgcgaaggagaatgagccgggactcgacagtcccgttgatctccacgtttggcttcgcgttgatggagacagcaaaacgctcaaaaagcagcctgttcgcctgagcatctttggcagagtaggggttgctgatatagaaccatttctgcatccagttcctgtcccatttcgccatcgaagcaagcactggccaagcatctgaacgctccggccgcagcatgaagttcacgcagctgaaaattgttttcctcggacccgccggcgtctgcacgtctttggttgaggcacatgcagtaaacagagcggcgaatagctcggcggtaggggcgaacccacaggtccgacacatccaagcgaaaagcgccagcttcgggaacgccaacgggctaagctggggaagcctaacctcatacatcgaaagcaccgaaggcaagaagttgtcgcatgggaggcgaagcccagtagcgaagtatgcggcgaagacaaccgttcgcccatccctaggcaagggaacaacggcctcgcccccgcacgatccttggccctctgtgagagaactggataataccagttcgccaaagtcggcctctttgacaagtgacttgccaaggaagcacgaccatccttcgccaaggctcctaggatcttcaccagttgacccggccttggtaggcttgcggggagccattgggctcgtagaacaggaaagagaggtaaaaagccgaaaggctaggagcacgacgatggcgaaaaagataaaaaataggagagcgaagagagcacggagcgtgtcaagtggtaaaacggggagagcacggggagagtgaaaaatggcaggccggtttgggggtatatataaccccgtagcgagaccgttcgcctgccaaccaattgtcataccttaaaaattcaaaatatataaattgttgtttaaatggaatttttagattttattttaaaagccttgaagagaagatctaatttttaattaataaattccaatataaaatggggccaaataaaatttcattaaatactttgcttaattctataattcctagatttttctgggatttatttgagctaaggaagtattttttaataaatggaattgcatttaagaaataatttaaattgaaaaaggttttaaaaagtcttcttttggctttgggccgaaagtcggcccaaaacctctcttctctctctcctcggcccagccggcccagtccgcagccgcagccgcccgcgcgagcgcgctgtcgctgacaggtggggcccacctgtcaggcccgtcgtcttcctccgcccgaaaccctagcgcgccgccgccgccgtttccttccaaatccggccgctcctttccatttccggccgaattgatagaggggaaatgatcctcgggatctcctctaccttttctcttttggaaacatcggctaatttgttttggaagttcgtggaatcgagttcgattcggatcggtctctttcctccgaaccccgaagtttccttctcgtcgccggtcgccgtgggccttcgccgccgcctcttagcccctttaaaagcttccccggtttctcctctacccgccgccaccctcgccttcgcctctcgtcgtcgaaaacgccctagcgccgtgtgccgtgcgctgccgccgttccagtcatcgtcgtcgctcgggaagatcaccgtcgtgatcgccaagtcgccgccgtcctcgtccgctccttcgccgtcgccgaagatcaccggagcaccgccgtcaccgtcgacctgaagaccgccgccgtttcttcctcgtcgtcgtcgccgtccgttggtcttccgccgtcgttttggtcaccggtgagttcgccgcgtcgctttacccgttggtgtcctccgttcgtgccgaagcgccgccgttcgccggcgacgtgcgccgtccgagccgtccgagccgccgagccgccgccgccggtggtgacgtcatcgccgacgtcatcggggccgttcgctgtgagccggtcgtggaccgatcgatctcggccgtccgttttggatcaaatcgatctcggccgtccgttcgcgtgaaccgtcgcccgtgcgcccggtccaccgaaaccctagcccgctgacgcaataaatccttttttccttttcaaaaataattcattattgcatcataattcaattaaaatcaatttaagtgttttaatccagtttaatctttaaaaattcataactaattcatcttagctcggatttagttcgttcaagtctctaaatttttctaaaattgagatctacatattaaaaatatccacatgtacttttcatgcttgtttatgtgctgttttggtgattttgctcttttctgcttagattccgtcgtttccggagagtccgttttcgccggagaagagtttgaagagttccaagaccagcaaggcaagtcacacagatcccaaacaaccctttgaacatgttgatcccatttaaagctatggtttctattcaactattgcatttattttcgaatgtcattgggtggaattaacctattgtttgttatagccctttttgatcttgattactttgttccttgataccttgggttattataacttgactagttgggctgtgtatactggttcaactagatattaggtataattgcttagccctgcttagaaacattagcacactattgggataacttatgactcactattatctaatgatggcttaatgatagttcacgatggtcaatcgtgattgattaattaattaatgtgccaactaaaacctgataatggtgggttgtgagcacatggttttgatggtcgtgctcatgacaattaaggaccagttcacgagtttcggttgtgaaatattaaccgtgccaaccacaagccagcgtgggcaacggctttatcttttgtatagcatggttcattgcggagcaccagactgagaagtggcagagataagcccacgggggtcgctggggagtccatgccttgtttataagggggtgattatgatccaggaaaggtgcgctgtaatggattgtgttatgcaaggggtattgtcacaactcctttccgaggtaccgtggtggtattgaggcacatggtgacatgatgtggggttgtgtcttgtgggtacagtggtacacctctgatcagagtaaaactattcgaatagccgtgcccgcggttaagggcgggtctaacaaagtctttcgtgattagtctcacccttctcaccatagtaaatgatgctataattggtaataatttgattagctcctggtttggaatggtacattcctggtttggagatagaactgtgcagccgggatggttgttcagaatggttgggcctatacaacagggtatgttgtatagcgttggattaatattgtttaatacttaactgttttattaaattctcaaatgtttgttaaatgctgcttttgcaaatgcaaccctactatgccatcctttgttattctgtgcacttgcatatttgctgcgtgacttgctgagtatgtcatatactcaccttgcaatcattcatcagaggaagagttctacaatgaggctgatggtgtggaggattaggtgtagccttggtcaagctgcctgtggagtggagccgtctgcgccgtttatcttatttttccgctgcttagatctttattgtttgagaggaactatctacctctgtaatgacattatattcgcttattaattagagtaataatggtactctattatcgatttattattgtgtgcctcggctgattcctggacgagggtttacacacatgtaagcgtttggaattttggatagaaattccgggcgtgacaccaatcgagctctgacacgtgtcaaagggcagacgaaacggtaaattcccatcggaacggtgctgaacagtaaaaagcccgattacggagaaggaaaagcccatagggcccattactattcatagtaataaaagagactaaataaccccccttcgacgttttgcaacgaatgcgaagacgagatttctctcaaagaaattttttctaagcatagaaacaaacaaactttacttgcaggaatgatattggtttcggcaggagcaccggtcgaaagggggcgccacataccataccacatagtttgcacggtctcggctgaagctcctatctcaccattgcccctgaggggcttgttggcgatatggcatgaggcccttcgaccaaacctgccgaaagcatgcgactgatggggattcaatcctgagacgtcatggctagtcaaggtgaaacccccccctcccatggcgaagactatggagcaaggacggcaagaggcagggaatcgcagccaaactagaggcctcctgggcgaagggcgcaaggcaaagggcatatgccgaagggggacgacttcgccgtagcaggttcggccccgggagggccgaagaagctatcctggcccatcaagcctaggggtcaattgggtcgacaataacccgtcggcctgctaagggcccatggaccgcaattacgctatgtacccatgtaaatgtccctttcacaagggcaaccatgtaaattcccctgtataaccaaagccctagtagtaagacctgtaatgggggctataaatagccgcatagggccatgtaatagggggatcccaagtaaaaattctcaaattaatacactttacttcttttccaaccactgttgagtgaccacgtctttcgacgtatgcggttgtcgtttcgacaacagcctcctcacccggttttgcttatttctatagaacagaggtgttggcgactatgaacgccaaatttacgctgtcaatatctacataaatctaaaaagataaaacatccaacatagtgatagggtttaactctaatgatgtccactagcgttggtgtatatttggatgcaggtaacaaatcatcaaagttgagacaaaagatatataaagacagaggagaattaaacatccatggatgcttaggatctccatattcctaaggcatctctaggcctttaaataccgctcctcttcctcattcacaacacactaagcatgagctgaattacaagaggcactattgcgctttattataaactagattagggagcgagtaaggtagaagaactcagaggaattccggagttgtcagtaatcttctcttactttatgtaccttgttaattactctaatttaatagaaatattcttttgagtaatcaagatttactttgtgagaattatatcttagctagttcctattagcatattggattaccgtcactagtaatagtgttactttagtgtctagctaacattacagtagtacttgacattgtagatgtggtgtctatagtatttgagtacctgtagttgctgcgtatcccaaagttcgttagaggttggtgcagaggtagtgatagccctcaagagcaccgcaatcctccctgttcaagtacgaagtagagcgcgttctggtagcaatgagcaagtcagtgcctgaagtagtgctataggattaaacaagctttctgtagacacagtttctcactaggaaatcctctctatcatttgcctatcattgctttgtgtccttggatgaacctggagaatagctcagcacacacgttcctcatggaaatcgataccttggaatactcccgggtgaagtactacatcggtatattcgtgagcctgcggattctatctgtaacattaagaaataccaacaagcatttctggcgccgttgccggggaacggttgttgtttatctccgaaccttgttcatcctcgtatctttttagttttcttttttctacctctacccctgctacccctagagaagttttcctataaacaacttctttaccttggagcaacaacctatctttagattgtctgctcccacgggcgaattctataagccgcctccgtcttaggaaccaattccatccaccagctatttattccgccttggcttaatagccataggttaggaacgatccctgtcggacattctcgagcgtgagtcattcgagaaggtgatgttaggtatctctgttcgtttcatctaaaccttttttccatcttcctgaaaccaaacggccttcatcgccctcgatcgagcctaagccttgtcactctggccatcggaatgttgttcttattaatcatcaagaaacaacccgaatcttgcacaatacatctcttggaaaggagaaccttcaggtcacggacaagcttgagacatcgactcttgaggatgaaacaaaacattccacaaatgagtatgaaaatttctttcaaaattcccaaagattcacgctcgcataaggaatcctcagagtcctgtttgattagtaccgcttatctgtgcgaggaccacatccaccttacagtcctcatttctaacatgtttagatgggtggttgttgatatttctcaacgttacagatagaatccacaagcgcatggaagataccgatgtagcacttcacccgggagtattccaaggtatcgatttccacaagaaacgtgtgtgtcagctcttcaccgagttcatcgaaggacacgaagctaagataggctaagggtatagaggatttactagtaagagacagtgtctacaaaaagctcaatttaatcctaatgcaatactttaggtgctagctagcccgctgctactagatatggctctacaacatacccggacagggaggactttagtgttttgagggctatcaccagctctacacccacctcaaacctactgtggttatacgaagcaaacaccggaaattaactacccagacaccatgtctatgcagcttaataactactttagtgttagctaaatactaaagcaaccactatattttactgtattatagtgatcagtgatcccgtatgttgattaggaacgaactaagaggtaactctcacaaaataaatcttaattactccaaatgatatttcaattaaaatagagtaattaacatagtaaaagaaaaaagaagaggattaccgacaactccggaattcttccgacatcctttactctactctctccctaattctagtgtacaataaagtacaatagagtctcttataattcagctcaagcttggagtgtatgttgaagtgaaggaagtgaagcctttatataagtaggtaatgacggttaaaaaggtcggtaatacactccaaccgtcattggggataaatctccaccgtcctccaaaagccctggatccaactgcgagcaacaaggttcggccgaacctaggctaggccaggcagcctccagccttagcgatgggcctattctctgataattcgatgaagttcaaggcccactcttggatagataaaagtattccttcactgaagtctggttttcatcccaactttgatggtttattacctgcatccaaatatacaccaacacttatggaatatgttagaattaaaccctaccactatgttggatgtgtcagttatgatgtgttatgaatgtattcgcagcatagaattggcatttaacggccgccaacagtggttgtgaatgcttatgtttatcctaaatactacaaaatctcgtttttattcgtggcactaatcttgcagcatgatgtctccgtggtcaagcttgtgaccataaacaaagcgctgccgggagatagcccggattaccgtggtaagtttcctttcgaatagaagcaagacccagttcttaggatagtacgcacctttgggtattcttggttcctaactatttcaggttgagattaagatagagggccatgcgatgcctaagaacacggtagctacatcaactgtacactttgatgttccttggtattagaacacactctatagaagacttcgacatcatgcacttgatttttgatgtcttgcgacacaaaagtctaagtgtgggggtgttggctgctgttaaatgccaattctatgccgccaatacctacataaaacataattaataatacatccaacatattggtagggtttaattctaacgtatttcatgagtgttggtgtatatttggatccagttaatcaaccgttaaagttgggatgaaatccagtctaaagtgaaggaagaattctatccatacaagagtgggccttaaactttatcgaaacatcaaaaaatggatccaactacctgagaaatggataaggcaggctgagggagagacacaggccatgttctacgccttttggaccaagccagggttcgaccgaaccccagtttctgccattcgagctagggtttggcatggatgctccagatgctctccggatggcggttgcggggcattttcgacaattcgcatagcagtaaccgtcatacctgtctataaaaggagttcatcacttcacttgtcacacacactccaagcttgagctgaattataagaggctctattgtactttatttaatactagaattaggtagagagtagagtagaagaagtcggaggaattccagagttgtcagtaatcctcttctatttcttatactttgttcattactccgtattaatagaaatatcattctaagtaattaagatttgctcggtgagatttaattcttggttagttcctaagtagcgtgcgggatcattgtttgctaaagtagttattaattgtgtagacgcggtgtctgggtaattaatttctggtggtagcttcatatcccacagtaggtttgaggtgggtgtagaggtggtgacagccctcaaatacattaaagtcctccatgtccaggtacacagtagagcgacatctgggagcagcgggctggccaatgcctgaagtatcacgttaggattaaactgagcttttcatagacactgtttctcactacgaaatcctctctaccctttgcctacttttggttcgtgtccttggatgaacttgaagaggagctgaacacacacgttccctaaggaaatcgataccttggaatactcccagttgaagtgctacatcggtattatccgtgcgcttgcggtatctgtgatgttcataaataccaacagggggaaggccaacgagcttggcatgacgagttccatcaaccaaggccatcttggtttcaagttggtgttagtcttaccatgctaaaataaaaagaaaaaaaagagagatggaagaaaagaataaaaaggatgagagaagaagaaaagagcaagagacctgacgagctacatttagatcaaagaccgcattatgtgagtgcctttaaaatatggctatacacctgactagtagtgatcatgctacctggcttcacccaacccctctcttgagctcatgtgccgctttggtttagccttcatctactcctacccgtgcacaacttcttgctcccgtagcaccaatactgcaggaggagatgccctcttcttttctggtgtttgctgctccactccagttggcacttgcacattgcctaaaaagataagcatgctatatctctacagtattgtgccaacggttcgtgccttcaaggcacaaggttcttgcacctgaggtgcgtggataaccaaactgctcgcctaagttggcatggtcatgtgccttcctccgctacaatccgcatcaagatggaggagagatccataatcatatgtgaccatgtcactgcccgagagattccaatatatccatcatgctggcaggtaagtacactcaagtatacaaagataaaacaaggttcgccaaacctttactcaatagtacaaccatgtgaatatctcttgatcatacatggttatgcttcctttgtctattttcgtatgctctggtttgagtgtgctacaggcattcataggcttttcaagttaaccatgatgcttaggttaaatagtccgccttaatcaattttgacgtggtgtcaatgcaccgtagagcgggtacttttatggacttcggatgtatgtccttcgtggactaacccctatagaaaatttttcaaattgacgggtcagtgctcaagttcaagtcacactagaggtaggtcagggtcgggaacaaatcaattgctaaggagaaacctatcacctctcaaggtgaacgggaataaagtgacaactaaggagcagtgtacaataactccaacaccaataccacgcttcttggtcttataggaaaatagatgctcagggaaccaagcagaacaaatgcaaaactttgttgcattaacccttgcatttggttcaaagcttgataagacctatcaggtaagaaccccaaacactttatgcatcctctatctctacccttctaagttacccataacctccattgttgccatgagataaaaaggcaaaataaaatgaaataaaagtaaatttaggcacttcttgtgcgtagagttacttaataaaataaaggcgtgcctgtgtttcaccccggtggaagccattttgctttctatgtttttgttgaataaagaccaagtacaaaacaagtgtgggggagtcttttcggaagtctcgacgcgcaatggcatcaacttaacatgtcaatatgatgaacacaggtccacgaccgcacacaaaatttagtagccagaaccgagtccttgatgggacggctgaaccaagtgttcgcttcatccctgcctggcccggctctgccaccacatcgtcgtgtggtcaggtctgcgcgtctccttccttatcctcccttgtttgtgagttaaactttggtagaaaaatggaatacaatttagtttgactccaaatgaaaattgaaaacaacaactctcaagaaataaaattttcctatgattgatcatgtataccttttattctttgctaacactggtcacttgtgaacacacttctatcataaggaaccttgctcatctatataatttataattgtgatatggttatgacaaaagaaattctggtccaactatcatgatacttgagattttatctttgtgaaaattaaaatttttcgagcaatacttcaatgactacattatttcctaccaaggcgatatatgattttcattgaaaaactttatatatatctaggctgcttgtcattacattgagctttgtcaaagtattatgacccgcgtgagatgtttttcatattttcatgatcaagatcacacacacactccacatgcacacacttatgctaaacttctacattggaaactagcatccctcatccatcatttattatatccgttatccataaaataaatactccatcttatttatgcctcttgctccaaaattctttcaaggaaaaaaaagagagaggcatggctatgcaaaagaaggaaaaataaagtcttgctcatacaaatatggagcattgataaaaaaaaagagaaaacacaatcttgctcatacaaataaagatagccatgtactttcccaattttctaaagagagaaatatgaaggaggatgtataccgaaatgagttgttatatttttctttttccatccacatacacatatacatataccctgattgatccctaccgagctccacatatatagccttttagaatatggacgattcaacaaaatatgcctcggtgaggatccacagatcaaaccacgttagtgatttgagagaaagtcatgatcaagactgaaaaaagagccgaaccgcgatcgagagcgcgtcttcctttatctctatctctctctccctcaatccccggcattatccgccgcctcctctctccctctcgccacttcctctctccctctctccgcctctctacgcctcctcctctctcctctccttctactggcgatggaagcgcgcgacggtggcgggcggctattctctctgcccctcaacggtgggggccggagcgcgtggaagcggtcgtctgccgacggcgccgtgtcgcgcgccaagctcgaagccggcggcgccaggggaagaggccggagcgtgcagaagcagtcgtctgtgaaggccacatcacggaggttggggcagcacggggaggggagcgggagcgggaggagcaggtccaaggggaagcagttatcgagcaccttgccgacgatgaggtcaatgtgaatttggaatttggaatttggagatctttgaatttggataaggtccattcgaatttggaatttgtagatctttgaatttataatttggaatttggattagagagagagcaaatgtattgctgtcggtgtgaagtttgactgaatattgttgttcagtttgcaaattaaaatgcttcattgcagcgtatagttttgtatgatgatgagtggacctttccggagcaacttaaaaaccagcagcgaaaagtaagaaaaaaaataactctagtccctgttagtgttaccaaccgggactaaagatgggtatcttttggtcccggattctgggtcccggttagtaacccgggactaaaagcgttgcaaatcgggactaaagttctcttttgcagcagtgtatggtagtaatttttaaagttctcttttgcagcagtgtatggtagtaatttttaggaacaagaaaacaatataaatcctaggtggcacttattttggaccaaaacgcacatggcagtcatgttgtttcgttcgtatgctcattttttcaagttattgtaatgcattgtatccacatatatatcaatttgttatactcgaaacacaatttattatatattaattatggtattttagtaaagaacaagttttactggtctaacagattgcaaactactatatatgccttgtatttttatacggagggagtacgtagttctgcaacagtactaacatagcaagaaataaaacctgaatatgttggagacaaattgtatgcatatggatgaaagtccgctttagggatgaaagtcagccacttgcgatcgatatatcttagctactgctggtgttgcttgatagagataagtgctttgaagataccgacgagcacaccgataacagagaacaccgtgacgatggctttgaagttgttgtagacgaacttgtgtactgggatcaacagccgcctcttacgcctgtaggcctcaagctccgctaagatgcggaagtagtcaagtccgacgaagagctgcttgacgaggttcttgaagaactcgagcgtctcaagatcagagaacccgccgcgtacgagtcccttggctcgcagctcgtgtacgtcctcctcacggttcatgagcatcgcgagcagaagaacgtaggagctgagatatcttcatcacccaagccagtggtgatggaggcctcaagagccaccatgttgacaagccagcacgccttgaggtcatcgatgaccagtggcgctaggaaaattcccccgaacaggcgaggggctccttcgtagatgcccatgtccttgagctgtgacgtgtcgttggccacaagctggatgccgatctctgcaagctcgatggcactgctagactgtggcagtgacgtgacgccttcagggaggtggaggtccgtccttccgatagggatgctcccacattggtagtaacggaggagaccgaggagatgcgctggtgtgtagctgccgttgaggacgagaggccttttaactaggtctaaccgggcctcgaatcccaaacctgctcgagcgataaaatcctccacgtccagcgctggcttgaaggacatgagggtctgaagcaccagccatgggatctggttctccatcagaaagatgtcccgcaggatgctggctagtttggagttgaaccaaccttgcaatgacggagcaactagcccacctggactgctacggatgaaaatcataaactgcagcaagaaacagccatcccggaacatcatagctgcaaagtcggcctcacagctcatacctgccgccgtgtcaccaacatagcagcttcgcacgttgcctgcaacggagaggattttctcgtaggccgcctcagccgactgcggcggatcagccccctgagccgagtccccccagtccctccagaagtagtaggcagccgctcgcttcacctcctccgcctcctgcaggtgcggtaaatcgtggtggtaagggccgatggctactgcgctcggtaccaaatatcggccttctttggtaacgccgcgcaggtttgctgggaacctgtggatcttggtcttgttctcggtgaagttagcctcaaccttttcggctgctctcttcaactcctcttcgaccggaattactactgcttctgcagtgcccatggccatgcccgtcatcgtcgtttgattggcggccaccagctgactctgctgcccgcacctaggaaatgagcgatagagggatcgccgtctatggtcgtggagctggccctgcttagagcaagtttaatagtatagtcaactcactactggaaaactgatctttgctcggtcgccccaaaaccacaatagttatggttaaaaaagaaccgggactaagtcccggtttaaaatccacagccattctacgatctttagtcccgggaataaagtgatctttagtcccggtttatatcctgtcagtcccttgtcagaggggcgggaatctttagtcccggttgatgtcacaaaccgggactaaagatcaccactttagttccggttggtaccaatcgggactaaagatctcctagatctttactcccacgcgtagtatattatccctattccctatcatcacccctacaaccggcctcaatctccttaacaaccggcctctcctctgctcagatccatctccctctcctccccctcctccccttcctcctcccatcccggccctctcctccccctcctcccttcccatccgatgcccagctagggccgcctcctccccctcctcccttcccgcacgcgtcaggcggctgacggggccatgctcgccaaggctgcgcctggcggggccgcacgcagcaggcggccgcacacgggccgagtagcgagcggcggtaggcggcgctaccggtatctattcttttttcttttttttttacaatttgtgattcactgagatgtataattttgtgatttgttgtatggatctgagatgtataatatgtgatgtatttggtttgtgtgtatttttttaagatttgtgatgtatttgatttgtgtgtacaagtaacttaagatttgtgatgtgaatgttttgggatgtttgtttgatttgggagtatgcatctcactcgatttgtgagaaaatacagggattaaactccgcctaaaaaaacaatgaaaaaaaaaagaaaaaggagacctaacgggactgccgctaccctctcatctttagtcctggttggtgttaccaactagatctttagtcccggttatttcaactgggactaaagtcccggagtgctagtcccggttccatctttagtctggatctttagtcctggttatttcaacggggactaaagatggattgctagtcccggtttcatctttaggcctggttggaaaaccgggactaaagggggttaccaaccgggagtataaatggtttctccaccggtgactactaaccccaaatcatttatagtcaatttaatagccaattcatataatagttacttactgcactactaatatctgatatcacctgtcatatatacattgcatcttgaagtctgtgctgcacctggctagaaatctctagccactgctcttatctcttctcttttatcttcttaaaatatgtttatagctgacttatagtctgctattgtacctgctcttacaagctaatgctacttcacatgggtactagtatattttagcttaggattggctcaaaagtattatccgaaaaaaaacaaacatattatcccctctatctctctctcatatcataacacattttggcttttattttaactcaaactttcttaagtttgactatactgatggaaaaagtagcatcatctataacaccaaattattatttttcagctatgagcatcttctaagactaggccatcatatcttaagactcacaacatcatcatagatgcctcaatatcgagggatacgtcgcttatcattaaaagaataattagctataaataatagtatccataccaaatccaggatatgcagtcgggtagacatgtttcaccataaggaatctaaccagttgcgttacacgcactttgccaaattagtgttagtagatctaatttcaagtttattttgataatgtatttatttttgtaaaaaaagtattgaaaatgttgctatgtttcttctcaacccatgatgttgtccttcgtagcctaatgctgattataaagctgtacaacttatcaacaacaataatctaatttacgagtaaaaaaatttatatacgtacccttagcgattgaaaaagctaaagttgaaaaataaggtacaatgaagaaaatcttaaaatcaactccataattatgttgaaatttaaattttgatagcagcttataagttgtagagcaaacgacggcaaagtatcagggatctattatatactaaaagtccattaagcatcctataaacgcttcgaagccgccacatggcgcttttacaagcgttcctaggccaccatgtggcattctataatcccaccatcgatttccatttaaatcggtggacccattattttataccgtcggattagatctatttaaaaagtttatgctttctatatccgcgagcaatttatcgaaaatactgtatacatgaaaataattacgtactatggaaatacttacatacgtgtacgtatgaaagtacttacatacgtatatgaaactttaggtactgtaaattaaaaaacaaacaaagaacgtacgtgtgtacgataaaaaaacctatagagaaaaaacaaacattgataaactgctcacttgatggaaaaatacaaaggaacatgctataaagccctaatggaaaatatatgtacgatgttataaccatcggaaaaaaaatagacggttttttaaaatatcatcttctatactataaacaataaaatttattactctacaaatatagccatgtggtgcttcgataagcgctcttaggccatcacgtggcactgtataatctcacgtagcactatatttaaatttatggatatgttattttataccttagcccgcttcctgttaatatcatctattatatattgatagtccattaaacatcctacaaacgtactcaggacaccacgtatcactcctacaaatgctcctacgtcgccacatgacattttaataaattagaaaaatcacaaaaaatttgagaataaataaaacatttggccatcgattttctgtaatatacgatggacccattgttttctactattaaattatttgtccaagtaaaaaaggaataccacctatttcctttctctcctattttcctcttttagaaaggtggaaaatatattttttaccaattattttttggcattggatttatttagccaaaaagaaaaggaca

SEQ ID NO: 22845 - DNA, 1017 bp, Oryza sativa
ttttctcacatgtttgaccattcgttttattcaaaaaattaatgcaaatgtataagatataaatcacacttaaagtactatgagtgataaaacaactcgtaacaaaataaattataattacgtaaattttttgaataagacgaataatcaaacatgtgagaaaaagtcaacggcgtcatctattaaaaaaacggaggtagtagtaaatatgttttgaccacctgccaaaatgtctcgactaacttttttagaaaatgaaaatgtctcgactgatgcctctagcatgcttgaattgctcaagaggcgggaggaagaagatgcattggccctcgtgggagtggctgtctacgccaaaatatcttggcggtatgggtttcagggacttggtcatctttaaccaagcgatactgaccagacagggttggcatcttctcacagatccaaattcgctttgctaagggttctgaaagttaggtacttctcaaactcagatatttggtctgcccctaaacctcgatctgcctctttcacctggcgtaatattttgtttgggcaggagttgttaaagaagggggtgcactgggctgttggtgatggttcatccattaagatcacgatggacaattgaatacttggtgtgcaagcaggaatatatggtgaatacccgcttccctatccctgatgatgttactgtcaattcgctcacactggtggagaaaggggatttactcctggttcgtaacccccctgtagtcccggttttcaaacgggactaccaatccgggactaaagatcactatcttttgtcccgggtgaaaaaatcgggagtaaaaatacatctttagtctcggttggttgttaccaatcgggactaaagatagagcctttttagtcccggttggtagagctagcctagctagatccggttgctctattattagtttcttttcttcattgtgtttttaatatattgatttcactccatccccatcccaaaatcccaaataaattatcccc

SEQ ID NO: 22846 - DNA, 10619 bp, Oryza sativa
ttcttttataaaagaaagggtatggcataagttttatataatacttcgccatttcaatctaaatctatatatgtataatattccatacaaatgtttcttttctgagattaattaatttctttgtgagtttgttagactgataatattatttccactgcaacatgcagccatacagtgcgatattccagccagccccattgcaatgaaccgacagcacagggcaccattaacgccaatattgttatacattttttcctaatgccacttattcctgctgcattgtgttgatcaaccctcttttttttaaccacgttgtttattggcatattatctccgccgcggatgaagaaaggaattataacaatgatatttaagaaggaatgagatgagatataagggagaagttttaacagagtagtagaggtgtggagttttcgatcgatgcttttatcacaggcggcgtttgatcggagctagcacaagaagaagagccctacgtcacaggcgtttgtcagccacgctatagaacgatatcaacttcgcaaccaagataaaatagcacattgatacaataaggcccggtttagttccaaaaatatcccattgaatctttaaacataagtaagaatcattaaatatagattaaaacaactaactgtacagtttgcatagaaatcgtgagacgaatattttgagcctaattagtccataattagctataagtgctacagtaactcacatatactaatgacgaattaattagactcaaaagattcatctcgcggtttccaggcgagttatgaaattagttttttcaatcgtgtccgaaaaccccttccgacatccggtcaaatgtccgatgtgacatccaaaaattttctttcgcgaactaaacaaggcggtaaaagctagagcgcaataaattccccatgtctcctagaccctatttaataggcggcataaataacagaaatattacttgtgcgtcatgcatgattgaattgctgaagaggccgctagccttttgcaggctggcctttgtacaagctactccctctgttgttcatgtgttaatcttcacgccatagtgcattactgattgacggatcggtatatatacagctcccaagtcccaagttaatgtactgttaatacttgaagtatttgtcggatctctcatctatgctaatcggttgttgttgtaagaatgcaaataattaaggcaaattgagttcatttcagtgcccatcgagtgtaattaagactgatgtgctccgagcaatccatattatatagattctaatttctgcaatcatcacttctctgaaaaacatgaacattgatgcctggaacaatcgtttgttaactaggatattaaagctatattaatttggtacgggaacattactcagtttcggcacaactgaaatggtggcacacgaggatttactcagtttcagccagatacattaatttggtacgggattgccttgatttcaattaagcatctgaaagtttttgaaaatatgcggtcacttttctcatctctcggatcaaaaccaccggcaagaccgcagctcctgcgcacaggtgaacaggatcagcatactgtggtgatcacctgagttgtctcctcagtcgacagctgctgcttgctagccactactattcagcagccttaaccgaagatggcatcgagctcaggattatatgcacttgcttgactcgaaaaaagcagcgccgatggctggcattcgtgcggccaggcatgtttggtggagcagtgaatctctatcgacttggccacgaatcccggtataggtccgaattgcggctgctcgtcgcggcttctcgtctacacaagcccgtcgatgattgaccggaggtaggctgcccagtggtggccacgcgtctgcttgtgtgggcaataacaagggatgcatgcaggcataacatgcttccatgtctctctgcccatcaacgattcctgatgccttccaagcttagatagatagagttcaaacgtaacagttgcaaagttcagttggcatatgttaacttgtgagggcctaccatacggagtatgcatatatatgtatatattttgggggaggagctagcagacaaacttatttacagagtcaaaatcatgcagtctctttgctttgcatgcatacataagacaaacttatttacagaatcaaaatcatgcacgttgatagtctctttgctttgcatgcatatatatacatatataagagtattgatgagcagtcatgtcttcataagacctggcacccgttctcattctgagtagagttaccttcttctccaatatagttgtcattcttggattttgcttatttagcaaagagtaatgtttagtaaaaattactatagtgccctctattaaaaaaactagagaccggggcgcgcctttgcatgccgcctgtatatagcaggatcactcgctgtagcaattgaacaataaagttaaggtaataaagttacaggatagtaaagctggatctgataacaaacctatgaggtaagtaattagttgataaaatatgagtaatatatgtatacatatcttgatttttatttaactgtaaataaaataacagttcaattaaattaaataagtgtaatataaatcttaatttatttagctatctaattataaaacgacagtccaatagttatgattatgattaatttgctacctaacttactgttttttccattaaacttttagttacaaaatagaagagaatacaagagtacggaaggagaggagagaagaatgttcatacgtacgtgatatagtatatatagatctatatgcgtatcggtacgtacaattaatagtatggatgagaggatagtttattttcataaaataaattagttggcccacctgtttaagttatctatatatctaatggcttaaaataacagattcacgatttaaatgaaattcaagggtcgatatttagagtgctaggtggtgtcttgagagtgtttgtaggatgtccacgtggtagcttgagagcgtttgtaatatgtttaatggacttttagtatataactaggaagatagcccgcgtgatgcacgggcatgtattagagattatgtttgaaaaaaattaaaattatagtataccaaccagatgatacttgtcatttcaaacttactgtttatccataacttatcatcatcagtgtgtctattcgtttgtttggaaacatatggtgttttttcttatttaataaaatgtttaggggcgttctttttttagcaaagcctaattaacattattgttaatgaatatgttttatttgtaccaccaagctagtcctactagttggttcaattgacgcaatttgttacatatttacatataaattttttaaagaaaaaagaaaaatacctagtcaatatgactccgaacattttagtttaataattacaaaaataacttctcaaccaactataaatcactaactttgtgtggcttatatatgcaataatatgtggagtaactcataatgtcatgaaagcctataatatctaagcacttaaaaaatgatatggccatggaagatgcaatagttgttctaattttagtgaaaagtaggaaccaacgttccttttatatttcttgttttattttataccactcctattttaagttcaaaatatatgatttatagatctttaaattgttggtttaattatgaatagagcaatttagactagaaattagaagtgtggcataaaaattatgtatgttttaatattattgattatttctccttttagtttgagagctataaaaatatctaggagggatagaggggaaggcgcgagctgaggggtgaggggactaactagtgttgtgtttgtccacatgtgaggtggagggggaagtttttgttttttgggccagttcttccctactttctataaatgatttaaaaccgatgatctattgttttgttcctaaaatttcaaatatttttttctaactattaaaatgtaacacctagcggcttaaaattttctttaaaagtagttttaatggttcaaaataatggatctacatatttatgtcgaaactgatggtcaaatgttttttattataatttctaatattttatttttaaatttaatacttaatacatgacattgttagtgctctataaagaatgtatgatgatttaagatgatataagaattattatcaactttttattgttctatttttcttatttggttgacacgcataggtgtttacaaatgacgtactgtaaatatggttgatatggatcctgaattatttatttatttataaataaaacaatagttcaaaagaacttaaaaacccgatagtataacttaaagatatagtcatttagattttttattgttatttattttttattaagttgttaatgagttaaaatttagaataataaagaatggaatgagagaggagaggaggagaaagagtacgtatgtatataataagaatatttattttacaagtttaatacattataattactactgttttattgtataaaaatagaataaatgccttattgattgattaagatgcatcttttttagttatcttttcataaatatatttatatgtatacaatatattttaaaaatatatacactacaaatataataatattattttgacttactctaatatcggaatgagaggagtattttttggaacattatttaggttcattcagttttttcattgtatatctaatttaatcattgttaagctatatacggtgataaaatctatatcattatttttttccataattttataactttttgagttggacagaaaggtcgaaaaatataaccaaaagttacatatatattttttgatagttgcattatagtgaatgtgggtcgttaaatgtaaaatagtatgaagaatgtgctacgtgcgtaggcatggatgtcttgttattaaaataacattatttatacgatttagatatcatagttgcctaattttttagcacaattttttttccaggtgcgcgcttttcaaactgttaaacggtatggtttttttttaaaaataaatctatgccaaagttgctttaaaaatcatattaattcattttttaaaacatggttaatgagttgcttcattttgcgtgctagggagattaggtcccaaccccatagaagtaacataggcggttcattttactttttagaactgtagatctaatttaattatcgtgaagttatgtaagatgataaaatatattatcattattattattattattattattcatatttcttccaattgtttgaaatgcatgcaaaagtcagaaaatatagcccaaaattaaaatatttcttttcaacttttaattatagtgaattttggtctttaatcatgaatttggtcgtaaacaatctaaaggcatcgatggataaaaaaaacaattatatgatttagatatcgtagttacttaattttcataacaaataaagcaagaaaatatgagaaataattaatggaaatagaaagagggaagggagggcgtatgtaggtaacttagaacttacgtacttaatgctcggtggggccgggtttaggggatgatttttttaaaaaaaagtaaatctaatggttgtaaataatgggtctaccaaatttaatgaaaatcaacggttattttttagagtgccatgtgacggcttataagcgtttataggatgccacatagcgacttaggtgcatttgtaggaagattaatgaacttttagtatataatagatagatagatagatagatagatagatagatgatagatagatagatagatagatagatagatagataaaactaggataaacatattcatttctacatggctgctctttactaggaattgaagaactcattgacagatcaaagctacaaaatgtattcatattgagattttctcctattattggagaggtatacatctcatacttgacatatatgtctccttttatcttacaggttggactaggatttataggccgctgttcactgcatatccattccagcataacagaaataatggcacacgctattcacttacttccagccggattcactaaagttgtatataacggagctcgtgcgtgctggtgaactgatcagcaaacagcgccgatggctagagttcctcgtcagtagatagctgctgctggacctgaagacgccgaggtggcggctggccttcgatcgccagagttctctcatcagttcaccttgcagcagcggcttctcgacggcccaagccgtggaagcgtagccacaggcagagtgccgtgtggcagccgcgcgccgacgtgtaaacccaataacggatgtgagcaggcatgtcctgcttccacttgtattcttgtatgaacgattcccggtgccttcaagcttagacagatagagaccacaacatttagctggcatgttataaaagatgtaaactatgttagttccaacaatgtggactatattgtcatattatgggggaggagctagcatagtaacttattgagcagaaagcacatgggtcgatggtctctttgctttcaatgcgtacaattatttatgattattcacctctctttgagagcttaccctcgttctcattctaggtttacttagcttacaggggaagtgttctttttttcattatctgatgtagcatatgtgtggacgcgtgggagcggtgaaactagtgttctaccaactttcaagaagttaggatataatatacgaaatgtacaattctgtatttctattggcatgtgtggacacttattaagtacctatatataggggagaagtgtgtggtcctttaggagctgaattaatattcttgaggtcgtctaggattgtcaaagttgatttatacctatgtttttatttacattggttactttaattttgaactaaccaacggcaaataaatgagaatggagggagtatgtgtactaaatggtgtgacttgtttacttctttattggaggttttctgaaagatcactccaacatgttactcttaacataaggttttcgtcgttttgctggcacaatgagcacaccggtctcttaacataagttcaaactttcactatgacaagtttaattaaattccctttctatgcatgggcctaattatttggtatcttatcatacaccaaactacaaaataaaatccacaaatatacctagctttcagcacaaccgaaatccaaacatgcatccggaatttcaaatattttaatatgatttatttttcgaatatattttttcggtttgatgcaatgatcatcacaatgtgttgccatgcacggacacacatatagtttctcttcatatatctccaggtctttaaatagtactatgcattctcctctttggtgcaaccattctgaatcaaagaaacaaattaaagccagggattactcctccttcctttctgttctcaagattgatccccacgtcatcctactgcagcagcaaagcagaagaacaacacaatagcagcataagaagatgactacacgtctacacctctcctccctctattctctcccctctccctctcttccctgcagcaggaaagaacagcaacctcttgcttgtcccgggaggtattctgtaggaaaccctcaatgtagtggttgttttggcgtggttaggtgattaggagcatacttaaaagactcggccactactatgtagaccatcaaaccccaccttaaaaataacctctcctcacccttccttttctaaaagaaggcttacgacagaagttttatatgatatttcgccatttcaatataaatctatatatgtacaatactctatacaaatgtttcttttctaagattaatttatttttgagtttgttagcctgataacattttttccactgcaacatgcatccatagagtgtcatatttcagtgagcacgattacaatgaacagacggcacgaggccacattaacgccaataccgttatacatttttttcctaataccacttattcctactgcattgtgttgatcaactttttttttaactgcattgtttatttgcatattatctttcccgcgaaagaagaaatgaattataacaatgatattaagaaggaatgatatgagaatatacaagggagaagttataacagagaagagtaaattgcgtccgcggtacacaaacttgttaggtgggtgcaatttagtgtaaaaacttgaaaaactctctcgttttggtgcacaaacttgtataggtgcgtgcggactatgactaaacagaatagcaaatctaattttgctgagttggatgatgagtagaccgccaactaagcattcacgtaagaaggacaggttcgcctgctcgtaagcaatggccgtgttttatcagaaaaccccttctattgtttggtatttcgatcatgtataatttttcagtgaaacgaatctgagaggtgttcatagcggcggggagctggggaggtcgaatccgcggaggttgtagtgatgggggtcgagccgatagctacgccgtggggggagtcgagtccgacggtggctacaacgggtaggtcaagtttgacggcagtggctgcaacagtattgttgagactgacgatagtgacagatggcgaggaggtcaagtttagtgggagagcttagaagttgatgctgcggtaggcatttgagtggcttgctttaggccaacattggttatctcagactctgacaattcatatagcaactttgaagcctagctccaatgtttcagtgcagacattgaagcagcaaggaattaagccattgtgccgtcagattaacagcatgaacattaaatccactgaagcaacaaggatgtaatgcttaattgtacacattgtgacaaaatctgaacacaatgaaacacgtgagtgcatattttgaacagaaactgaaatcctgaataaaattcagtgaataacctgaatgaaaactaaatgcataacttgacatgaatttgattgtgcactagtaatgtaactcaaaattgataacatggaaccaactttatgaatgcatagtataaactactgtttctttttcttgggagagtttttcttcttgggtgctgcacttctcttcctcaatgtggccctgccttgtttggttgatgtggttagtggtggttgaaccccttctctcctattagtagcaatgaaagcagtctctggcactgctcctggattcaccctttcttgatggttgctagcagcctgtaaaagattatgtactaatgttatgatggttgctattagctgacaaaatgctagcttaatgaaggattgttttttctttgagaacttaatgaaggattgtcacctccttaataaaagcttccaccacagatgaactcagatagttagaattttgctggggtatgctaagtaggtgcatttcctaaaacaaatatatgttctgtttaaaattccttgttagtgcagctaaacatatacacaagcaaaatgagcatcaatagtacctgagtgatgacaggttcctgaaacaaatatacaatgagtttaaaattcatagttagtggagataaacaaatacacaagcaaaataagtataaatattacccgagtgatgacaagctcttctgaatcaacaattgatgaagtcgccatttgtacataggttgcttctgaagttttaagtcagccttcctttgtttacaactagttttgttgtgaccaccatttttgcagtagctacaatgcatctctactccatgctttgaaattttagtcccaccctctagttcctggggctgttttctcctagttttctttggcctccccactttcttctcatatactggtggcttcacctctataccctgcatcttctcccagtggatactatctctcagtggcattatgttgtagctataagcttgttcatagcacctggttgaatagaaaaatgacactacatcctctggcttgattctttcatgtcttagacaggaaatggcatggttacaaggaatcccagtgagctgtcacctcctgcaatcacatctctttacattaagttcaacaatgtattgagatcctttgtcgctaacctgaaatgctcccatcccagtaggcaaaacatagcatgtattagccatctctgtatttttctcgaccttccgttttatttttgggcagaggccacatggccaattcctttctagttctttttgcttggtgtacaacctgttcatgatctgatttctaatcctctcaagcatagacaaaataggcatctccctggcatcaagaatgtacttgttaaacacttctgagttattgttaagaaggatatcacacttcggaaagtcactgaaaaaggctcgacaccattggtttggaggaatttcttcaaggtacttataagcttcactacttaatgccttcatcttttccatattggcattccactcgggcacagtgctagatcttgcaatagcccaaagttggttctttagtgtctc

SEQ ID NO: 22847 - DNA, 742 bp, Oryza sativa
ctggccaagaaaatgaactagtaaggaataaattaagtgttccaattttggaaaaaatgaaacaactagtgctagagtcagaccctgctaaataaaatggatattctagtctccaagtcatctagcaaaacatgcacatatcctgcaacctctgccttctgaccagaaagatagcgatctgttatgccatgcattgatatacaactcaatggatctagcttgaatgcccagtcaactatagcatagaagtcctcctgaaaaatataagatacaaaacatgtgaacttgtgaagccccatttcctatcacagcgatttcattttatcatttcaacagttcatatagtaggataactgtccaatttacaaagggaaatgccaaaaatatcaacctgaataccatcaagcaactcttgaaggaattggtttagtactcccaactcagctgaactgttaactggaaaaaagataagatgttaaatttacatcacactgaaagcaagaagaattaaagcatgcaaggagcactattagtttaacagttggtggtttatattacttggtttggcactgcttccaggaggttctgaaacagcaacaggattattgttatctgattcatctgacggagctagcgcagcaacatcaaagcacataaaatgtgcaaagaatgagctctacatcatagatatccatcaagagaaaattgaattgtaaacaaaactgcattttgcactgtaaaa

SEQ ID NO: 22848 - DNA, 1453 bp, Oryza sativa
  unsure (1)..(1453): unsure at all n locations
tgcactccttcgcatcaaagtcaccaactattatggcagctatttcaccgcttgttggaagattatactgaacatcatccttagcattgcagcctagcaaacacaaagttatcttctcatcgccatgttcagcaagtcgtgacctggcatacctaaaattctgaacaagtttgttgtgcgtgtcaagcatggccgataaggctgcgattattttagggtcaggcctatcgttgctatcgcgttcattctcgaaaatgtttaaccgattttggacctcgttagcaagatcatagatgtaaagctgtgcaaattttgatgtcgcaccatgcgatggcaaaagagtgccaatcttgtggtgcacaacaccgttgattttgaaaacataaggtgcattcccagtgttaattgatctgtcgatggttgcgcccatcgaagtaaaagcaaaggatgaattgtatgatccaatctgtcttaaaaatctcttcgatcgagcatcaccatcagattttatcagagccgcaagaggctctgggggctgctcaaaacgaggcacttgtattttgccgctcttgcaacatagattatagacaattttcctctttgagacagcagagagtgacttaaccctctcctggaaccaaaagacagcaccacaatatggacactcatgcgttggaggaccatagtatgaccggcctgggtaggacgctgtaagacacacattttaccattgtgagacagacatgtttttttcattaaacaaagcataggttgtttttcctatcgcaggatacgaacccttgagcgactggatgtattccctatctgttgctgatgaggcagtgcttggcctgctagcagaagctgcaatacaggcagatcataaccatgtcttaatcggcgtgggtataacagaaggataacatgtctatgaaaataactntctaccataccacaaggagcgtgtggtggcggcaaaggaggcagctttgaccgcagtaaacaacggtgctgtctatgcagcttggataagccatctgaaaaatccataagggaacgcggcctcttactccgatctaccgcaaaggttcagacgatgttcccaccgtgctctgtatgtccattgcaaagggccgcagcaagacattggtggctcgcctttcacggcttgcacgtacccttcggaccctatctatactctgttgcgacatctgcagagcataaccaaacaattggagcaaacagggagcaacgaagaaaccgtgtgattgcatgacaacagaagcagcagcaggcacgctaccgtggtgaaaaggatagaggagaacgaagcagaatgcactcgaagaaaagagggcaggaagacatagctcacgacaggtacaacacctcaataaataacagcatataaaacaaagagtagcatacagaaaacacaacatctccgagtggc

SEQ ID NO: 22849 - DNA, 2623 bp, Oryza sativa
acaaccactaaaaacatggcgaacaatgcacggatccgctaacacagacagagatggaaaggaaggaagcgagaaataacctcggacgaagaggcccgcgaacgccgtgggacaacaaggacgaagcaagtacgagaggaggacgagacagagaagacacgaacgagtcgatccagaaagcgaaggaaagataggggggtccgcactgaaacaaacaaagcaatgtaatcaggacatatgaagcacaaaacataggcaggggatacataggggcctgccatgcggacccaaagcacgagagggaaaacctaccgcgagctgccgccgcggaagacctttgctgtgctgatgaacaggttcaagaaccatggaagcagcgatccacgccgtgcaaatcccggcccctacgaatgaacacaacagacaccaccgaacaatcagccaataagggataacaaaaacagaaagccgacacagccgcagaaaagcggagcgaccgcggagaggaacccgctgcaagccagcgccttaccctgccatagcggatggaaccaaacgagaccaagcagcggcgaattgaacgcggcagcacaggcagccaaaagggagcgaaaacgacggtgtaagccctagaaacgaagagcaggaagaagcactatcgctggaaggaaggggaaaaagagtgtagaagggatgcagggatccggaatgtgaacaacaatgcacccaccaacaaggaagcaaaggctgtggggcccataggcaataggcccaccgaaagtgcacacaggctagcacagcctcggtgcaaaacgaaggcgcaacagccgagtcaaccgagggcagacgacccaatcaaaacgcaccggacaaactgagcagctgccaaccacacccacgcctgctcctccaaccacccagagcacggacgcgcaacacaaacaccggtagacacagcgcacaggaaagcaggagcaacaaaaggcaaaggacccacgcatcagagaggaacacatggaggaacgatcccaccagacaaagaacaaaaaacggcagcactggtgccaccgcagcagcaacaaaccatggacacagctcacagtaggtaagaaacgggaaccagccgcacggcccacacggcagagagccaaaacacatggaccaagcacacgagcgcgctgagctgacgagccgcacagaagcaacgcagcagagcgaacgcaaacgccgatcgcccagcacggcagctaccgcaggccgtcaacaccgcacaagctcgatcgaacggacagcacagcaggcaaggagagatggccagccccagcgctcccagcgccggatgacgtgccgcgccccgacagcatccacgacagcccgaaaagcggagaagcgagcaatcgggggctagaatgaagtctttaggtattcaaagattgtgcatggtggacagatgatatatacattgtgcagaaaggtgttgacaaatcattgtatatgcatgacttattcgaaagacaaccttggcactaacttttgttagggctattaatgaaaaagtttttttttgaaatatttatgcagaattgacaaatagcaggtttatcctatatttcacgcaacttgataaagatgaagggggtacatagtatggaactcatcttataaaacttatgaaacatacacaattttttcctcgcaagaaaataatttttcaaacatccaacatttgtgaacaacatgcaaccgacagaattatttggctgatatatatattaaacttgaagatgaattgaaagagataatggaagatacaaacaagacaatattggataatgatatcgatcgtgcagtgccacaatactcttaacgtctagctagcatgttagatagaaagctgaagaaaagaaaccgatggaatgcatggtcgtaaaggagattcgcttctcgtgccggtgtatataagtcgtctatcatgaatttgtagacaatattttctttctagatcaataattgttgacaatattttgacataggaaatcaacctgtacaatatgcgtttattgtgatggtggacaaatgcaacgttggtttacattcatggaaagacgtacaattcatccatatacacacaactcatattactgatcaaagacaacttcgacactaacttaagacttaagagatgctgtcgggaaatgatatttcagtgattatctgttgaggaagcctgatgaagatggtgggtatatatagagtttcatttgagataaaatttatgtaaattatttttccgtatatatgcaacctaaatataactaaaaaatggtagcatgtgaagtttcaaaggatatttgtgcatatgtaaaaaaaagagataaagataaaatatatgtgaccggagtcactggacggttcattttaggggtaaagctaggcatcaagttgagattcttgtgtgggtaattaaaagacctctgctctctagtagttaatgtccttgttgccatcagattaccggtaaagcaaatgcttcccctgcaaagtaatccaaaacatctccgtgccatgcccatcaaattaaacaaagccgaattgttaatcaaacaaggacaagaaaggcagg

SEQ ID NO: 22850 - DNA, 1620 bp, Oryza sativa
ccagacttttctagataaacaatcaaggccatccatctcccaaagggctaaatcagcactggcaacattaactgacctgtcggctggcacgatctctatcttgtcgccttgccattgaatcaagcattgatgcatgttgaaggaatgcaacaattggcgtgaatccaatcccttccaagcaacaagctgtacgaacccttcccatcgatgacaaaaaacgtagtacgaatagtcttactgccgactgtcagctccacatttaggacacatttggtttccgatggattaccaccatagtctttgagcaccatatttgtcttgatgagatcctcagcgttcctacccaacttcctgaatgtagcataaggcatcaaatttaccgcggccccaccatcgaccatcatcttagacatcggcttcccattgacgtagccatttacatacaatggtttaagaagccgattctctgtcccctcggatttctcgaatactgcctgttctggtgacagaaccaatttagccgattcctcttccacttcatcgacatcggcttgatcgatcctgaattcagctggcaatgtaaagaccatgttaattggtgccgctacaacactcttcccgtttgccaacctttttgcctcatcagctgcaacatcatcggctacaggaacctgattcttaacacaccactcctgtcttggatttggtttcctcagacaatggttaatttcttgttcaacctcctggaggcgctccctgttcctcaatctttgaacccttctcttctgattcttcatgaaaataccagaaggacaccattaattcttcctgattacctcatcctcttggccacgatctttattcaccggacccaatctttgatgaacagaaagtcttgcctgccttagccgattacccctattatatgaccggttcgagctctcgacgatatcactgcacccagggcagttttcgatagatggcaatctcatcccttcattccagcagaatctaaagaactcacaaccccaatgaggatcaaaaccatcatcgtattctgctgcttgtcatacttcctctgatatttgttgataatcttagccgaatttacttgaaaaccctttgcacggaccctatcggctgtttgaccagccgtatgcaccatattaacaggaaaaggattaccatcgactttcatcggctttttggaatcatcaaacctaatctttcccccctcaatggcaacttgaatttgctgtctaaaaaccttgcaatcgttagtagaatgagatccagaattaggccatttgcaatatctctttttgcttaattcctcagccgatgggattgtatggccaacaggaagttgaatttgcttctctcggagtagtagatcaaagatcttgtcagctttggtaatatcaaagtcatacttctcctcttttccaggactttttacccattggcatggtatgacctttttactcctcacccattcggctgcagctatttcagaatcatcttcctcatcatccgacccatacatgtatggaaaaacttgattaaccttcttagagcttttcctgacttccgccgacctatgctcatgcaaggttacct

SEQ ID NO: 22851 - DNA, 5986 bp, Oryza sativa
ctacttaatcgctgtcaagtctgataacttcatctcatgaaccccactgtagaggtagctgtggaattgcttctccaaatcggcccaactatggatcgacccatatggcaaagaggaaaaccaagtaaaagccaatccagataaaaataacctaaataacctaacctttagagcatctacagccgatgcttcaccacactaagctaagaatcggctaatatgctcataagttgacacaccatcttgtcccgaaaatttggagaagtccgggactttgaaccgattgggaagaggaactctctcaaaccactcagggtaaggctgccgatacaagcttccagtctcttttggtttaagcccaaactgttccctcattacgtcggcaatcacatcggcccatggtcgctgctgagctgctgcttgtggctgttgctgcatgggctcaaactgaccatactgagatgcgaactgaggttgagccaatccccctggctgatattgggcttgcggggaaggaggctaatattgataactcaagttacccccttggtaattatgaaggttgggctggatattgtgcaccaagtgctcaggaacaacctgaggcattactgtgccatccggctgtacatggtgaaccaaatgctctgggacgactcggtttacaaaatgttgtacaggttgacctccaggcgctgcgaacccggccgatgcgcttactgaccccgggtgctgaatcggctgaacgatttgctgcctcaacggagtctgttggatcggctgcagaagctgctgccttggtggtgtttgctgaactggttgcacgacctgttgctggattggttgcacagcctgttgctggattggttgcacagcctgctgaattgggggtgtctgctgaatcggctgctgttgttttggatcaaccgcatgttgaggcggcaaaaacatagcagcaacctgatcttgagtcggccgattcgcaacatgcccactatgctgtggatgctccctcgttaacaaccgagggttcatcggctggcctggcaccatggctgatgtagcaggtaagggagtcgatgctggcgccgtcggctgagttgtgggtgcaacggacggaactgcttgaatagatggctgaacatcggtgatcaaagatcgataatttgggaagacacctccttgcaaataaactgggcctgcagcctgatgctcagctattgaaccatcggctattgtcttcatcatgtttgacaagcatgatgcacagcgtaatcaacccgatctgggaagttattgaaaaaatcttgtgccacttcactattctgattaagatttcctccttgtggcccctgagcaccatcaccttgaacgccatgaactccttgagaattgtcgccttgatcgcctagagagccgtcggtagcacctttgatactcggctgagccgagccgcctggagcttgtttcacttctctatctttagaagaaccggtcccgggactatcagcaaccacttttattttatacttctgaataagtgtccccttgcgggtctgcatgaatgagttcaagaactgatcccgtgcttgctgcaacgttgcttcaaactcttcctttttctcaggtgtgaatttctctggatcgatcggcataacgttttcttcaatgatgtcagtcaatcccaacttcagcgccttgcctttaacggaacatgggctagatggtggtggtggttgtttctcggccatgaagaagaattgtcggctgacttcttacgagtcccaccaagcatgccaaaagcgtgttgacagaaaaaaagtggcctgggagatctgcttaactccagtgcaggtccaaagctcgccttcgaatgtatgagcgtgccagttgatttgatcctgtaatcaacaagaaatagaagcaaagaaaccgcggttaaatctataaatgatagccgatcggctaggtgccgatgatatatcaattatctttgagccgatgtcatatgtgtatcgatcggtagtcatgaataagtaagaaggaattaaatctactcgatcggctgtagatattaacaatatatactccttatatcgatatatacttaaatcaagtgattgggatagatcggtcgccatgccgagacagtataaatcacttagatcaaaatatatatcaataacaggactatatatgtttatagcatagcgatcagatagatctaacatgtatcggctaatactccgatactactctatatcaggatattaaaacaggtataatatatcaaacaaaggcctaatatacttagatacagcaatatcttgacatgaagggcagatttaacatgtcaatgaagcatatagagcaaatatagttaaatcagataagatcggctgaaactccgatgctaccctaatcggcaactagaaagcaggctagagattgatattctaagcacgacttaacatatcaaactcaactgatgcagtattaagtatgaaaagaagaacaatatctagacaatcaagccgctggaagtctcatagagtggtagatatcttacataatctgaaccaacgtcaaaatctaacctaatcggctgccctctttgatagatgttagccgattgtaggttagatagcgatattgccagagattatgtaagatatatgataactcgacgaattacataaacaagattagagtgtcataaagatggaagcactaatcccaagaatacaagtcatcataataagttttacctcttgttgaagatcgaaaccaatgcagctcaacccgaaagcaagaactcgtcgaaacaaaactaaagcaaaagggtggcgatgcgccgaaatagtattgaacgtgtgtgttaaaagttacataggactcgggtctatttatacccaagaattaaaagatacgtccataacggacatgactactatctctaacaaactctaagataccataagtctttgctgcaaacttttgcccaaacctatctctaaggaaattacataaaacatcctaattaatagatacaattgcctcctcaggactctatccatgtgcggcaatcaccttgaagcaccttgatccaacccgacatcacacatcaagttgtattgtcgggatcggctacatcggcttacctagcccgactcagactcagccgatcttttcgtagccgatctggactccagccgattcatgctctgttttcgaactcgatctccgcctccaactttgctttgatctgatctgatcttctttcccaatgccgatgttaccaaatttggttgttaacaacagcctcgagttaacaaggcgtgtatctattatgggcgtaggatatatgcacgtacgggactcgctgctttggcttcccacacgtaggtagctgtctacggattcaagtgaacgaccagcgaaactatttctatacctaatcttaactaattaaaagattagtatttttccaatcgtcaccaaaattagtattagtattttttcgtccgtatgcgctatttttttcactcgtctgtgtgcgatctcctcccaaaattttggttcgtcagtccacgcgagatcgagagactgcatcgctcccgtcccgtacgcgcgtacaagcccagaactatgcacggaaacaagagaaactgaatcacaaatccaacaacaataaagcaaaaccatcccaaaatataaatcaccggggccaaaaaaaggaaaaaacttcacaaaaaaaatcaagcattggccggctcggcgaggcaatggggaggaggagacgaccatcggcgactcggacgcagcccagtgcgcacggtccacccctcaccacggaccaccaaatccatggacccgcgcgagagtgggggcaaagagacgacggatccgtgcgggaagggaagaggtcgctggatccacccctcccatcgccgctgacggcagatccatgcgagaggagggcggagagatgacgggatccgtgcgggaggggaagaggtcgccggatccgcccctcccgtcgccgccgatggttgatccgtgcgagagggagacaaagagacgacgggatccaggcatcggtggtggatccgcacgggcagcatcaacggcttggaacgttgcatgaggaggccttgccgtcgcctccagtcagccactgcgcttcttcatcttctcgctgtcgcgcttctccatcttttgccggatcaaggagaggtggcgccgttggccgctgctgcagccagtaggcggaaggaggcgccgctactacaggaaggaggtgcaagggctgagtatgggaggatgtgagggcgcacgctggtggaggcgctggatgcctggatgacggcatgcgatgtgaatggggaaccagtgaggagggagagagacagagagactgggatagagaagagcctagagagtaaacgaagagcctagagctctcggagcagaagagctctcggagctggcaacctcctcggtaatgaagtacgaggttcagttttttcattaaaaaaaaactacgaccggtcaaaggtcctttctttattgtgctattgattttcactgaaaaaagttttttttaatacacgtaaaagtacttcacaactaatgatgatttttctttattacttttattgttgacatcaaaatcacttaaaaatctcttaaagtttcagttaaatacaaatatttgtttgagactaaaaaaaatatcgactgaagaaaaaataaaaagtttccacgagataagccaaattagaatatttgcgctatcatccacgtgtcacatgacctgtctccacgtgagtccacgtataattttgagttgacagatcgagaaagcacgcatgaccactagagactatgagtaaatatgcaaaagtgactatgagtaaatatgcaaaactattttttatctgcgacactactacatgatatattttcctggacactgcacccttttgtttccatgcggtctgtatgtagaaccgcatggaaaaataaggggacaggcgctgggctgtcgcccacacaggaaaacacagtatcccgcgtgggcggcttaagccaaccgcacccaaattttcacccgcacgggcccaccgcttttaaccgcgcccacacacatctccccctccgcccgctcctctcctcccacctccctctcccccactccactcctctcctcccactctcctctcctctcctcttttcccctctctcccagccggccggcggcgcgacagcatgtggcggcgcgcggcccctccctccctctcccttgactgcgggtgggaagaagggcggcgagagccagcggcggcagacgaccacggcggaccctcccctccgtccccttgcagatccggtagagggggcggcagatccggcggagggggtggtagatccagcggcgcgcggcccctcccctccctccccttgcagatccagcggaagggaggcatgggggcctggcagagcggcagcatgcgtcagtggccggcgtggaggtggggcaacggcgtcggcgaccggcgaatctatctctccctctccttctctctttgttatttgtgattctttgtgatttgtgagatgcgtttttgagttcatttgttgctgtgagatgtgttcttgtgatgtgagagttcatttgttgatgtgagatgcgttcttgtgatgtgaaatcattgtgtgtcgatgtgcgactacggatccggcgccgtcgaccagaagggaggttgtcctctgcatcggcaacgatgacgatgacctcgccctcatgacgtcacctaccccaagcgtgacgtggacaacatgcagtggttccgggaaatcacgctgctataccgtggccaccgcctctccgcacccttcgtcctcggcctcatcgtgctctgtggccacgccccgcccaacaactagtgcccatggggacgagaagggcgtgggctgcaggaat

SEQ ID NO: 22852 - DNA, 1696 bp, Oryza sativa
gctctgggcacaggacaactcatcaatctggcaacatgttcaattatgtttgatgatgcttcttccccaatagtgatcgattccatcagaaacatactacatattgagaaagatagctttgaggaccgatacctaggtttgaaatcctcgaaaacaacttagaaacatgccggccttatacttaaatccaaacttctcggtcaacatgatattccatctttgagaatacaagcttgggctcatcgactccaataggcaatatatcaccatccgtaatcttaagaaactctgttttccaaacttttcaagataaacaatcaatcccttccatttcccaaatatttaaatcagcactagccacttaaactgacttatcggcttgcacgatttcaacctggtctccttgccattgaatcaaacattgatgcattggtgaagggatgcaacaattagcatgaatccaatctcttcccaacaacaaactattagaaccctttccatcaattacaaagaatgtggtaggaattgtcttgctacctactatcaactcaacgtttaaaactcccatggtttcagaagaattgcccccaaagatcttcaatacaatatttgtcttgatcaaatctctttcaaaccggccaaactttctgaaagtagtataaggcatcaaattgacatcaacacctccatcgactagcatcttagacatcggcttgccattgacataacctttgatataaagtggcttcaaatgtcaatgttgttatttttaaggcttctcaaacacggcttgttctgatattaattttaactcagtcgatggttcgatttctcctttatcggccgtgtgtatgctgtattcggtaggcaacataaataccatattgatcgaagttgaagcaattgcttttccctcggcagatgttgaaattctattcctttccttatcgttttcaacctcattggctatcacaatctttgattcaactcgccactctttccttgtacgtttcagccgatgatcgattttctcattaacttcctgtatctgctctctatttctcaatctctgaactctccttttctgactccttgtaaaaattctagttggacaccatcgagggttctaagcttgatcaacttcgtcattttcaacttgatcttccatatgatcttgacgaatcggcccaatcttcaatgaactgatctcctgggttctggccgattcctatgtgatttaagactgttaccctgggaagactgattgtaagaattcgatccaccacacccagggcaattgttgattgatggcaacctcattccatcgttccaacaaaacctgaagaactcacaacttcaatgatgattaaacttatcaccttgataatattcttcatcttggtcatcttgataatatatatcatcttggtgatgactacaattctgaaaattcctctgaacttgatgtcatgcctcttctggtacttgttgatcaatcttctgctgtcaatcgtggcatgcaccacatttacaggaaaaggatgttcatcaatcttcatcggcctttttccatcatcaaacttgattcttccttgtttgataggcgattgggtctgctacctgaacactttgcactcattggtatgatgagatactatattgtgccacttgcaaaacttcctctgggctgcaggaa

SEQ ID NO: 22853 - DNA, 2526 bp, Oryza sativa
gaagcgcctcttttctgagatccgggaggtgaagggggagctggagagcatccatgccttcttgcaggcagccgagcggttcaaggacgccgacgagacaacctccgcgttcgtcaagcaggtgaggagcctcgccctgagcatcgaggacgtagtcgatgagttcacctacgagctgggggaaggagacggccggatggggatggcagtggcactcaagaggatgtgcaagatgggcacatggtctcgcctggctggcaatctgcaggacatcaaggtcaacctgaaaaacgctgccgagaggaggattaggtatgatctgaagggcgtcgagagaggcgcgaaatcgatggcgggaaggaggagctcaaactggagatctgactctgtactcttcaagagggaggatgagcttgttggtatcgagaagaagagggatttgctgatgaaatgggtgaaagatgaggagcagcgccgcatggtggtcagtgtgtggggaatgagtggaatcggcaagacggcactggttgctaatgtttacaatgctatcaaggctgactttgacacctgtgcttggatcactgtgtctcagagctacgaggctgacgatttgcttaggcgaactgctcaagagtttcgcaagaatgatcggaagaaagacttcccaattgacgttgatatcacaaattacagaggcttggtcgaaaccacccgctcttacctggagaacaaaaggtatgtccttgtcctagatgatgtatggaatgcaaatgtttggttcgatagcaaagatgcatttgaagatggcaatattggccgaataattcttacatcaaggaattatgatgtggcgttacttgcgcatgaaacccatataattaatttgcagccgttggagaaacaccatgcgtgggatctgttctgtaaagaggcattttggaagaatgagataaggaattgtccgccggagttgcagccctgggctaataattttgttgacaagtgcaatggcttgccaatcgcaattgtgtgcattggacgccttctgtcatttcaagggtcaacttattcagactgggaaaaggtgtacaaaaatcttgagatgcaactaacaaacaactctatcatggacatgatgaacattatcttgaagattagtttggaagatctaccgcacaacattaagaactgcttcctttattgctccatgtttcctgaaaattatgtgatgaagaggaagtccctagtacgactctgggttgctgaaggatttattgaagaaactgagcatagaacacttgaggaagtggcagagcattacttgactgaacttgtgaaccgatgtcttctgttgctggtgaagagaaatgaggctggacatgttcatgaagtccaaatgcacgatatcctccgtgttttggctctttccaaggctcatgaacaaaatttttgcattgtcgttaaccactcgaggagtacacatcttattggagaagcacgccgtttatcaattcagagaggggattttgcacaacttgcagaccatgcaccacatcttcgatccttgctgcttttccaaagttcacccaatgtcagttcgcttcagtcattaccaaagtctatgaagttgttgtctgttttggatctaactgatagttcagttgataggctgccaaaggaagtgtttggcttgttcaacttgcgttttctgggtctcaggcgtactaaaatctccaagcttccaagctccattggaaggctaaaaattctgctggtgttggacgcttggaagtgtaaaattgtaaagcttccattggcgattacaaaacttcaaaagctaacacatcttattgtaacttcgaaagcagtcgttgtttctaagcaatttgttccttcttttgatgtgccagcacctttgcgtatctgctccatgacaacccttcagacattactactcatggaagctagttctcaaatggttcatcacctaggctctcttgtggagttaagaacctttcgtatcagcaaggtgcgaagttgccattgtgagcagttgttcatggccatcactaatatgattcatcttacccgtcttgggatctaggcagacagtagtcaagaagtgctgcatcttgaatcacttaaacctcctcctctacttcagaaacttttcttgcaaggtacattatctcatgaatcattacctcatttcgtgtctgtaagcaatctgaataacctcacgtttctacgtcttgctgggtcaagaattgacgaaaatgcattccttaatcttgagggattacagcagttggtaaagctacagctttatgatgcatatgatggaatgaatatatacttccatgagaactcatttccaaagctcagaatactgaaaatatggggtgccccacacctgaatgaaattaagatgacaaaaggagctgtggcaagcctaacagatctgaagttcctgctctgtccaaacctgaagcagttgccttgcggtattgaacatgtgaggactct

SEQ ID NO: 22854 - DNA, 3099 bp, Oryza sativa
tacaaatagtaatagattcgtaactgaatttggagcttgtttgatctgttgccttgaaatattttaacttactagaaaaaaaaatgcccgtgcgttgtaacgggtgaacgctattttaatcttattatacggtttagttaagatgaaatatactttggaaattcgcatggatgtatattctgtttttagaaaatcatgagctgcagttaagaatccgatcgtcttaagttagcatgcaagtttttataagagatttattatacgactcttatatttccaaaagcgaacggacttaaaaattaactcaaatacggatatgtatttccaaaagcaaacgaaattgaaaaccaactcatacacggatgacgtaccaaattaccggtaaaaaacatcttcaatttttataatagtagacgatgattttggaaactattactctaaacactgtcaatgtatttaaatagtattttgtggcggaagcagctctatgataaaaaaaaatagaacagagatggtcaataccacaaaacacccaatacaagtcagcacttaggggtgaaaacggtcacagaaattcccgatcgaccgaccgagcgccgttttcgtataagggtaccgtttctgacggtacctttttggctatttttaaattttgttttttctaatttctttctgcatcgtattaatgtctacactgagtagtttagatgataaatatggtcaattactagccgatcgagcatcgtttctgaagagatgctaccaattctgatcgtttccgaccattttcacaccttttgaaactataggtgccggaagtgctaaaatcggcacttatagatcttttcccacctccacggactaaaaacacaaaaaactggtggctttaagtgattataggtgccggttatgtaaaaagaacgaggtgtcggtttttttaaaaatcgacaccttttaaaaactgagccgtgagtcgagccgccgagcagcagataagggaggatagcgtgcggcgatgagataagtctctctctcggtctcatcgctcctctctctcttgcgtctctctctctctctcatcgtgcctctctctctcgcgaagcggcggtagcactggcctcccctttgccagatctagcgggaggggaggcaacgacaacggcggtctcctacgggtggcggcgacggcgacgtcgatgggcttcggatcccacgggcgacggcggtgtgctccccactgccagatccggcggcctctctgtccacctcccctctcctgcctcggcctctcctctccatctagcgagcagcggtgaacgacggtgtcctggtgcttccgccttcggtgagcacccgtgccgacttgcattatctttctctctccctccatctcgttctactttaaccctatcttcatttctagatatggaaatagcttttatccgctgaatctagtcgacggcgatgcgactacatgatttgttggtggtttttatgatgtttgattcaacgatgtgaaaaactgatgaacattcgatccataaacttgttgttgattgtctgatatgtagttttttctttttatttggatttttggatttatttctggcgcttcgatgcatcggttcggctcaatttgagccgagccagatctttttttcaaatcctatacctcaaaggtgctggttgggaaaaccaacacctatgggggtttctcaatcggcacctattaaggcttttggtagtattggctcaacaaatataaccgaacacaactcataccgacataggcgcaaccgcatgcccgtgggcccgtgcacggcacagagtttccctatgcatattgatgttgacaattagcatagtcactaaagcggcgaaggggaccgatatcaagtgaaagacaaacgattggagcctcggcgtgaagggttgcgtaatcacgaaattagaagatgaaactgttggtttttttttttttttgacacgccgataacacgaactggatccacctaaaattttgcggtgttatggtgttgccaactacctgatttttctgtcacatttcctctttttggtggattcatttatgttctttgctttctctacacggaatccttcatttcgagcacaagaaacgcttgtgcaaaacaacaccatcttttttcttttgttgtcccacacgaactgaaaatccgacatgactagcatatgctatatagaaatcctgggcagattggatgtcattaaaaatcattccaacttttggttccttggaagcatcacattcaggtgtccaacttgaggactgaaaaactgtgtgctgatggttagaatgatatctccatagtaagcaaatgcaattgatgttcttgtacttacacagaatggtgcactccatgatttctgcggtgtgatgcacatttgagttggagtagaaatgttctttacggttgattcagcgtcagaaacaatctcatggggctgcaatggcacagccatgctcacctcaccatcggactcaaaaaatagttgtgcaagtcagtacagacccaaattagctccaaacattgaatccatagggaagtacagagcaaaaacgaaaaaaacagaagctatattgatacttcactgtgtaccttatttcaatgaatcaaataacacatttctttctcctcactgcaactgtgcttgtgggtgtgcgaggcgatagagcacggacaactcctagtgtgcatgatagtaggcgccactctcagacttaggggcggagtgcttgtcgaacaccttgagggcgacgaagtagctgctgcgatagttcctgcaaaaaatatgggttctgtgaaaatgtagccgaatagtgtacacacttgcttatagaaaatatgaagcttcacctagcgcaaatcagatctaggtgtacgagcaaatgcatttggcaatagttgtgcaagtcagtacagacccaaattagctccaaaacattgaatccatagggaagtacagagcaaaaacgaaaaaaaacagaagctctatttgagaacatatcgaaacttcactgtgtaccttatttcaatgaatcaaaccacacatttcttt

SEQ ID NO: 22855 - DNA, 4135 bp, Oryza sativa
cccttcttcttggatgatctgtctgatctcttcatcggaaggtccgtaaatcggcatgtagaatgtttcaaacttttctttgtcaatcacaccctgtcaattactccaaaatctcagcttctcaggatgccatagatagtactaatcatttgttcgttagcaaatggtgaagttctagcaaggtaaaacagttaaatttaccatagtgaccatgtcacttagggtcatggctgtggattcccatgcgtgcgtgagttcggaggcgagatcaacagatcgcctgcctgcaagtgagagtaccattcggcctcctgggaccagttctacagccctcatcttcagaaacgccatgaaatccttcctgaactgccgtgcataagccccaacgaccacggctcgtctctctctcctcacgttcgcgtcaacgtcgtatgccggaattccgttcatcttcagatcttcaggagcctgctgccatgaaattgaaacaaaattttcgcctcaaagaataataaattcagaatgcatgctggtgatcagtactgtatgattcaaatttttattattttctaaactttttatttaaaaataaacttttataaaacttatttcaaattctgaaccttttaattacgctaacgtgacaaataacaatgtctgcaccacccatatcgagcgtgatagttttgttctatcacgacagtcatggtgtgtggtagaacaacgctgtcatgccagacaaactagcgtgacaatgttgttttgcctctgttagtatggttagaaggttcgtatgctcaaaataagtcttaaaaaggttacttttattatagaagaaaaaaaatcttaggatttctgacctcggagagccagtggaggctgttggacgagcagacgagatgcagggattcagcggcgaagagcctcccgtagaaggagccaggcacgacgccggtcaggaggacaggctcgtcgccgttgtttcgcctgaactccacgaggctcttcaccaccgtggcgaagtcgttgtcggggagatcgttgaggagtacgcagagctccgccggtggcggtggccgccggagcgcgaggcaccggcggcggaaggcgtcgacggcgatcgacgcgagcgcgagcgcgttcgggccggatgagcagcccaggtcggcgatcaccatgcttctgctgcatacgaggtcggcgatggcgtcttctatcagcggcctcatcctgttctgttcagcgttctgcaggtgcgttttactcgggattaacagcttttctgaaagccaaaaaatttcgggggtgactataaacccgaaattaagaaaatttcggaatatatcggtccgagaacatttgtattttgagcaaatttgaagacattttgcaaacttcttttactttatcgaaaagtctgacttatatatgttcagttgattttcattttttctctctataaaaaaaaataataattacattcttcctctaagcagaaaagatcataggcaattgttgattaactaaaaaaaattgtagattaactaattaagagcagagaaacgacctgaagaatggagtttcgagcatagcttgtttccccttggcctcgattcatatgtaccatctgtttggatgccatggtttttgcctaatttgcttggagcagcgctgaacaccagatacttcatctgctagctagagctagctagaaaaaaacgcagatcttgtagttgtacactcaccggcgaacactaggtatattcttttctgtgccaatcatatggcataactattctggctgctaatatatagacatttggcacaattaattaatgccatcctgcttccttttcaattatagaattagtacatatggagtctgaaagtttcagcggtacgaaatatcaacacacgatcattttcgtagcaccatcaacatgtcaccatcagttggcctgtttgttgcggcgttatctacaccactgccgccacaatatcctagttagcctcgggaaaaagtttaaggtccattaatgtacatactacatccatcctaaaataattatcgctttaagtttttatttacaatgtttgatcattcattttattaaaaaataaaatcattatttattttgtttatagcttgctttattatcagaagtactttaagtataacttatcctattttatattaatactaattttttaaatataagacgaatggtcaaacgttacaaacaaaaagtcaaagacactacttatttgagacggaggtagtactattattattgtccctagttggcctaatctacacaacacccgagcacaatgacaattgctcattcccaaaataaggccaaaaatagagtaggtgtaaattttcaggaatcgcactttgaaaatctcatataaaaatgctaatatacaatcgattgtatatatatgacatcttgtcacaaatggattaaagatggtaacagaatttcagttatttcatgtcttagattatcagtcatatcttgtttaccaatattaacttgtgcaaaagcagtgccaaggagcactgttttgattcttattctcacttaggagtaagtaataatgaaattggagaaaggagcatgcacaagccactggtggagaaaccatctttggtcggtcgaccagatttcacagtagtctcggttgtattaaaaaccgggactaaaaatatctttagtcctggtttaaaagctccaggggtactttccaatctttagtaccagttggtgttaccaactgggactaaagatctatttgtagtcctgattgataacaccaaccgagaaaaaagatcgccatatactcttcaccaccttgaagctctggaattgttctgccattttcttcagagtccactgtttcactatgttctccgtacctgcgggtagcgtgaacgtctcgagcattgtggtccacatcatctctttctctgattctgggacaaagctgtcattatccccgcgtgcccttgttctgcgccagtacaccgtgctgacaggcacgttatccctcacaacccaaccactgtggcgtacaaaattcttggctgcttctaccggggcactaggtcggccgtcttcgtccaccttagttatgatgtgccgaccctctatcttcttcgcggcacctcgttgtccacgtgccctcttctgtccagcggagggatgacttccactagcctcctcctcctcgttcccctccgcatccctctccacgttcccctcctcgttcaagtactggtttggatcctcgttcaagtactggtttggatcctcgttcccctcttcttcgttccagtactggctgcttccctctgcaattgtatcgtacagtatctgttcctcatcgcgatcagccatctgtgcatacaaaaatatttgttaagtctataggtcatatttgctaagcgtaatattaaaactctactaatcttatattaaatatctaataatcttatattaaaattgtagtaatcaaatatgctaagtctaacaatcttatattaatactctaataatcttatattaaaattgtaataatcatatacgctaagtctaacaatcttatattaaatctctaataatcttatattaaaattgtaataatcatatatgctaagtctaataatcttatattaaaattgtaataatcatatatgctaagtctaacaatcttatattaaatctctactaatcttatattaaaattgtaataatcatatatgctaagtctaacaatcttatattaaatctctaataatcttatattcaaactataataatcttataatcttatattaaaactctaataatctaataatcttatattaaaactctaataatcttatattaaatctctaacaatcacttctttacatcacttgcctgcgcgaattccttcgatggctagctaccacttcggcttgagggacaacgatgacgtcttctctgcaacattactaggaaaatgtattagtctaaacgggccaagttacatatattgtatttcacgttttaacctatatatataatcatatatgtatgctaagtttaataatcgtttaattatctcgttcgtacgggctgcagga

SEQ ID NO: 22856 - DNA, 504 bp, Oryza sativa
acaggtttagcaagcacatgacgcaccaggagtatatagtacaaacatacagatggaacatatttatggcaaaatttatgtacaagagcggccatgtcttgttcatgaaagccgcgctaagcgccaggcggcgcagcctgtaaaggaaaaataatgctggctgtcatgctgttaagagagaaagaacatgtgtgaaagagcaacgaggacatcaccgcctgtagcgcagcggatagtatctcagtgtaaactacgtttcttgtttggtttccacatgagccatcatcattctggataagcactcttaaacctgatcggcttgttgctcttgaaaaggcaacatagagctggccgtgcatgaaaacaggctttgtaaggtatacgccaacttggtcaagtgtttgcccttggcttttattgatagtcatggcataacatacgcggactggaaattgccttctctgaagcgtgaaaggccattttactttcgatgtgctcagtgtg

SEQ ID NO: 22857 - DNA, 2329 bp, Oryza sativa
  unsure (1)..(2329): unsure at all n locations
tttatgtcacattgcctagtagaaatgaggtgtggtgtttgagagaaatggtaaaatcgccataaatgcatttacacatttctttaaaacttgtatacacttcacttgttttatttggatataaggttgaacaggcttattttacgagcacatatatatctacttaaatctcatcggatccacacaaactcggattacttatctttaaaaagcgaggggattaattcaaatcccctcatgtattattccaaaaacgcttactaccgaacgtccgatacgtggagaaatcctggatgggcccacagtcaagtcgaaacccatccgttcccaaccttatcctcattcctcctcatccagtcatccccaacctctcgcatcggcttcttcgtgcagtgcggccacagcgtcatcaggcagcggcgccgccaccgtagacggcggggtctaccgttgcgggcggccgtatttggccgttcagccaacaccgcgagaaaacagtcgatgccggttaggccttgacctcgctggtggcaacggcaccacgacaaggtacaaccgttgtcaaagaggatccgagctcggcggcggcgacacggcggcggcgatggcggtggcggcgtcaacgtcacaaggagatacgcctagcgacggttagggccctgagcttgccggcggcggtggcactgcgagggagcggactaaaacttgaggcgccgttgatggagatggccctgcgctcgccgacgaaggtgaggatggtgggagcatcgagctagcaaggatgttccatgctagtttctttatgttgcacacaagtgtttcttgatgttccatttggtatttctctatgttgcaattcatatttctggatgttgcatttggtacttgatgttgcagttgatttctttgggtgttgcatatgtttttgctcttgaagtctgtgtttttagtgtttgcatccgactgaaacattttcggtaaaataatgaaaaattcttccatgaagaatggcacatcaaagaaacaactcacaatgaaacattttttctggtgcagtgaaaaattgcaacaacttatggtcaaacattgcaacatctctttaacacgtaatagaacattgcaacatctctttaatatgtagtggaacaccgtccggagatttgtaaaactccggacgtccgatatgtagtcgtcaccatattattcggaaactcgtgatctgccatgaatagtttctgacaagattgtcagcacgaattatacgcagccgcttgctgcccgcaccccaccaattagggttagatttccagtgtggaggtgttgggcttttatgtggcattcaccatttatttatggtttatatttgttaattacctcgatgntgggaatattcgctgatgtggaattttagtcgaggaattagtactacttaaggtgtcgaaaacgtctgtgtgagaaaatagtagaaggaattaatttaacatatattctattggaattgcatatgtacatatgtgatttcgtcatggtacagcacatggtggattagctggataagtttataggatcgactctaaaagctattgacccatgcatatatatatataatcatattgcaataatatattctcatatacgatatgatctatagctagcacatgtcacatatgtttgatagatactactccctcttctcaaattgatcatcatataagtttatataccaataccaaggacaatttaaatcgcatcaatcaagataccatgtacacattctctcacaatgcatctatcaattaaaactccataccaattacacagtagcatgcacacattctctcataccgcattaattgtattctgaggaaatccgtgtccatacagttatatgataatcaatttagaaaggagagactattgtattgtagactcgtaaaactgacaagtattactgacatgattcaagattctgacagtgtacagaaaatagataatgcacatactccctccggcccaaaaaaaagacaaactctggttttcgtgtccaacgtttaaccattcgtcttatttgaaaaaattatgaaaaaaaaattacatataagacggacagttaaagttggacacggaaacccagggtttgccttttttttttggacggagggagaatttgggagttgaataaataaattggtccctaaccctaagctcatcatgtattatggtatagctagcatcataaaaaagattatggtatagctagcatcataaaaaagacaaatgcatataatgtggaccaaatgtttgaccaaatgttctttattaaattaaa

SEQ ID NO: 22858 - DNA, 812 bp, Oryza sativa
agggcctcctcctcgacaccgtcggcggcgccgtcgccttcctcgcctccggcatgtcgccgcgcgcctccgtcgtttttttctcgctgtgcacggcgaagggcgtcgacgacactgcggcctgtggctgccggcggcgagcccgctccagcgcgtgttccggaacaacgccgcctaccacgacgtgcaccatcagcgccgcggcggccggtacaacttctcgcagccgttcttcgtgacgtgggacaaggtgttagggacgcatatgccctacgtggtagaggagaggcctggaggagggctccaagtgcggccggtggccatgtcgccgtcgtcggcgactgcagcggcaggcgccagcgggaaatgaaacttaaactgtacgtgtgcgcggtgaagggccaccagctgactccacagctttttcaaaaacaatgttcaatttttttctcaaatttaaattagttgataattcgttcattagagggttattttcgttacacgcattttggacccatgtaaacttcatcttcattaaaaaaagtatgattgtactgtattacagtacttccaactattcaaattacactactacaaaagtgatttttctatacgaaaccccttgatttttacaaattgaccataactagtggcgtctgcaaaaaatcgagctgcattttcacagacggctcctttaagacgcccatatggaaaaatcgattttcccatacgagcctcttaagaggtccgctcatttttgtcggacgaagaaatgatccaacctaaactgtacgtgtgcgcggtgaagggcc

SEQ ID NO: 22859 - DNA, 729 bp, Oryza sativa
acggtattcctttctgtggaggaatcaaaacaggaggagagctaagatactccttaatattatccaaagccatttgctgctctgccccccaagtaaactgctgatcgcctttcaacctcaataacggtgtaaaaggctctaaccttccagacaaattagaaataatccttctaacaaaatttatcttgccaatcatctcttgtagttctgtcttattctccggaggctgaatcttcttgatcgcattaacgctcctttgagttacctcgatccccctttcatgaacaagaaatcccaaaaactggccggtcgacacaccaaaagcacattttgtcggattcatcttcaagccatattttctggttctctcgaaaactttccttaaatcggctatgtggtcctctacttctctagacttaacaaccacgtcgtcaatataaacttcaactaaccagccgattaaatcatgatatatataattcatggccctttgatatgttgctccagcactcttcaaaccgaaagtcatgacgacccactcaaataagccgattgcaccagggcatctaaaagctgtcttatggatatcttcttcagccataaagatctgattatatcctgcgttcccatccataaaactcaaaattttgttccctgatgcagcatcaaccagctgatcggctactggcattggatattcgtcctttggtgtagctttattcagatctc

SEQ ID NO: 22860 - DNA, 2628 bp, Oryza sativa
tgatttcgatttgattgggattgggatgtagtttttgggttagatttgtgatgatttgggattggttgtgggatcttcagagcggatgaatcagagggaggaggtgcgcaatgcacagactaagatggatttgtgcggtttttattattcttctcgttcgatttctcttcctctacgttctatgtttggttggattttgtattcgattgaatttgtgtaatatcgatgtgtggcgcatgtgggaacggagggctcgattccgattgggattgtgggggtgggggggaggggattgcgacggacggatgaaaaggcgaacgttcgaggagacgaccggaaaaatccaaatcttttaattagttaagatattgaagggtaccaatgtgactgaaatttcggtccgagattatttgatttttaacaaaatttgatcaaatattaccaaattcacaaatgaaaaaaagaaaaaaaaactttccaccgaaagagtttcttctatgcttggaattaattaggatccatgatcacctataatccaacgcactaagattgaaggtaccaggagcaaggtagtaaaagggtggaccaggtacaagaggtggaaggttaaaatggtaattgacttctatagttaactaggaaggtagcccgcgcatatgcgcgggcacttatttaatgttgcttaaatttttgttaggaatgtttacatgtagatgtagatgatatttttaaaatagatcttgactctattttaatcatgttttcgttaatatctagtttggacatattacttgaaaccgtacaaccttgaatttatgagaacatgtgtcacgataatggaatacttgagttgtttcatatctatttgtactatatgtgatttttttaacctatataaagggtcttttaaatactaccacgataatctccaaagcaccatattattagttatattttgacaaatatatgtaattttgagtttgtttattttcaacgcttatgattcataatgacatgagacacttttactaattaacctggagaatgaatctattttcccaaacttatttacaataactaatttattgaagtatactttatagtcacattaatagggtatatgacataagcccatcaaattatgcctgatgtgttggaattcctcaactacaagaaaatataccataagcaagatcattggcttaaaatatttttcatatttgttttacatctatgtaacattcatgttgctaacttatcatatactaatgaaataattctgaagattcaaaaaaaattgagaatctcaatctcaaacgaattaaaattaaattagatctacttaaaaatacacaactaaattatgttattttcatttattttacatatgtagatttaaattagcattgtatagtcgtcaagtgatatttgacacctgaaatataatgtaaaatttttttgaaataggaaaaagtacaaattacctccataaacctgaaaacatgacatcttttactctcaactattaatagaatgatttaccccctaactcaacccaaagtggttttgttcctatgtgacagtccagtaagcatttttttcaaaaagtaaaataggtggggcctacctgtcacactatctaccctctctatctctgtcccctctcccctctctctccctcatttcctcaatcctattcccaagcctctctctttcttatccctccccttgatgcaggggccggctgggcaggcacgtcgccgctcttctccttctccttcgtctattcccctactcttgctcttttgattgatccacctcgttgtttttgattggtgctttctgtcttgtcaggagagaggcattggtggtggggatcgattaagaaccgtggtgggatggcatgctgtggtagatggagctacgactgcatttgtttggggagttctcgatggtaggggcacagtcgaacctggccatgaaggagcagcgcaggtcctcgcctccggtggccgtcacgtgacgatgagatgtgatggaaaggatagagatggcagcctttgtcggagtgcgcatgtggtggccgagatagctgaggaggagccgcctccgccgcttgagctccaccgcccaccactattgtcctcttcacgcgccggtagaggctaaggagaagtcacgtggccatcaaggaggtgctcgccggcaaaggctgaggaggagccgcctccgccgctcgccactcaagctccttcgccccactgctcaccgcccctagccttgccgattcacagacgtggaggaagaagaaagagagaggagtgaggggtgaaggagatatatgataggtgggtcccaccaatttgtttttgaagaaaatgctgacaggactaccacgtttgaccaaaaccacttcgagttgagtcagcgagtaatttgtccggtattaatagttgaagttgaaagatgtctagctttcgagtttatggtggtaattcggccgaccataatagtttagggtgtaattcgtcttttttactttaaatattatcataacattatttattatatgttggcctcatgtgactggatcacaaattagatatataattttcaaataatttaaag

SEQ ID NO: 22861 - DNA, 528 bp, Oryza sativa
tttactaaaggcattcgccacgaggacctagtcggcaagttcggacgcaaacctcccaagacggtcaagcagatgtttgaaaaagtctatgagtatgccaaagccgaagatgctatcacggcgttcaagcagtcgggcatcacttggaagccaaagaaggatacgccgaccgcaggagggagtggaagtaacaaccacaaggatcgcaagcgtaagcccgaagaacttgtggcaacgacctctccgtcttcccgacaacgttcccgcgtcaacaccttcgacaagataatgaactcccaatgtccgcatcatcccaactccaaccacgtggccaaagattgcttcgtctacaaacagtttgcggagcaatacgtcaagaacgcacgtaagccctcagacggagatcaaggcacatcaaagaagaaagatgatgaagacgatgccccgactggttttcaagatcatcgcaaaaactcaatcacatcttcggcggacccctgacttatgaatctaagagaaagcagaagc

SEQ ID NO: 22862 - DNA, 559 bp, Oryza sativa
tttatcgggaatgcttcacctgggtggagaggaattgaacagggttggagctactcaagaaaggaattatttggcgggtgggtaacggacagtccataagagtatggcgagatccctggttaccgagagatattccagacggcccatcacccgcaaaggtaattgttgtatcaagtgggtgtcggatttgctacaggatgatggaacttggagggttgataaagtgcacgaacacttttggccgatagatgtagaaatgatcctgaagattcgcacctcagcttcacttgaatccgattttttggcttggcatcctgatagattgggaaaattctcggtcaggagtgtgtaccacttggtcgtttcgcttgcagagaccggtgattgctccagttctacagaggtgctagtaaataaatcttggaagcgtatctgggcgtgcaatgtcccacaaaaagtcagaatcttcgcttggaaggctatatctaatagtctccccacgatgaagaacaaaaagaagacgaatctggagttgttgagcacttgctgcatatgtgga

SEQ ID NO: 22863 - DNA, 4071 bp, Oryza sativa
tgacaatcatcttggtggcgagataccggcctctctctccaacctgtcgaagctgcagacacttgacctgtcgtccaacaatcttaccggcagcatccctgcttcattggctcaaattccaggcatgctatcactcaatgtgtcacaaaatgagctcagcggagagataccggcaatgcttggctcccgctttggcaccccgtcagtgtttgcttccaacccgaacctgtgcggtccgccattggagaacgaatgcagtgcgtaccggcagcatcggaggcggcagaggctgcagcgcctcgctctgctgattggtgtggtggctgctaccgtgctgctgcttgtgctgttctgctgctgctgtgtgtacagcttgctgcggtggaggcgccggttcattgagaagcgagatggtgtcaagaagaggcggcgcagcccgggacggggcagcgggtcgagcggcacaagcacagacagtgtcagccagccgaagctgatcatgttcaattcccggatcacctatgctgacacggtggaggcgacgaggcagttcgatgaggagaatgtgcttagccgaggccgccatggtctcgtgttcaaggcttgctacaatgacggcaccgtgctggcgatcctacggcttccttccacctcatctgatggcgccgtggtgattgaggagggctcgttcaggaaggaggccgagtccctcggcaaggtgaagcacaggaacctcactgtgctccgtggctattacgccgggccgccgccagatgttcggctgctggtctatgactacatgcccaacggcaacctcgccacgttgctgcaggaagcgtcgcaccaagacggacacattctcaattggccaatgaggcacctgatcgccctcggcgtctcccgcggccttgcttttctccaccagtccggtgtcgtgcacggcgacgtcaagccgcagaacatcctcttcgatgccgacttcgagccgcacctgtccgacttcgggctggagccaatggtggtgacggctggtgctgccgctgctgcggcggctgcatcgacgtcagctacaacaacagtcggttcgctcggctacgtcgccccggacgccgcggccgcgggtcaggccacgcgggaaggcgacgtctacagcttcggcatcgtgctgctcgagctgctcaccggccggcgccccggcatgttcgccggggaggacgaagacatcgtgaagtgggtgaagcgtcagctgcagcgcggggcggtggccgagctgctcgagccgggcctgctggagctggacccggagtcgtcggagtgggaggagttcctgctcgggatcaaggtcggcctcctctgcacggcgcccgacccgctggaccgcccggccatgggcgacgtggtgttcatgctcgagggctgccgcgtcggcccggacatcccgtcgtcggccgacccaacctcccagccatccccggcgtgatcgccggctcccctcggccggcggcatcacccgatccagtccactagtgttgttccatccattttccgctaattctttcttctttagttcagattagtcttagcttcatccagccgcggggtcaaaactgacatgtgagcccgggagcaagaacacctgcatttcccgccaagcagaccagaggcttggccccaagtgggaaagtagccgttgagccccttcctaatctcgcggttagtggaggtgtcagtggctgccggggaagcaaatcaccatgtggactgatgcttgcgcggcatgttgcggaggaggaggttggtggtggtggcgtcgtggactcgcgcatgtggggttccccatcgcaacggctactgatgctccatctgttcttggctgctctgtaccctgtactcccttctctctctctctaggaaattgatttcgtgtaggggggcctgcttggcttcttcggatcttgtcttttattaatctccattttttaccatgggcttagatcttttgtaatgttgtgatgtacatcttgtctgtattttgttatcccaattggttcaagaggatggtgggggatgaatgatgcttcatactactagccgttaaatctttttttcccctctgcatggaatgatttgtgtatggcagtatctagcagtagtacatccaaaatactctgtgcacttgttttatccactgtatgattagttggggaccctacctatctatcggatgaatggatatatattactctgtggtcaccttgtttttctttgtcaattggagaaagaaatggttgaaacagtgtattataggcttgactggccagcaatgctgaacgtttgcttggcagttgaggagatcttggtaccactgtacttggtttgagccccagaggcccccttaatacttttctttacctcctgaatccggtcatgtgcgccattgagtaataattagcacctgcgttatatcagtacataaatgcattaaatcatggacttcaaggtgcgtaacgtacactgaagagcacgacgttcgtggatagaccatctcaatgtatagcagtgaatgagccttcaatttggccgagatggaaatcatggaatacagtcagcccctctttccctgtgtctcaatgctgcttgcttgtttttccggaatagtaatttcttacgagcatcaggcggcaggggcccttgctacatttcggaatccagatcatcgcactgaaattttcttcgtcagggagggcacgggcagattggcatgatacgatgacgaagtgcaggctgccatgatcacacgcagcactgcgcgactgcacgaacacacttgaaaagctcacaccgtttttcaggttcggcgcaagtactgtagtagtcaacagccaagcaagaattgcacaattagcgcgcactacgagtctacgattcctctccttttgatctctgactcaccttgtcctcaagcgtgtagacctgcctgtaactcgggataccacatcaaagtttaggcattagcaatcccggatgtcgatacttctaacctgagcagagagaggccgtgagtagggggagagaatgcaacccatggcgtcttgtcaacaagatggcatcaatagtcgtctatcctagtgcctagacctgaataaatcctgaacaagtagcatgtggcatgtataaaacaacacgaggcaaggcaccaactggcaactcggccatcctgttgcgtttgcgcatacatcaccgtagagcaccagggaagattaattactatagctgtaaacttgtgctaacagaatgggggaggataactgaccatgtattctggctgcaacggtggtcagagagaaagaccaccaacaccaggcgtgaaatttgcactgaaactctgcagaatgctgtaaattttgctgtagaggtacagaaaaggctgcatgccgcatgctgaattattggggagccaccagcccgtgcaatcagtggcactgtaaatttttgctgcaggggagtaaactactgagttcactcacggactggtggaaccgaaatcactttggcagcatgttttcctctgtaaccaggggacactggctttctgcatgattgcaacagtactatatacaattctggatggaacacagacgacatttatgtttcggcatgtgcatacttctgttgtcacaatttcacagattcaagctagagtgtttttactactctcccatctcgccctgtcccggcctacatccaagcttgaaatgctcacgttggaatctcttgaaagatgaaatggcccatgtaaaacagtacatttacaatctactccagtcatggaagagaacagacatctatgtcctcctagttctcatattgttgcatgctcaattattgtttcattgagcattgtttcctaccatacacacacctttgcatcattgctgccctactttcttcagtagtttgaaacctttctgcgccactagctcctaattccaaaaccaagtctagtatggtgtactctagatcatcttggaaacttggaaattggaagcacgtcctatgcattcgcatctt

SEQ ID NO: 22864 - DNA, 2913 bp, Oryza sativa
agagaaatcacctaatatatgttgaaagttcatgtttacacctaaaggaaatgtgtactctcatgttgtctaaggggatcaagtggaacaagagcaggtaataactagtcttatcagaaaggatctctttggaatttgaaatatattagtcattgctacatgtttaaaaatactggaacttcctggtgtattattgctggctgaactatggaatagttagccccaaaaatgaagttcatagtgtacacacaatacacaatgttttcctgagattatcccctagcaacatcacactgcaataaaattccctctggtgtttgcatttctatttttcagtcctgtttgtaactttgtatatcttatgtttcgttccttcctcatccttacctttctactgagcttttcaatttaagagatgccaaagataaaaatcactacttattcttctgtgtgtgtgatgcttgtcttttcaggttgcactatgtaattggcataagcttaactaatccttttatttttgcttctgcagttttatgcaggatatggctaccatgggagtaactttgagcaaacataccgttgttatccagcatctttctttgacaaggtatccttctcccctgtgctgttattgaaatatctagcattgttttatccttttacatgatgaactggatttaactgtcttttttttccttttttttttttgcttcatttcttcagccacacctggaaggtggcgacaaaggtatgtcttcagacccctcccccctcctctcacacacacaaacaattcaaaccgcatgccactgacattatattttatcatcatcaatgcagtaattatgccaccatctgctcttgatcggcttggtaagctcaatctcagctcttttatactctggccttagatttacattaattgttttggctcctctaacagcttctctgcacattgaatatcctatgctgtttgagttgcataatgatgcaactcagcggatttcacactgtggtgtgctggaatttgtggcagaagaaggcatgatcatcatgccctactgggtatgtaatatgcagtggattttctttactgatatctgcaattatattccaaagaaacatattgactgatttatgctataattctttcatatatgtgcagatgatgcaaaacatgcttcttcaagagggtgacactgtccgtgtaaaaaatacaacccttcccaagggtacatatgtcaagttgcagcctcacacaactgactttttggacatctcaaatccgaaggccatgtgaggatatgataaaaacgctccatattaaaaccattccgtttcttggggaaatcatcattctaatgataatgctttgctttgtgacattgcagcctggagaaaacactaagaaacttctcttgtttaaccaccggcgatagtatcatggtagcttacaacaacaaacaatactacattgacattgttgaaacaaaacctgcttccgcagttagtattattgagacggactgtgaagtggactttgcacctcctcttgattacaaagaacctgaaaatccgcagcaaccatcagttcctgcaagtgaggcaactgctgaaggtttgtctttagattaagtgcactttagttttcagatgaacttgtattgaaaggctgaattttatcctcctcttctatagcaatttttcaagtgtgctgccatctgggagcatgtactccacaccctgaactagtattttcatctactcccatagtcctgtattttgcatagtaaactgcaacataagttaaacaaagaacaatagaaggaaaactagaactggaagacatgcttgaatcaaagacgtcaagcactctgtccagtggtgtgaagtggcactgttctggattgcttggttttggggttgacagcctttctgtcaacttcttgtatgctactagtttgtttactgggttgtcagcctttctgtcaacttgtattctatggtttgcttctttcttactaaaattcagccggtcatatttggcttgcctggctaaaactacataaaaaaaattcattctttttcatgcttatgtattgaaattctatataaggtgtattttcgtcatatcaagtgtgaacgatctgcaatgttaacgtttctataaaagaaaatatgcgctgttaacatgtattccacatgcatgtttgcatatgtttatcaagtgcattcaatacaagattccagctgccaaggtgtgtagtggtggcatttttgaatttctccttttaaaactatccttttggcgaccttcccaccagatgaaaatgctaaagttgaagatgaactgaaattcaagccgtttactggttctggaaagcggctggatggtaaagcctcaaagctacaagcaacagaggtcccttctgcctcacgttcttccccttcagactcaaacaaaagggtgaatcaggaaacgttagcaccagcatcttcaggagctagcaactccacacgccagaaatcaggaaagcttgttttcggttcaagtgcaaacaacaacaaagaaccgcaaaaggtattacatttttctcgcacttgaacaccctcctttcccttcttttcatgcttcattttttccctactgaatctgtttttttaatctaataaatgcgttactaaatgtgaataaatttgcaagaatgatgagcttgttttctctgcatatgttcacagaatcaccggccaggatggccagctaattgaagggttaaccttataaattctatgtattggccttttgggcgacaaacagaggatgctagccggaacttagattcatctatgatctagaactcaaatatatttagatattttttgttctgtcagttgctttcctagttagtagca

SEQ ID NO: 22865 - DNA, 673 bp, Oryza sativa
ctgcagcccatcgcccgctatccgaagggcgacaccaccgcgatggtggtcggcaaggacaacaaggttgaggtgggcccggtcaaggtcagccgcacggtcggtgacaagtggctggtcgaggacggtctgaaggccggcgacaaggtcatcgtcgaaggcctgcagaagatcggccccggcatgccggtcaaagccaccgagaagggcgctgcgccggccaagccggcggcggccgcccagcctgcggccccggccggcggcgcgaagtaagcggagaaccccatggcacgctttttcatcgatcgacccatctttgcatgggtcatcgccatcatcatcatgctcgccggcggcctggccctgttcaagctgccggtggagatgtaccccgacgttgcgcctcccacgattacgttgaccgccatccatcccggggcttccgcgcgcaccatcgaggaaacggtgacccagatcatcgagacgaagctggttggcattgatggcctgcagtacttcacctcgcagagctactcctatgcgggctactccaacgtcactctcgtgttccacacaggcacggacttggatgcggccctggtgcaggtccagaaccgcgtacagcaggccatgccggcattgcccgaacaggtccgcatgcgcggggtgagcg

SEQ ID NO: 22866 - DNA, 613 bp, Oryza sativa
gcgatcgtgctgaccccggcgctgtgcgcgaccatgctcaagccgctgaagaagggcgagcaccatgttgcccatcgcggcctggccggtcgcttcttcaacggcttcaaccgcggtttcgaccgcaccagcgaaagctaccagcgtggcgtgcgcggcatcatccaccgtccgtggcgcttcatgggcatggttgcggcgctgttcgtgctgatgggcgtgctgttcgtgcgcctgcccagcgcattcctgcccaatgaagatcaaggaacgctggtagtgctggtgaacggagtggcgggatcgacactgcaacagaccacgcatgcattgcaggcggtcgagcactacttcctggagagcgatcccatggccgaggcgatgttcacggtcgccggctacagctactcggggatgggccagaatgcgggccttgccttcatccggctgaaggactgggcgcgacgcggctcagccgacaatgctgaagccatcgcactgcgcgcaacccgggccctggcaacgcagggaatggccgatttccacgtgctggcgccgcccccgattcccgcgctcggcaatgcatccgggttcggcttcttcctcaaggatg

SEQ ID NO: 22867 - DNA, 3973 bp, Oryza sativa
cccagtccttttcactgccagaatttccaccagcctagggtttagacgccgccgacggtcctcgatgatcctgccagttaagctaaaagtagactcggacgatatagtagaaacaggaacagtcataacatctttagctaagattgaaagaacatgataagttagtttgtgctgttgccatcaactaaggatattgaagtcatcatcatattggttgacagtgtcactgtcaagatatgcagacagttcagaagaattgagattagcagttgaagaagctgcctgaagcaaagcagtagcagatgtcatcctggataatgaaccagcaccaagcccagcacctggactggcaccagcattaccagcacctggactggcacctgcattaccagcaccaagcccagcagcaacaacagaaccaaaaatcttcccccatgcagtccttttcttaccagtggaagggcctggaatagtggaactatgcaatctaacagaaccaaactttctttcatacttagcaaaagtatcagacaatgaagctctaacagttgttaaataagcagagtaatcatcaccaatgagttgagccataatctgaagcactttactaaaccccctaatcttggccctagggtccaagataaatgcaaatgaataaagaattggaattttagaccagtagttcataaacttagttttcatgggaccaacaacatttgcaatgttttgaacattgccatatgtgtttagatgtctagcaatctctaaaatgtgatgcatgattaatggagatgttggataataaacaccagacaaaacaacagttgaatcataaaattgttcgaggaaacacaaaacagattcagcacatgcccaatgtaagtctgtgagtaatggatggtcattaacaaaaggatgttgtgtactaataaatactgtgaatggttccctatgtggtatgagatgcttaagcattagataagttgaattccatctaacatccatgtccaaaccaaacatacgaggacgataaccagcagcaatgcaaacatttttatatgtagcaatgagctgattagatgcattcaagaatgaaatggcagctctaatgtcatttagcatgggcttgaacttgtcaagtccagccttaacaatcaaattgatgatatgacatgcacagcgttgatgcaaaaataaatcaccaatataaccagacagagcaggagtaagggtgtccatagctttagaattagcataagcattatctaatgtaatagagaaaaccttatcagtaataccatattcttcagcaacagcaatcacacgctcagcaatattagcaccagtatgtgactcatcaataagcctaagacccaagaccctcttttctaattgccaatcagaattaacaaagtgagctacaacactcaaataatcttccttagcatgaccagaccatatatcagatgtcaaagcaatagagctagcagaattgagacgatcaataataacagaacgacgatccttaaacaacttataaaaatctctggtagtagtttgtctagagacaggaacaaatctagggttatgagcagccttaatatagttcacaaaagcaggagattgaccaaaactgattggaagatcctctctagcaatcaatctacacaattcaaacctagcaacttcaggactatattcccatggaataacagaaccatctgcactaaatctaagcatggactgaggcaaagcattagacccaagctttctaggtttgcatgacttaatatgcctaagcaaatgtccagtgccagcagaagaacgagcactcaaagttttatgacagtaattgcatttagcaaagactcgaaccctattaccattggtcgtttcataaagttcctcaaagtcatcccataccttggaggttttggtcttcttgttggtacaagtcgcactagagccagtcggcgtcccattgcctttgtcgtcaaccggcgggtcgtcgtcatcgacattcacatggatcgggatgtcggaggtattgccgaatacctccacacgatcctcctcaacatcatcatcgtcatcaccgcgcatccccatagtcctcaactcgtagttgacagaggtaggatcgtcgtccatcgcaggcactctggtccctcaacggcggctgccgctaagcaacaggcttgcgacctgcaagcagccaacaacactcaaggttagggtcggaaatggagaaaaaaaaaagaaaaacaatggttccatgcttgtaccttcgcagccggagcaccggagttgccgttgaagacgataggctcacggatctacgagaagaccaagggatctggcgaagaagaacaaaagggaaagagacgaagaggaaggctggatctgaaagagtggaaggacgatgactcaggcgaccatgcgtggccggtggcccccatcctcatgcgcccctcatgcaagtcaggcgaggaatcgatcggagacgaagaggaaggctggatctggaagagtggaagggaggcgactcggtgagtctcaccggtgcgcgcctgaggccttgagcgagtgagcggcggacggtggaggaggagatctggtgggcggtggagcgtcggaggcggatcggcggaggcggttgagcggtggcggctagggttagggttaggcggagaggcggagagcgagaggcgagaggggactggggaggggaggggcggcgctcgctggcttatatatgcgggcgcacgcggcgcggcctggctgtctgttgggctgggccgtgctcgtgcctaccgttggtacgggccgtggtcgtgccgaccgttgggccgtgccgtgccgggccggcccatcgtgccgacctcggtccatgccgtgccgggccggcccaccgtgcccagccataggcccaggcacggcccaatagtcgtgccgggtcggcacgggcccgactgctaccgggccgtgccgtgcttgggccgggccaaattcccgtgccgtgggccgggccatcgggcctcgggccatatggccaactatagtctggactggtccttggtgtgcgctagctgcacgttgtccagagagaccgaatgtggcaacagcagccacaataaatacgagctgcaatactagacgagcaatgcatcaacaggcggtcctagctgcctgctggttaagttgttgcttttacacaaagcaacaaacacgaagcctatggatcaactgcgtgtctgcctacgtttagcaggcatcttgtgctcgtcggggagtagtagtggcggatggtgtagtcaaggctccaagctaaacagattcaattcagcgcacgcgagctagctagctttgcaattgtcgctatgagctggagcttggggctcaatcaagggataagccgatatgagggacaagagcacaggaagtatatagctctagagagaaagaaacaaaagtctagaccaccgaaatgattatgataatgacagtacactggatatctgcagcagtttaactaggggtgtgtttagttcatgttaaaattaaaagtttggttgaaattggaacgatgtgacgaaaaagttgaaaatttatatgcgtagaaaagttttgatgtgatggaaaagttagaagtttaaagaaaaagtttgaaactaaacaaggcttagagccagtttagaaccatttctgatcaacgactgatgaataatgtacgtacatacgtcgcagtttaattgaccagctggccatttttactacgtacacagactataagcgcgcgcacggaggcctgacacggtacgtcaggcgcctggcggcacagaaggttcgcttagtacttgcgttatatttctccaggcaaactggtaccgtggaccggccgcgtggtacacatactcctacgcgcgcacccctgttgcccgaatcgtaaacgaggcgcgcaacgcaaggaagg

SEQ ID NO: 22868 - DNA, 11951 bp, Oryza sativa
gggggggggggagcatcgtccgggtaataatccaatatccaagcccctccactccactcgcaatgtaatgttttaagacctgtttctttcggcttggaattattataatctagattattgagtcagattactgtaatagaataagcggttagttgtttctttactaaattattaggtttttaagtctaaagagggagtagggtggcatggtggataatttttcacccaataatctagaaaaagctcatctaatgagcttatcaaattataataagttgggctccagattataataagcgaaacatggcctaaagttaattgttttgagaccacttttctttttgaaatctgaaattaaatattgtcctgataggctgataccctacatgtcagacagcaacaaaggcagctcccagtcaggtttgggcgattgctcgagctccgccgctagctgccaccttcactacaaattaccaatttgccatcgatgtataaaaaatagtaaatcaccgagaaacacaattaaccgtttaaacttgacgatgttgtttgctccgtcactaatattcagtggcacaatgggtggcatatttcaatcgtatacgagagaatttcactcactcttcccattatcgaaaagtagttgcaagtattactcgtatgatcgtatctcactgcaagttaactaggtacgaaataatgattgatggtaagatgcaaattgagctatgttggttgcatatatatattttgagcatacacatgtgcaacaggacggatgggcctcccagacacaaaattgtgcaattccacaagcttaggtggtagtatttaagggtgttttattggttaagatcattgaaacaatatttaatgctgtcttcctctagttttgatatgcaagcttcactttccatgttcatcgcacacgccattagacccatatatttacatctctttgtgagattcacaagtcatgattggggatttacatgaagcaggaatttctaatgtaactgaaagaaaaggaatgactgaaatagaagttgtcaaagtcaaaaagataaaacctcaaaggctattcacgtttttccttctcatacctctccaccatctacaggagtcatctcttctttctttctcctctagtccttccatagtgcgtcatccatactcctatagaaaccttgtgatcaactaactattcatgtaccagtcagtagaaccaaccaatgactataaacgtaattactaattataggaagctcgagagtatagaaaacaaataaattaataaactttcagatttttcaccttatttagttgttagttgaaaaaaacacacgttagcaatatcaagtattttgttatatgtttgatgtggttgtaggcttgacacaccatagttaaaatcatagatttggaatcaatgtattttaattttagaagtacggtgaatatatacacacacttacttatggtttgggagatatttgatacatatgggaatattttaagcctacgtgagattcatatacatgcaaatatagtgattcgatacaaaggagcgaaattttaggatttttgattcctctctctcgctggttttgatggttttggagtccatctttcacaaaggccaactctatcattggctggcgccgcttcgtttggggacctgttaggattatagtagggtttcctccgctccaaatctccctcttgtaggagcaacaggtacaactttcctttttcatagttttttcccttcacagttcctttgcctgtccccggtaatggtcttttcgtccgttgtgttgtgtaatatattaacatataatttttttacgcttttgcgtttttttagtgatgtgacgatgatgtatatggaccgtgtgttctcaattgtatactttcaaaggaactagtaccattcgtattgttgagaggataaacacacaagcgtttaaagtttttaacattgatgaaggggtagtaaacacgcgctgcaaaaaggtgagacaaggtaaagccgagagacgagtggtattaagttcgctcaaaaataaagttataaaaccagggaagcaaaggcggcccgggaaaaaaaagaacccatcgcggccacccgcctcgttcgcttccatcctctccgcagtccgcacccgcgcgcgcgcgctcgactcccgcaccagccgcgtcatggcgccattccagctgcgcttcggcctccggatgtccccctcgcgctcctccgacgaggaggaggaagacgacgaggacgaggaagggttcgagtacgaggagatactgagcgacgacgggacggactcgccgccgccgctgatgatgcaggcggagaagggagggggagggctggtcggggcggtggtgggggcgctgcggaggtcgctggtgatgtgcagcgccgggaaggtcggggaggaggaggacagcgaggacgaggaagaggaggggatggagatcgggcggcccacggacgtgcggcacgtctcccacgtcacattcgaccgcttcggcggcttctcggcctccccgccgacctcgagcccgaagttcccagccccacgcccagcgccaggtgagctcgccggcgctaactctatgcaattcctctgtttcttctactcttcggtctctctctttcagttttctgaggattttacctgaaagaagctagtagctacgtactctacatacccaaatattctttggtacttgtatttttcaatttcacgcagtgtatttttcaatttcacgcagaaatatgtgttagtaaatttgttgttttatccttctctgttctgtgttctccaatgcaattagcgtataacctctttacaaaatatattgtgttcatagaaaggctcccaagaaagttgatagtactaatatgatgtttcagaacgatgatagtgagctttggtttcttttctagtatgtttagttgatcgctcagatgatacagggtagaaagagggcgatttgtttaaggatgtaagattaatttattccacaagtggatctagtaattaaaaaaggacaagtagtacctttttaataaaaagttcagttcttaattctagtatgcggttatatagttagattgctgagtcaagaagtacatgccatcaaacaaggaatggaagtatggaacactatgaaggtatgtgaaggtatacgattctgaagatatatgagggcataagagaagaataactcatatgtaggatttggtacaatactaccatatgacggccatgggttgaactttcaacggatcagacttgagttacttcgttctgtgcttgagctttaagcaacggggctgtttgaggtggttggccagcatgagcaacaaatgggaatcttcaaacctatcttttttattttggattagttctcctgtactttgcatcatcatatatagtaatgttctgtgaagtttgtccttttgcatttacaaatatcatttacaccatctttttaaggttgttaacgtcaaatcagtatttgatgtacaacctagttaaatgagctaggaatataagacattgtcctgttgctactgctgttatgtcataatctcttttttacccctttaacttgtagtggttacagaagtgaagattcaaagtttattcaccttaactacgatccttccctcctttttctttttcttttttaccgtgaaacagtaggggaggcctctaccgtatattaattttcgaaaagtttatgtacatgatacttaacaatttccatgtctaattttccatgcagtgtaaatgtatttggtgtttcaccaacctctttgcaatgttcatttgatcacaaaggaaatagcgtgcccacaatactgttgatgatgcagaggaagttgtatgaacgagagggacttaaggtatggccaccgcaacctaacgattagcattagaaaagtcagtattcaagccttcggaatacttatccattgtgttcttacttcttagatcgaagggatcttcagaattaacgcagagaatagccaggaaatctgtgtcaggaaacaactaaacagtggtgtggttccagatgaggttgacttacactgccttgcagggttgataaaggtagcatgaacttcctcatctctccttaatttttccggtccacggcctgagctgtatgaggcaaaaaagatcgttattatttatcggcaatttgctcttgtttgtttagtttttcagtactgagcattacctcagattgacagacgactaggcagttgcatctatgtatgtgcatcccctttttatgcaatctgaacatttcagaacctgaaatgtttgcagacatgaaggaatacagaataattggtgcaaggaacagtactttttaagtaaaaagtcgaataagtatttgcaggcaactgactattagatgtgcatgctattagtcatatttcttgtacatgggttattggcttactggaggatctattccatgatcactatattccctttttataggcatggtttcgggaactcccaaccggtgtattggactcactgacaccggaacaagtaatgcattgcaacacagaagaggactgtgctctccttgcttcaatgctaccaccagtggaagccgcattactcgattgggctatcaatctgatggctgatgttgtggagcatgaaaactacaacaagatgaatgctagaaacatcgctatggtctttgcgccaaacatgactcaggtattagaaacaactctggattctttcgttagaaaagcatacacatacactaacctgcaatgtttgttttccagatggccgatccattgactgccctgatacatgcagttcaggtcatgaatttcctcaagacattgatcttgaagactttaaaggaaagagaggcagccggaacacctaagacaacggaaccatgctccggttctccaaacggacaagataaacctccgacgccagagaatttggagagacccatcatttgttcagatcagaaaggcatagataaacctatgtttgatatggctacttgtgatcagctgctgtttggacctaaacaattccttgatcatcgtgagaacaacaaatttgaaggaccggagaagcatgacataggccaaccgaagcgccatagcgaagcttctcctcttggtaatgattcgaataaccaagtcagcagccctggaaaagaatttggcaacagaaatgtggaaggcctgttcgacaaatttagttttaggaaaggtgtcgagaggctttgcaggcaccctgtgttccagttgagtaggtccatgaagaagtctgcagacgttgtggtctttgatgctcctggagaagcaagacaagcttggggtttgatatgataatggttgtatatgtagttggtgtggatgtaatgctatcttttctctgtcttgtttgtgtgagcagaagcgattagcatgttagatttataggtgctgcaggttgttgtgtgcattataaccatttacttctgacgaaagcgtctgcctgtggctgctacaagtaaacgaaagccagctgaattctggctcagtactgtatacctcaatagctgctgacctatttattcttcttataaccgtccaaattaatctacccccacaaatatcccttcccaatcctaacatgcatccaaacgccacagtaatgcaaccactgtcagtgaacagcagtataagagcatccccatagcttatccatatttgatcctccaaatacctatatagatgattatccaaaaaaagattcatcattcatattccttccaactccaacaaataatctatattacatcatgcatatcgcaccatcctgtattttaataatatcttccaactaactttatatttgtatttttaagggatatattttgaactactaaattttaactgcgttatttatcgcaataatattttaaaatgagtaaattttaaccgatatatttttaataaataattttttaattgatgatgtatttacatgaatggacttctaatccacattagctagctagcgactgaccttatcctctcgcttaaaaaaaaagaaaaacagaaaagaacggaccttctctcgctaaaaaaaaaaaagaccctaccttatcctctcacgggtgcgtgcgtgcggcatacggaggggcgatgcgggacggcgcgggcggcgctgcatggcggcgcgggcggtggggcacggtggtgccgagctgagcaacggcgcgggctactgggcgacggcggaaggtggcgtccgcgcgcatggtgacggcggcggcggcggaggatgcaagcggcggccgcgagcatggcgacggcggcggcggaggaggcaagcagcggccgcgcgcatcgcgacggcgccagcggtcagccgcgggcagggcgacggctacagacggcggtggcgcggctccagatctggtacgcctctcgatctccactctcactccaccctccctctccaccgtccgctgactcaccttcgccggccggcgacgacggcgatggaggggaggtcgcgctggaggtgaggtcgcgtcgcggaagtccggatgggggcgggagaggcggctgttgcaaaatggcgtgaggagagagacactccatttttgcctcttctctctcctaatttggcgcatccgccacttttggagggcctgttagcgtatctgctggagctgatttttccccttttatacggcaaatgaaggatggatgaccggttagaggaactgctggggatgctctaagtgcattttctttctttcttgaggaggatgcattcaatatcacccaaaaatttataagaacttgtcagtgaattgctgaacaaatgcatagatgcattctctttctctattaactaaaacatggtaacagaagcatataagaacaactgtccgactgcatacggggactactactaatctactattgcagtacggctaaccgaaaatcttctggttcagatcctaatgtgtcaccccaattggtactgctgacaccatgcatgttagtccttttctatctcttcctgaagaccttgtcaaatagtacaatacaaagcagacgcagaaagcatgcatgctgcatgccaaattgccaatgccttgtgtatgggaatatatgcagttgtagagacgtttcagtgttgcatcatacaaaagatggctgtgcttcatccgccctgccgctcttccctcttcttagtagtgacgctgctagtttttcgttcatctccagcattgcctcatactttctttatcttcggagactcccttgttgatgtaggcaacaatgactatcttgtgaccctctccaaggccaatgctccaccatatggtgttgattttgcgttttctggtggcaagccaactggaaggttcacaaatgggaggaccattgccgatgtcattggtaatgtcaagtatgaatctcacgaagaaactctgattttcctgtctcgatctcacatttcttggcactgaactctcaggtgaagccttggggcagaaatcttttgctccaccctacttagctgcaaattcaagtgctgaaatgatgaacagtggtgttaattatgcctctggttcttctggcatatttgatgagaccggctctttttatgtatgtgaacactcaattgttgtgcttcctcatgcttgctttgtttctgaaatatagttgtatgaaaacatacttgatctgtgctgtagattggaagagtgccactagggcagcaaatcagctacttcgagaaaaccagagctcgaatactggagatcatgggggagaaggctgctactgggttcttgaagaaggcgctgttcacggttgctgcaggatccaatgacatcttggagtacctttcaccttccatgccattctttggacgagaaaagtatgatccttcagtttttcaggattccttggcttccaacctgacattttatctgaaggtgctacaacttctaactcgcgattactgaatttttctttcttctaatgttatttcaagatgatatgatactttttgttcctcaatgaagcggttaaatcaacttggagcaagaaaaattgttgttgctgacgttgggccactgggatgcataccgtatgttcgtgctttagagttcattcctgcaggggagtgttcagcatttgctaaccaactcactcaaggttacaacaagaaactgaagaggatgatctacaagctgaaccaggagatggggcctgagagtagatttgtttacgcaaacacgtacgagatcgtgatggaaatcattcagcagtaccgtcaatacggtgagctttcttccttgctgcagctacctcttgcgaaaaccacctgcgaatgctgtgctgcagtctgcagagcattagaaaatgcagaatatttcagtcttgcatttgtcttcaggttttgagaatgcgctggacccatgctgcggaggcagcttccctccatttctctgcatcagcatcgctaactcaacctccaccttatgcaatgaccggtccaagtacgtcttctgggacgcgttccacccgaccgaagccgtcaacttcatcgtcgccggcaagcttctcgacggcaactccgccgttgcttctcccatcaacgtccgagagctgttccaataccaatacaaatgagagatgtgcttttgcccagttgctatggcattcattcctgtttggctgtatcaattcccatcctctttcagtcttttcctctgcaatcttctcgggcataattggactggacagcacgcctttaacgagtagaatgtgactgaaagtgcgctttacgacaccagtttatcttgcttttttgcacttttctgaaggcccgagagaagattcaaccgtcagccaatgaaaaagagacacgtacacgctctccggctagtcgctgtcagtgaacaagaacttgccggtgcagtgcaaacttgaccaacgagcgatgcaacagaagctggcgcactacgtgcaaagaaactgacgaacaattgggcaaagtagcgcccatcttatcacagagtaaataacctatctatgtcactatgtgtgcacggtagccgccggtcagccggtgcaactcacagtggcgatatgcctatatattttacgtgcacgagaaagttgggctcgggtgccccggcactgccaggtacggccacctccggctgatcgatcgatcgatccatggagcctgccgccgcggcggcggggcctgggaaggccggtcaccacaacgccgacgctttccacgcggtggcggcgggcggcgtagctccgcccgcggagacgacgcggtggtcgtccctggcagccacggccgcgagcctcgtggcggtcggcctcggcggtgccgcgctgctggtgtggtgggcgctcgcgttccacccggcgaacgcgcgcctctggatggtgcccgcggggctcgtcctcctcggcacgcccatcctcgcgtggctctccctctgcctgtccgccggcccgtgcgccgccgtccgcgacgcgccggtgcgcgtgtaggagctcctcgcaagagtctcgcgcatttttgctgcttccagctggtccattttgggatcagatgtacatacatgttcattgttcactactagctagtcgtactatgcttctttctttgatttcttgctgattcatttcgggatcagatgcagatacacatacatgttcactactgtacttctttgatttctttgtgaattcagctgggagttgcagcgtgttgctgctagagggagagggacatgtagcattgatatggacatatggtatatatgatctggtgtacacagttgctttccaagattacttccccgtgtgtgtgatctggtgagtgcgaactttcgatcggtttctgcgttcacgcggcctggaaagtctaaagttggagtgtgccggatcgtaatccattggtcggcgtctcgtcgagaaatggacgcgcaatacaagcgcatgggccctcgaatttgagatatttcttaccggaggataggtatgtgtggttaatggtttcccctcgtggattgctttagtgttagattggtgatggattagatatgtgattaatggtagtggattaacataggaaatggagttcaacggaaggctgtactgaaatgctttagtattagataggtgatggattagatgtgtgattgatggtagtggattaacataggacatgaagtttaatggaaggctgtacctgcaatgctttaggactagatatgtgattgatggtagtggattaacataggacatgctttaggaccatgttggagaacgtcgccggcggccgcggcttccgtcgtccacgccccacgtcggaggtcgtcgccggcggcctcgtccttcgctgccacgccccacgtcggagcttgttgctggcagtcgcgtcctccgccgccacgccccacgccgggctcgtcgccggtggccacatcctccactgtccacgctccgcaccatgccggatctcgtcactggaggctgcgtcctccgccatccgcagccatgccacgccaggaactcgtcactggcaaccgcgtcctccaccatccacaccccatgccgcgccggagcttgtgcagcaatacgcatgctttgacagagatgtggtagaatggataaggtagaaggagatagaatcggtggattggttggttgctgccctatcccatttatcacggttgggacgggatcccgtcaggtagcatttctgtaaatttttatatactttttgatactggtacttcatgattagtgctaggatgctatattcctcatacatgtaaaggtccataaaatcatatactatgggtctttgtgcaagaaaattgtaatggaaatgttttttttatcggttcatgtattataatagatactgatgtttaaagttcccaaagttgaccagataagatactatactattatctttatatttatttgtgaacagagtacataacacggaattgtcggtgataagaggtgccattgtgcatccacagatccacttgtaagcgcagaggattaaggggggaaaggacaaaactaaaaactagttggaacatgacgagatacagagatagagatgctccagtccaacatccttattgatatgctacaatgtgaatatggattttcctgataagcaattgctacgtactaacaattgcccaatcattgaagtccagaaacacagcaccatacggatgggcaatattctgttgccatctcctctgttttgccattaactgacccacccttattaacgcattcatcagttccgtaacaggcttcttgttgggtcgcgaactgctcctttcagaagttgccgtcacaaccagcattttgcgtcatgttttcagtttattagtgcccaatcaaaatacgcaaattgctaataagcccccactatttttggtgtaaaccactgcaactatcccccactacttaaggtataaaacactaagactatctgtttccattttttgccatagaaaatggtagccccagtagaggacaggaccattggttggttgccagtcgtggtgcatttaatagttatttagataccttgctgacctgctgttctcctctcaagaaatgtaaaatcacacttagacaacattgccaagatagtgcctccttaacgaaataaccactttcttttatgttgcaattactaatatactaccgccttccccaaatgtttaatgttggttagttcaattttgagctaaccaacgtcaaacaaaaaaaaaaggagggagtacaatataacgggtagtgttcagaggcagaatgcacgcaccagggttcataatttcagaggaacaacatggttcaa

SEQ ID NO: 22869 - DNA, 1281 bp, Oryza sativa
aacagtggagctatcaaggaacttatgtaaaagaagtggtccagcagaaaggcttgtaataactaccatgaagattctttaacgaaaaaaagtcagcaaagggcaccctagcaaaaatcttacaatgtggatattagatggatggttcaaagactcatttgaagtggtagatgcccgtgaattagaatcttttttactttctccattatctgcacttgagctatccacaggtactgctaatagagaaatatcatccaatttcggtaatgcatccggtgcgtcggtctctagcagaattctgtctaagggcatctaaaataagtacaaatgtagacaattagtaaatccctctgagatggcatctaaaagtacagaataaaattacttactgattttagcattttctttgccttcgtggatttcatgcctgtaaggaagccggacaacgaaaagtaacagcctaaaatttcaaggctggacaccatttctgcagatcctagatacgaatgcagcaacacaccagctgggaaaggtccagttctcctgcaagcaacaaaaatgtaggaatcaatacttattggagaaaaacaatcagaagttacatgctatttgtgctagcagttaggtaatctggaccgtatacttcagattggcatttgttgtctaagacaggcaggattctcaaggttttggttatctagtcaataaatgtatccgaactatgttaggaactggtggataccatactataaataatctactaagaatttcaacttaaacatactttgagaacaaatctccatgtcttactttagtatctccagaagatcaccaaaggcgcgcacacaatgaacagaaacaggcttgttcaactccttagcaagttcaagttgctgctggaaaacttcaacctgcagtgatattttttagcttctgatagtcttattggtggcataaagcttgctcatgatgcaaaaggacttgaggcataggttatatggcctagtgatttacacatgttggaacatttggaaggagcagagtaggtgagcttttcaagatcagtgtcttcagccacaacaaatcatttacaagatcgaagaggatattgagcaacaggagagagattttctagcttagcttgcatgagttttatcgcttttgtgttactcccttcttccttgctccttttaaacttctatcctcctttaatgtaataggcaaagctcttggcctttcttttaagaaaaaaatagtcttatgggcataaaggggcgccca

SEQ ID NO: 22870 - DNA, 8465 bp, Oryza sativa
tcacgtgcattttaggccaaaacactaatacatacctttgattaatcctggtattataagctttgctacatcgttggctcatggattcattttagtgtttcaccatgttcataacccgagataatgaatatgttgattagtcatgcacttacttttgataatcatatatttttcggttttaaattgacggattattttattattataactaatcaattgaaagcaatatataatacatgtagatccttttcgagatggtctgagtggcggtttttttatatggcataaaaagtatggtgtggaatatagatcttttaaccaaaatgcacgcactagccaagttgttgcacctatatgctcatttctcaagtttttgcactagattgcaccaacctaccaagtttatgtaccgtagacgcaatttactctatatttcactcaattcagaaacagccttctttacattacacaggggcagcaggacatgattcagttgattaggatgtccagaagaacaacgtatcctagtgatgatgaaacaagatgaacaataaaatacttgtagagaattaatactaatattagagaagtggtacttgcactaggtaggccttagtttgtgctttgaggaaaggaactacagattattaccaaagttctattgctggataattcaatgtacaatttaaaagcgtaaaaaattgccgaataaagtacacctccccaacagccgcctctggtgtttcagcgaagaaccgccggagcgaatccatccaatccggcgatctctccggtacccacctatcaaattcacggaattaagaaccagagagcatagaggtcacggcagcgggagaggcatccagggaatcttgccatgggtggaggccgaagcaggggacgacggacgggtactcctcggccatctgcttcaccaggtgccagtctttctgcgcgcttatccagtagacaagagtcagcgaggagagattccccccgtgttctcgcacgaggtaggcgcgggagcatacctcggaagtgccgttgacggcgaagcgcgcgacgccggcggcggtggcggcgcgtatgagggaaggggcgacggacagcacacgcgggtcctgcaggtggcagtgcgcgtcgaagagccgcacgacggaagcggcgcgcgctggtgcctgggccatatccggcgaccccgcggtggccggaagcggaagtgctcaacggcgcttctagcggtgtgccggtgaccgccgccgcccgagcaagaggggaatcacggccttgtgggccgggatttatcgtgggcccagagaagccgaaatatgtcgttgggctgttcacggaacgcgctagccgcgccatgtgttctgggcttatcggcccagtaacactgggacgcgcgggctgttgcgagcagcccagtcaaattcaccgtggctgtcgaattcacttggctcctgcgcaggtgctcacgacctcgttcgtcgttagtcctagtgggagcgtggccgcgtgagatcatcggaataccacttcgaagaccgagaaaaagccaaagacctactacagaacactgtacaccccagcgaggcagcgatgcagccaacacactacacatggatgcactctgcaattcacggaacgagacagactgatgcatcacctacatagatccgttcttgctgttccgttcctgtacgggcacaatcaagttcaaggaaacggagttagaacatcacatcagcagccgaagataatcatgcaggatcaacagtgctaacccgctatcagtactggcttagctgtctcggaataattgtgcatttgtgcacacgacctcaggctaatgttccctgtgcggtctggccaaatctgataatccctctcatttaccatgacctgctctcagccactcactttgcttatcctcttccggccttaactcttcagccttcactctccgtcagggagcaaacagggagaaatccaggcagcaagtaacgtgaaatatccagagttactcccccacgaaaatatgtcaactgtgtgtgccctgcatcgtagaatagtggtcttacatagtgcagttcccctcaaaagaatgatgccttccaaaagcgacgtgtcccacaagcacatgcgcagtcctatcaggatctggggcgtgtggcctccaaggttagttactaacgcagcagctatgattaactcacgtttactgcataccccgggactggaaaggaaaaggaaaacaagctcccatcacagatacagcatgcttgattttagctttatcatatcatgcatctacagattgccaggtacatgagaagtgcccgggacccgaagatatccagcggaaagcgtggccgacctcactccaaacttccaaagcctccaagttaggacaagctatcgccccaatgtttgcggcgccaccgctcgcccaaaaatctccgtttctcagggctgtagcagtgcaagaacctcatttgagttatctcatataccacataggacaaatgcatattaaatccatttctctcacggtgcaaaatgctttgacaagaactccaacccaacattactttcaccgggacctgtgttgttacttcctttttttaactgctctgcacctgcatgcgtttgttttagctttttgaagtgagttcctcgcatcttagtgaagggacgagggcccacacttagggaagggacgagggtccacaccttttttcctccacgctatcacgcagcttatgtggacgcatgaagcaacgctcaactcctgtgcacggctggtggcggtagtaatggaccatctcaaagctccaccgcgtcggcgtgtatcctgtgattgcacatgcgggcgggcacgccataagtattcgcagggggtggttcccatgtagctgtccaacgatctcgtcgaaggatacagttcgctggccagcttaatgggtacaaatacataatccgtagcttatcggccttaccctgttcaccgcagcatttgctaactaaacggcattcgtcggagttccatcaagaaccagagtacagccaaagaggttagcgacgaatataatacagcaagcacgaatgatccggtttgacgcaagattaatggtgttggggtttttcagatgaagcccgtgattacaaagtcaataatggggtcatacattgtatccttttttcttttcttttcttgtctaatgaagtagagtgcaaacggaaaggaacggtgttgcatgtcacgtcacgaacggatgggtacacggtacatatgctacagttacacgcgctacacaggtgagaccaagcgacgccccgcccgccactagctagctttcgtcgggtccctttatataactcacgagccacatgccaacgggtcgcctcgcctccgtccaagacacttgtgagttgtgagccgcgcgcgcgacacgacacaagtcacaagtggagcgcgtgcgaggatgagccccagcgccgcggccaagatgcggctcggcggcggcggcggcggtggcggtttcatgctcgggtgcggctgcagggatgccaaggctgtggcagtggcggtgtccgccacgtcgccgtgttccgccgccacggagacgtccacggccaccacggcgacctggcgcagggcccggacgcacccgtcggcgtcggcgtcggcgtcgacgggcacgctgaccgtgccgtccgcctcgtcgtccttcctgtgggacgatgccgacgctgaggccgacggcgaagaggtcgacttcaagcgggagagctctgcgaccacgccgagcttctccggccttctgcggcagctgaacgagctcgagcagagcgtcatgacgtgggggtggaagagccctcgccgcggtaatcacttctcgccaccgccgccgcctcctccgccaccgccgttacctttacggccagtcgtcctgcaccgagctgtggacgccggcgggaagcgcagcaacaaagaagacgatgccaagttctcttcgccaccgccgtttttccattgcccgacgacccagctgcaccggaaggtgaagagcgttgaccaacgaaacagagaagatgatgaagcccacttcgcgccaccggcacctccgccattgcccttgccgccgcagcagctgcggaacgtgaagggcgtggacaaaggcggcagcaaagaagacagcaagcactgtccgccaccaccgcaagcgccgaagcaccggaaaacgaagagctgcgacaacaacgacggcttcaccgccggaaagctcgacgggagcttggcggtggtgaaacagtccgaggacccacgcggcgacttccggcggtcgatgctgaacatgatcgtggagaaccgcatcgtgaccggcgacgagctccgggagctgctccaccgcttcctcgagctgaacgcgccgcaccaccacgacgccatcctccgggccttcgccgagatctgggacgaggtgttcgccgggccggacgagccccgtcacggtcccccgaggccgccgccccggcagagaacgccacctcgccgccggcaccctctaccggcttggcgcctgtagtaaccccacacatggatacttaccgcgtagtatgtacaatgtagattactgtactaggttgcgtccaagaaattctcggcctcatctgatcacgtatctaccggaattgtttctgtcaccagattcacctctcgtgcatttagtacagtactacctagtggtcgtacttggtacgtgcaactctcccattttgttaccgtctgtctcctgatttaccaacctattatagtctccgcccatgttctcactcggaaaaagaaactactagtagccgccatggacgcgcgcgacacgggaggtttcacagtaaaaaaccgggtgcgatggtgcaagtggatgcagggcgctttcggccggggttggaattggatggatggatacaatacaaatggaggggagggccccgtgccgtgcatcgagtgggcgcgctcgcggtggacggtggtgcggtggcgatcgagcgaggcggtgggcgcaggtgatggacggacgcacgggagtggaaggggggagacgcgagcctactaatgatggtctagtgcgatgccaaaaactgcggcgacacgctccatcaatgcgcaacctctctctgggggggtcctttcctctttgcttcccttcctggaaggaaagaaacgtccgagcctcaatgcatccaccgcaattcttctgtccaatcctttttggaaattcttcccatgtcctctaattaagttgatctccattgacaagtagccaggactatagtctacagttgcgtttcttgatgcaatgctgtgcagttgcctcggccaaaattgaaggtacgggacatccaggctcatcaggtgcctgctgaagccaaacgcattcaaataagttagctgcagcatgcagtgtttcatgtattgccctctgcggctgtgcctgctctcaatttcgggtaaatagctaggtcgactgttttaatgcgtctcagagcaaccacccatggctgcaaaactgaactgcaacggagtagagagccttgttgttttgtcatgtggaagtggtcggtacggaagaagaaaaatgacaaactcgcccaactggcccaaggctgggccatttcgttttgggccgggagagtaggggacgcctaatttctcgtacaatcaacatcgtcgtgttcggctccgtcccccttggcccgcctagctacgcgccaccgccgatgatacacgtacgagctagtggcctagtacttctctagtactctccaagttgcgctgctccggtggccggtgcaggtaggcgaggacgctgaccagtaggaccaagcaaagcaagcaagcaacgcgatcaattcattcgttgctgccatgatgagttccgtctcagtcgttagtcgtcattaatgtcatgggaaaatgctggccgatgggtcacgcgaaatgcagtctgctgcgctgccgctgctgcgtgaaaacctgccagatgccagtgtgcaacagcgtgaactactgaactcggcccgatgctgaaattgtttaccgcgtaataagcccgagatttaggtagtcttagatcattgatgcatcagaatctacacgctgataactactactcttacatgaggggatggcggtttcaaaatctgtacaatgtgccgactgcctaggcaagtacaggccgagaacttaacatgttcaacgtcagacatatttagtccagtccaggagcaacattttcaatcagcacagtgatggctgaaagcttgctcaagcttatcgttggcaagacatggacaacactaaatgatgttgtgactaaaacagaggaagaaacaccgacgatcggttcaaaattttacatttaataaagacagccttcaatgaaggttcagctagtacaaaattcttcgactgccaaatcgaatttgttcacaccttgtcttgcatataagcagaataaaagacacccaaggcaccaagcgaaagaactagaagaagaccagagggcaccagtttccgggtattgtacagccttatacctgaaagagaaggaatatgttttaacttcccaacatcacaattcaacttcatggaaatggaacacaagagagtgaaatgtaccaaaaacactggcaaacagaaaggcagatccaaatccaacagcgtcacctaacgcctttgtttcaggtgattgcatcagataataagcctgcggtaaggataaaattacgcatatgttacaaataatcttgacaaaacaattcaatgtttaactgtacaaagataaaattactagacaaacagtcagtttcttagcatgagaaatcattatgcttccactagaaaaggagaaacaatgtacttattgatgagattctctaagagattcaaaggggtgccactgacttaagatcagccaaaggaactgaataacagtacctgcaagcatgtatgatgaatatagactttataccaaccagggttccttcgaagataacaaaactaatcaaaccaaaaggtaatgacgatatataatatattgtataccttcttgaatcatcacaaaaataatttattacaccttctcagcttttcataaacgatctcagtaattcataatttgaggactttcaagtctaagttgtgtttagcactatgttatgacaggaacaaattatgaaacttcgttaagaatctgattcaacatcctagttgaatttagtggtgccaagaaaagaatgatgaatagtagttattatgctaaaaagattccagattcaccaccttaattccacaagcatcacaatcctgaattacaattggaattttgaattgaaaacgtatttccacatgattcctgattaatagtcaccagtaataagttcattctgaaattgacaagcaccagcattatcaaagagaaaaaaaatgggaagatcgaataaggactccccattttgcaacaaaatttataactttctgttgttctatttatacataaacccacaaataccagtagtaatatgcatgaagattcacaagcacttcctaaaactctggatacttgtttagttgttttgttactcctgttggtcatgtttcttgtaccagtaagctgattcaaaacaactggttggactaagatttgaaggttgtttcctgcacctagcaaattgtgtccctttccatcttctgttccaactacaagtagtacaccaaaaattccagacatatttgctgtaagttcttccaatgttccgagttctaacttacaagaatcctattctgtccccccaacagcccaataaaactctgcaattttggggaaacatgtgtgtagagttgtgaatgcatgactttagttttccctcaccgacccgaaagttatactttgttaaaaaaaatagcagtttggtctaagcataattgctacagccgtgtaatcaattgtatatcaagaatcataacaaaagaaattcccttaagcatttgatatctaacctgaaagctaggctgctctaaagtgtaaacaaacacaaaagggaaattcagaaaatgtaggaaatatacgccgtccactcacaatgcccataagcgcggatccggacagtcctccaaagatggagcctttactccccgacctcacatctacacaccagaaagagactcatggtcagtacgcagcacatcaggaaaggaatcacgacagctccaaatggcgcacatgcaaaggcgccgccgcccaggaggagggcgccgtaggcggctgatgcggtgggcgcgagctcggacaccgcggaacaccggaggagggcacgacgccggctgcggccgggacgggccacagcactgggacgaggtggcgagggaagggaacggatggcggcggcagggtggtgga

SEQ ID NO: 22871 - DNA, 11110 bp, Oryza sativa
tgtgtgtggttccgtggagtgatcctatcgctttcggagtttcgcattttgcgagttctttttttttcctttttcacaactgcacgtttaggtgatgggttttgctcggtcgaggctgaacatgaacttttgacttagaccaaacggataggaataaaactttttaagtatctatcatatcacatgtttatatactaattataaatatttaatatagactattaataaaatctattcataatcttgaactaattcgtgagacgaatctattgagcctaattaatccatgattagtctatgtgatgctacagtaaatattctctaattataaattaattaggcttaaaaaggttatcttacaaattagctttcatttatgtaattagttttataagtagtctatatttaatactctaaattagtatctaaatacagagactaaagttaagtctctggatccaaacaccaccttacattttggttgtttacttgtttcttttggtaaacatttcaaacatacttcctccatctttaaaaaaaccaacctgaccctcttagtacaacaaatctgatcaggttatttttttaagacggagggtgtatatgtctaatgtttcgatgtatctcccttaataatttagctcatacttcctccgtttcacaatgtaaaactttctagcattgtccatatttatatagatgctaatgaatatatatatataataatgtctaaattcattagcatctatatgaatatggacaatactagaaagtcttacattttgaaacggagggagtagctgttaaacgcatgcttattttatgacataaaaaagtactagaatgaaacaatactttattatccatgatgcaaaataaactataataaaaccccctagttcaactataatctaaaattaagttttaaaattaaactttagttctgactgatctaaccagcagacgatgaggtggtgctcataccttttcaacaatcaagaaatgatttctatgtaagatagttattttgagttagttacttattccttacatcctaaataaattgatttcatatgagatgtaacatatcctatgttcaagtattgcaaacttagaggctgtttagattaatgccattttttaagtaaacttaccaaaaataatatatatgtttaatttgttgctaaatttgataaatatgtaagaaattctgtcaaaattttgacaataccaaaacttgataaggtttattttggctacaatttaaacatacccttattttgaaataaagggacagtttgcacacatggtcatacaagcaaaaggttgtgaagtcaaaagtcaatgtgtttgcctaccatcactatcactcgtccgcagcttttaaagttagaaagttgaccctgcaaataaaaccctagctgactaaacaccgacaagatataattattatattgtttttttttgtcatataatagtactatctctgtcccataaaaaaccaatctaaaataagataagatgtttttttttctagaacaataaatctgtacatacttttgtccaaattcattttccaagaaaacattccatcatatcgtaggttggttttttttggcacggaaggattacttggcaattggcattgttattgtacaacgagcctatcttcttcccatgcattaaaattagctataatacataggcgatatgtgctacagtaccctacggtttccgccgggggaggggggggggcaaggtttacaatgcgagctcatacacaagtatacctcctattgtcatatttgttatgagattcatgcatatggcacatatttttataaagggtcaattacttatttgaccttgttttggacgctaactattaatttgaccctactttttggagtttgcttatttgaccatccttttaaaaaaatgaagctcccatttgaccctgtttccactcatctgttaaagtttgattttttttcaaaaaagaaagaaatgtgattattagtcataatgcccaaagtaccctcggaccctatccatccgatccccatctctgtctctctcgggcttcaggcggcagcatcgggcggtgaggcagcggcgtctagaagctgacccctgccggcgcccgctcgggcttgcggcggcgtgaagccgacccccgccggcgcccgctcgtggaggtagagggcggcggcggcggcgggatccgcgccggcgcccagccgtgaagggaaggagcggtggcggcgggaagtggaggaagggagcacaagattagaacaagattagattagtagaacaagtattgatccgaaggttaaagcacccatcggctggaggtccgatgtcatgaaatccacaagattagattaaacaatgaaacctttgttgccatcggctaaattcaacttatatgtatatgcaatccttatgagccgatgcaacgtccagataactcaccggctgaaaccccgatgaaacccttattggcaatcaataagcagactagagattatggttctaagcacgacttagtagatcaaacttaactgatgcagcactaagtatgaaaagaaacacaatatctagacaatcaagccgttgactgattttcagggtggtagatgcctaggctaatctaatctagcaacgcgatttagccgataccggcaaaaaccctaaagcgagagacagccaatacagctaaattgatatgctaagactagattaacagagacatgataaataggtaggcaaatatatcatccaaaccagagcaatccaagaggtcgaatgtactgatgcagccttgaacgacgccgatgtagatgagacaattgcctggactgacggaacattggacttatcccttcgccggagatcgaagacgatgcagccccacgtcgggtgccaagttccgccggaacgtaaaaaaacaaaagtagaagtaaaaaggatagcgatgcgccgaattgtattgatcgtagcgatagattacatagaccccgggtgtacatatttatacccatggattgatacaagtcattgtcggacaagaaagaaactaacctaaagataaaaggaaaatataaagtccttatcggacactaaacacactttcctaaagataaaaggaaactaacaaactattcctaattaatagataaactgccatgccgcatcctctttaaactcggtcacttagggataagcttcctttagtagattgatttccttaaccgaatatagcaggaatccgactattggcgactttataactcctatcggctgattccgagatgctgcagccgataatgattctaagtcgatgacgtctttgttgattaccaaatttcactattaacacagcggcagcggcgtgaagcggaggaagggagcggcgacggcggcggcggcgtctgcgggcgctctgagggacggcaacgacgtgaagccgacccccgccagcgcccggccgtgaagggaaagagcggctgcggcgagaaacggaggggagggagcggcggcggatccccagcggctggagcttcacgcgcggtcgggggcagcggcggtggctacctccacccatatgtccttgggttcgagcttggccttcatcagcgccgcgtcgtacgtcctcgggctcgacctcgccgttcatctgcacgctccctgtcctgaaggcgtcttcttcttcatccgccaaaagacagagacgccatggccagcttgaggttcaccgttttttttttttgcttttatctatgtgcttcgattgattgatattattggacacatgtggttcaaactagattccaaggtgtggttgtttatttttaaaaaatcctgtcaaatttaagtcgaatttgtcaaaataattcaaatttgttcaatttatgctaaatctgtcataactgtgtcaaattttgtttaatttttttttgtcaaaattctgtcaatttaagtcaaatttgacaaaatgattcaaatttgttaaatttataacaaatctatcaaacttgtcttcaatgtgaaacttattacaaatatgtcaaagtatttgaatatatacacggtatgacataatagggtcaaacaatcaagatataatggggtcaaataatcaagggcaaaatggactatttacccctaagttaacaccgtgaactcaactaaacggaatagggtcagagaggagcttcgtttttgaaagggagggctaaataagcaaactccaaaaagtagggtcaaattggtagttagagttcaaaatagggtcaaataaacaattgcccctttaatagaacataatattgtattcctcttttcatatattatctgctggattaaatctaaaagtcacaaattattaatggggagtaactatacaccattcaatattttttaaaagcgaacttttaaacataactataatataattgggatgcatataacttataactataatataattgggatgcatataacttatataacttatatgtaacatgtataattttattcgaaacatgggctcaattagatggctaacaccacaagatgatatttctcaggctatgggtttgattcccactctttcgttggtcttgtgatccgacgattataaatttaaaagtcttgggaatttatatttttctgctctgcacaattcttgaagtgatccaacggttataaatttggaagttgcgagagagaaaaaaaactgttgtatatttacaagaaattctgttattaaaaatctgcaaggggaaattaaagcactcaaattcgtatgaacaagtccacatgcaagatgcacgttgaagacctgctatacagattcaatatatccggatcgattcaatcctaagccttattgtaagtgtaacgtgtttacactttacagtttacaagagccgatcggggggcttaacgccttaatccgatcattattccttgccatctgaattaaccaaaccatacacaaaagaatcgaggactccgaatctccgatacccctgttacacacgctactaaaattacctatgtacacccgacgcggcgacgcctgtacgcactaacgcacgtctctacaaaaaagccaagctacatgtacggtgccgtgcacgtgtagcctagtttccacaaacgatcacacgtacctgcatcggaaagaacaccatacggccccgtgccgccgtgcgacgatgcgatcgagaaaaaaatggttatgaaaatgtagtcgacgtagtaaggcgcagcattagcagagcaagtgcactgctggcttaatcagctggtggcgcgaaccatcggggactgcggcgacaggagcgccaatggactggagagatgggctgggctgaggtggtggtggtgcggcaggctgaggcggagctgcctattggcggcccagcgctcggccttgaccctgcgctgctggtgctggcgcacgaagtcgtggatccggccgagcgcgacctccatggtctcgtcgtccatgttggcgtggcagacgcggaaccacccgggctcgcggcagtggaacgacgtgccgggcgacacgttcagcttcacctggtgtacgatcacccgccacagctccagctccgcctcggccgtcttctcccggagcatgcggcgcaggtccatccacgagaacagcccggcgttgccgcgcaggcagccgatcccgacctcgcggaggccagaggtgaaccgctcgtgccgcgccaccagccgacacttgctctcctggaggaagcggccgatgaactcctcgtccgagagcatcctggcgaggaagtactgcgtctgcgacgagacgagcccgaagctggacatcctgcgcgcggccgccacgacggcgtcgttgtacgagtagatgatgccgacgcggaagccggggaggccgaagtccttggagaggctgtacacgacgtggatcaggtccctgttgcaccacggcacgtcgcgctcgatgacctcggcgatgctcacgtactccggcgtggcgaacaccgaccccgcgtagatctcgtcgcagacgaggtggacgcggtgctcggtggcgaaggtggcgagcatggccagcgtgtcgcggtcggtgatggtgccgagcgggttggacgggttggtgatgaggatccccttgacggagatgccctgcctccgtgcgccgtcgtacgccgacacgagggcctccttggtgagcctgaagtcgttgaagctgtggcactcgatcggcagcagctttattcctgacctccagcaacagtcgcggtcgaaactgtcaacggaagcacatgtcgtcaggccttaggcttagctacctcagctatgttacattgtaaacatgcatcagagttaaaattgcattgactacgaccgtgtgcgaacatcgtgcatgcgtttgcttgcatgactagatttagtcatttgacttcaacggcatccataattaggtcgcagtttgattcaatcacgggaaaattaatccatcttttctctccaagccaattttaaaacgtaactcaaatctcggagagaatgttatctgattttcttagttgacactcggatatcttttcctcgtttgacgaactactagatattcagaggaaacagaagacttctacgagcggaagagaacaaattcagtttcagttgtgatagttaaggttgacgggacatacgctgggtagtatggcgtgggcacgaggaaggcctcgccggggttggcgaggcagaaggcgagcgtctcctgggcgccggtggcgccgccgctcatgacgacacggtcggggtcaaacgttgccttgcctcccctcacctgccccataaactgggccatcgcctgcaacatcacaatcacattcagttgttaacaatatgacctcccgaacgctagttgctgcgttgctttcacggtcgcaagcagcagctttgtcatctatctggttctcaatatttttatcgaattttctatgatgttatatagcttgtctaatatgctgatgtgatgtcagcgattgattggccttacctttctgaactccgggaggccgtggtaatcctggaaattggcgatcctcttgaactgcgagacgccctccggtgtgcaaatggatgcctcggggtggttcttgctccattcctcgatcaggtccagagaaagctgtgacatttacagggcaacaaagacggattagcactttgtcgagaacgatccttaattcagaaatgagtatacacaggtctgtgcgcgtacctggttctcggcgagacccatctggatgacacccccgcgattgtgccgcaggtcgaacgggttcgtgtcgtaggccttccacccgtcgaagtacgatgaattctcgccgtggtcatcgcctgcggctttcgtcgagagaaggtcgatgccctggtacgccattgatttggtgtcggactccgaggatatccgaagcccggaccctggctggaacgcgagcagccgagcaggtagctactctacctgcctagccacgcaaggatgatcggacagacccccacaagaaaaaaaaaaggatgatcggacagacaacgagtacgtgcaatatggcacttagctagctcagctagctcgatgattgattgagctggcttgtttgggagataatagaacgaggtggccatcggtatttataaaccatggtaaagttggaggtcagaacaaccagcttgagtttttggcgcatgcatggccgagagaagcttccatgaaagggagactggaggctaggcacgagcgcgacgtggtttggatttttggaacatggaagaacggggcgacctcgtggccgtgatgttggccgcttttaatttccgtttaccaagttacctcgccgcagccgatggctatcctatcctattctctctgtccgtttcaggttacaagttttgactttcaaagtcaaattactttaaatttaactaattttatagaaaaaaatagaaatatttttaacctaagacaaatatattataaaaatttatttaattatagatttaataaaattatattggtgttgtaaatattactgtttttttctacataattagtcaaacttagaatagtttgactttgactaaaatcaaaacgtcttataacttgaaacggagggaatacggtaaagttaacccacttattctaaaactcaacatacagatatgatacatcatcatccactagcaataattacatacaaaacttatgtaagcatgcaacatcatctataatttattgaattatacaaatcaacgtccaataatcttccttcacattatttttcacgatattttaaacatatatatatatatatatccatcatttttataatacttgttaacatatattcatccatataatcaaagtgggatatcatatttcatctacaatctcatagagtctactaaatttatttctctcttaacatagtttgacaaatcagttttatttgttattgataactaatattttttttacttttaactcgattgttaaaaaattattaaaagttagtaattttcgcaataaagcgcggagaatcacctaatattccggaaagagaagaacagagcatcgtatgtggtctgtggttcggtttgggttggaatgcatactactaacgtttaactttcttgttctaaaatgttaaacggtttggctataaagctcgttttcgattagtatgttttcctaatcgttaaacggtgtattttttttaaaaataaatatataagtttctttaaaaattcgaatgaacctatttttaaagtttataataactaatacttaattaaatatttgatcatgagtcatcccgttttgggcggctgagcctgaaagatggaaaatttatcttttttctcaagtgcacgcttcttgaattttaaattttgtgttttttgaaaaaaaatgtatagaagagttgtttaaaaatatattaatctatttttaaatttaaattaattaatacccagataatcatgtgctaatgtgtaagttctcaatctattctatttttctccttccaggacaccctaactctgtttttactgaagccgggcgatggcttaactgagctcggcttggacgcggcagtggacttagagcaagttcaatagtgacttagagcaagttcaatagtatagtccactatagcttcaatttatctatagccgatttaatagccaattcatacaatagttgcttactatactattaacatatggtcccacctgtcatacacacattgcatcttggagtctgtgttacagttggctacagatctgtagcccgttgcttttctctctcatattttatcttactaaaatatgtttatagctggctaatagcccgctattgtacctgctcttaccgggctgcccgagatcgatcccggaagactagttctgccgccggcgcagctacctcaagaaaacgggaggtgggttctactttgcatgagagggaagtagtatgggcgtacaaccacaagtcccaagataccacataggactaaatactaaataatgatgtggaggagagaagaaagatgagagaaatagtcacctctcatgaaggggtaacccctacacaaactttaataaacatgtgagagtgttagaatattgggaattgtgtggtagaggtaatatattatacatgtcaccttttaatttaattatatgtatatgatgcatgaaattagatgtggtggtcacctctattataaaacttgcccttatactaaaagcaagtttaacaatacagccaactatgggctccaaatcagctatagtcaatttaatagtcaattcacacaatagttaccaataaacatgtactacataattaatgtctagtcccacctattatacactcatatcttggagtccgtgctacaactggctagaaatctgtagccgcttatctatcctcttttatcttgttaaaagagtaaaaagcacgggcggtccttaaacttgtagggttgtgccatcggtcccaaatcaatacaatcccttcaggatcctacgcggcgttaatgtggcgtgccacgcggacatgacatggcatcattttgactaataaatgggacccatttaaaaaaaatccttttttatattttttttcttctccttcatctcttttttttcctttcttctcctttatctacccgagcggaagaaaggaaaaaaagaagaatgagaagaaaacgaaaaagaaaaagaaaaaaaagaaaaggacacgtcacatccatgtagcatgacacatcagcgccacgtaggatccttggggcatgtgttgatttgggatctagataatacactttgataagttctgggatctggatctgcattttaaaagtttagggacccagatgacacaaccttataagtttaaggaccaactatacactttactctcgttaaaatatatttatagccaatttatagtctgttattttacctgctctagttgtcatggaattaattaacaccgctagtgcgcggaccgcggataccggatcgatcaaaggatctggctctcgttggcgattgcgtcatgcttaattatggcttaactgaagttagtaactgactctgtgaaacagtactacagcacaccaggtgaaatgcacgccgtagaatcattgatgagcgtcgagcaccccagaatcccggagttcgttatcaactctcaggttgccagtcaacttggcaacccagtttaaagtactagtctttcctaagtctttgggctaccacaataaattcgcatccaatttggccactacagtgcccaacttgcttttccaacgaggggaaataatgatgtgatagaccatcgtgatggtgatctgaccgtgtaaattgatggaaaaaaattgtgataaaaaacccatcaaaatcaacttttaaattgagttttcaaaaatttaggttgcagttgataaagtgaagagcaaacaattgagttacttgaatataagccgctttaggtttaattttttcgtaacaattaataaaagagcgtgaacaactt

SEQ ID NO: 22872 - DNA, 6754 bp, Oryza sativa
tccgacggagggaaggccgccgccgccgcttggccgcctcccctcccggatctgacggaggggaggccgccgccgccgcccggccgcctcccgccgccggaggggagccggagggtaggggaggggggagagaatgagggggggagagggttgagaggagaggaggaggagaaggagaagtgagaaagaggaggagaagtgggaaggagaagggataagatagggcggggaggacgaggtgctgctggccggtggcgcatggggatctttactcccggttggtgttaccaaccgggactaaaaatacatcttatgttggtgtaactccaaccgggagtaaagcttatgttgatcttttttcccggttggtaacaccaaccggtactacaaatagatctttagtatcggttggtaacaccaaccggtactaaagatgaaaaagtacccttgatcttttaaactgggactaaagatgtttttagtcccggtttttaatacaaccggaactattatgaaatctggtcgaccgatcaaagatgatttctccaccagtgtctgtaagattgatataacatatatcactctataaatattttggtataacttgttgcagtcgaatttgaacgtgtatatttgttaaagtaacaaattacatattgataaaatctcttttattttagaacggaatgagtaatctatcttgtcttttttttaaaaaaaaatgatcatttaattgacatgcaataaacaggtgaatgtgtataattaaaagtattttgctgacccgtcgcgcataggtgaaaatggttgtgcggtacgtagtcgatggactgatacaaagcacgggtagctcgcgtggcacatgcaaatttgcgcaatggcaagtagacattagactccaaagaagttcgcgctaattggcattattgtacgcatgcgtacggttgtctggtcgatgttttggattggtcggtgggacggtggctgcctcggtgcacggtaggcggtagcacgggtggtgtgcaaacgtggcgtccgaattcgcacttaaacaagttaacgttgaaacaaaaaactctgaaaggctaagctgaaaggcagagagtgggagagacatagcaagttatacggttgtaccgtatacataatgcaggcgcgatatcttttgaggctcgagagacgagtaatacactccggtttaataataattattattgtagataaacaaatgatcttaaaaaataacttggactactattttctattacaatatatataaaaatattagcaaatatataattttattgaagtaccttttaaaactgatttatacatatagtcttcatatccttgataaatattttaaaaattatttatagtataaaagattttaaagtttgatctcaccattcttcaaaactacaatattatcaaccggaagaaaatccaccggccacatatttgttgaagttttagtagtacgtacactgttttgatttgacaagttaaatagtcaatcgtgccttgatcatcaagtttgacacttttcgcactgagctagtgtcccgtgcggccgtgcgttagtggctcactgtacttgcaaggaaaccgtgtacgtgtggctctacattcaccgtggcgcaattgttttcgaggacgtgcgacagcgcgaaaaggtgaaaaaaaaaatgtgtcaaagggaagggctagatggaatattagtttgaaaaggcagtaaggcactgcctatagttcttaaaagaaaataagacaaggcactgccgttcacggatcggacctgtccgggcaaaccctgcagatgtacatcacggcgtttctgccacgtactcattgacaatttacggttaaacacagaatttctcccattattaattagagcactactgtatagtttaactacggatgcggaaacgtgccgccgtgcatatatgtacattgacacattgtctttccgcgtctttttcatgttcaaggaaagaacattgcatgctctcgtgcacagaatcagtccaagttcaataatctagcttattaccatgacgtcccttgtctaaaaaaagtgttcggctgttgcgtgtgtctcactatagctcgacattgcatgttcttctggtaaagctagaagcgatggatcgaggtgaagcgagagatcgactggcgatgacgactgacattacgttattacgtacctacgtggtcagcgattccaatttctgtgtgcaaaaaacgtttttggccggtcagtcatcgcacatgcatggcagcatgtgtgaccgatcgaccagctgtcgcttcatgtttggaacaacgactgtgaccgattgacgacagtcgccatcttctgttcgcaaatggcgatcaacgtttctatgcagaacaacgtgcatgcatgagtttcaatcgatcaacatgtcgtcaaaggctcaagctgttgctacaatgggaacgagacagtattaagtgtaatatagacaacttatatcgggcaactttagtttgctaccacaatttaccttactggtaggataacaaaccaaatgcttcaataatattttgacactatcaaatattaggattgttggtacattatctcgcattgacacaatttaacatcgaaatgtaccaaagcaagatcatcatcagatcttttcgattattgttcaggtctagcgtggaggcgggagagggttgacaaaggggaagttcctttatttagagggaggctaacgcaacaacggtccagtaacggatggtggatattctggggacggcgagacaagaagggcaatgaatagtggtagcagtagggcatttggatcaagtggttagctagcagcgagtaagagcatctccaacagccttccaaattagactctccaaacacacatatagctaactctccatctaatttagctagttagactagtttcttactctaacagactctccatctatactcttcattatgagtacagtgggacctgtatgtcagctaaatatccccttttcttcctcctcttttctcccttttccccgagtcatgcgaggcaatggctaccgcctaccgcggacggcggcagtcgatttgtgcgtgagcgagacgacgacggagccctacttttctcactttctccgccgccgctcgtctctctctctctctctccggcgctccgcgctcgagagcaagcggcgagcgggaggccgcggcgaccggaggtagtgctcgaagctcttcttgcgtgtgcgaaacaatggcgatgggcatgcgaagcgacggcggagccctccctcgccggcccctctaccaccccgtctcccatctcactggcgccgccgctcccttcatgctgtcgccgctcatccattcttctctcctcagctctcgagaacaggcggcgagcggaaggccttcgcggcggcggaaatcggcgctggaggccggtggcaacgagcgggagaccgcggcgacgctcgctgtcatgccgccctgccgccgcgccctcttccctgatttttccccgcgcgtgcgaggcgggcgacgacggtggtgacgaggcgggaagcggcggcggctccccgtgcgcgtgagcggcgacgaggcgggcggtgacggctgcagcggctccacgcgtgcacgaggcgggcgacgacggcggcgacgaggcgggcggcgatggcggcggcggctccccccgcgcgcgagcggcaacgaggcgggcggtgacggcggcggcggctcccgcgcgcgcgagtgggcgacgacggcggcgacgggtcccaagcggcaagcgcgcgaggcgggagccgacggcggcgaatgacgaggaagccccaccgctgccatggtcctctgctatttgggcaaagagagatgggaggagtggtgggacccacggttggccagccaaaatgactctctaagtttggccggtgggtgctgtggtttagctagccatatggcttagccaaccggatagagaggctgttgaagggtattttttttcttcgtatttgccaaaatttagtttggatagccatttggccgttctcttggagatgctctaacaacaacatatgtagtatagtagcaggagtttccagtcgccgagtatattgctagttgggacgcaaaggatgaagcggttgcattggtcactggcacaggaggaagctgtggtggtagttgtagttgcagtgagaagtggacatcatcatcgatatcaagggtgacggcatacagggacgaggcacataaggatgcatcggccggcggtgacaccgaaccaaaatggatgaaaattcagataatcagctaggtagggatctttttagaggaatcgatcaagtagggattagatacagtttagcgttttagcgttctcatcatgtgtgccttttttccacattcagatgcaatgtcatgctgcatatgaaaatggtacggtattcagtagtacaagattatcaactatttctccaaacgaatttattttcacatgtgtgccacactgtgtgctaacttgtgtggggcttgtaggtagcattagaccatcaacctgtcacattagtaaaaaccatttctcaaaccaccaaaagaggattgtattattgtttgcactgatttttcaagacaaggaaggtgttattgttagttgcgatctccggggatcaggaaaccgatccctactccgcctacgcgccctgatcaggggagccagccgttcgtggctgtgggcccctctcacgcaacgcaatactaaatagggggagctgccgggcacgcgaaccaacgttcgccctgtacttggactccccacacaaaccctagtacccaccgatccgggataggcgctgaagtgaggggaagcccgctacagccatcgcccacaccaacaccgtcgtcgtcaccgatgccctcacactgccacaccgtcgccatggctgcatcaagctctaagaccaatgaaggtatgggttcctctctctctttctctaccattcattctctaaggcaaccaccattattccaatgagcaaattacccctagatctgcaccttagggaaacctagaatctaacagttctaccccgttttacggttgagggagacgattcaatcaggagcaagagataagagtgataaagtagactcattcccaaaatgttggctctgcaagggtgttgaggtttgtgatggcccaatactaagttattaacatagtacgctccatttgtttcggcctagcgagaagaaagcctttgcaaaaggctggtaagcggtaaccggtaagcctataaacaggcccaccctagtctgaagtacccattaaaaatgaactgatttatctattcttgatatctttaaccaaccattcttttttttttctcaacactgtacaaactcaaattgcttatataaccatgtacacacttatccttataaatatacacacatatattctttccgtatgagtagcttcaaagaatattatagatatcttaaaatttatgaaataaatacaaacctaccgttcaaataataattaaattgaaaaatcgtgttttataaatactttaattttgcgtaacgttgtatcacactcctcttcttttctttttcttttttccatttccatatttcgatctcaaataataggcgtggtgtagtacatggtgtcattggtcaccacatatatatttctgaaagtgaaaaaggcaaacatatttcggcctcaaaaataaaaactactagaaaaaagtccatttcttcttggtcgctttgttggcgaggccggatcagctccggtcctccggcggccgcaggaaaaggaatggccatgcttgtccgctctccaacttctaccctccccgcagcgaatcaccggcagaaatccggcgtgctcctccggcgtccaacgcgccgctccgctcgccgtttccaactgcacgcggagaagcccgcttcccctggcgcgggcaacgagacgtcctccagctcggagaacgccgtcctcagggccgcctggtacggctccgagctcctcggcatcgccgcctcgttcttccggccgtcgcagccgcctacggagggggacagcgccggagccgtagaagaagcagcgtcggagcctcagggccgcgctcaggtcgccgaggctgtcaaggatgacttcgcgcggtcatatttcgtcacaggtcagcgacggactgtgaaatgcttaaataactcgagtcgtttctgatgaacaatcgatcggtgatgcagcgcgcgattgtttatgtaattttcagagttttgtttatcatttaggcttcaccgtgcacatttctgtgtttgcttcctacttgttgcagggaatctcacgctgaaggcttatgaagaggactgcgagttcgccgaccctgcaggttcgttcaatggcctgcagcgcttcaagagaaactgcacaaacttcggttctctcttggaaaaatctaacatgaagctcaccaaatgggaggatctggaggtaccacgatttaacacatgctatatatctcgttgctgatgcttagggcaaatccactaacccatcttgctgcggctgctgctgaagatgattcatgattctggacttgtggttgcaggacaaatcaattggacactggcgtttcagctgcgtcatgtcgttcccctggaggcctattctgtccggtaagtgcgtgccatttaacatgtccttccttgctttct

SEQ ID NO: 22873 - DNA, 10664 bp, Oryza sativa
  unsure (1)..(10664): unsure at all n locations
aggtgtgcaggtcggtaagtagggggacgaagaaatgcagtcatttttaggagcagagagagagatagagagagagagagagagagagagagagagagagagagaacacacagatgttgcgtcgttgtgcctgacgaactgacggattttactgtcgtccaggcatgtcgagcactggaacgtccccaagatggcactcctgcggcagattttcaggccgagtcgatgggtatgggagaaacgcaccgacgaatgaagcatcggtgttcatcgtgaactaggattatgcatgattatactcaatggtacctggttaggggcattagtagtactagtaccttgcatggaccgcatggtagcctatcaggttaaggctgctcgctcctgttgtacagactacagactacaagcagtaatagatcgaaccataatcattttagttctgggagattaaaccgtattgggacatccttcaattatctgttctaatctaaacaacgccaacagaaggataattagcgatgggatatctggaatcgtttctcggatgagagtctgaactctgaataatctctgtagtttctcttgtgcaatgcaactgcagcatccccgccaggtttcccaaaccgtcagggccgggattaccacgtccctgcggtaagcacggttaccgcgtggtaaccgtgaaaaaccgtacgaaaccatacaaaatttatcaaatatttaaattattctttaaatttatttgaatttaaagaggttaccgtgggttttttattactgtaccccgtggtaagactggtaaccgacgtaatgtaaactctgatcctcgcaatccaggaatcggaatcctcgaaatcaattgaaaactctgatccccgcaatccaggaatcggaatcctcgaaatcaaatggactgtaatgtgtaacgtgccaggattacacatagacccccttcgactgtgtggttccagaaccttcctagcctcgacgggaacgtactgtgtcgcgccttaaacaggcccggcccatataagcagttgggccttctagggtttcttatgtcgcacgactttataagtaggtgtggtgcctgctaggacggccgcaatctttcttccacggcagccgcctcttctggtgatctttttctcgcttctcctgactccctgcgttctcaattctttcgatttgctgcccttgctttgatgttcttgttcgcatagccttctctctcgtggtatttctgaagttcttcggatgaatccgcggttagttagtttgtttgtgttttctgaagcaacagttttgctggtcaaatgatgagagatataactgcaacaatatgatccatgatgtgattcttagtatttaagtctctgatgaccacttcgctgtttctaatggctgtactagtctactttttttttcaaaaaaaactttttgttaaaccggtcctttgtaggaagtgatgaagaaaaggttggtccgtgtttctgatttgtcagtgactgataaccatctctctttgcttctgatcctacggacaaatgacattcttttgttattattccttaaaatctttaaatccccttatgcatttgttctcttgcactttgcctatgttgttgcgaggatgaattatgaacaaacttcgcatgtcagacttcggagatgcttcaaagcatccatgagaagacatgtcatacgactgagcaatgctggcaccatctgttaatctctagctagataagttttcagactatgacaactcactgttagcggccggagaacggagtccttagaccttaatctgaataaaattaaatatttttcagtactatgaatatggacagtaatattttgggatggagatagtattagctttcaatatgcacttttttcaaacagaaaaaaagttgaaagaaaaagaaaaggtaaggtaatcgtcgctcttccgttgtaatcggatcgtaatgtgctgagtaggacagagcaagtgcagcatcgccatcaccagcctaatgaagtaatggtaataggagtgagcaacaaaaaatcagaacgggcgatcgtaagaagattcctcgcaagctgatatcccgcaacaaaagcactgattaatcagaacggcgattgagacgtgcaatgctactgtgatacactggtactggacgttgacgcttctgcgtgtgtaggatgaaaaataatgagatattcccacgcttaaaatggcaaacaatttttttgaaggaagggaacaaaacaattttgggcttgaacaatcacagccattcgctctattaaactgttcaagacttcaagcacagttaagttccgtctggggcgccatatcactgtgcagcatgacccacttaccaactgagaaaaactgcaggatgtcactgtcaactgtctgtgaactgtgacaaatgggtttcttcttgtgtatcgagtgtttaacagcggattgtgcgttgcttttccgaacgtaggatcagcgttggagggacgtgattggggagttggcaaactgtcgtgctcttgcatcccaaaaggagataacgtccagctcatgcttttcacagcttcttaatcattatatcgtgtgattagttgatttgtgcgctatcaataagctgtccgaagatgcaccacgctcgcatcaagctccatataaatagctgacaccagtacatcaagtcattgctacagatcacactcgctcagatcaacaaacgcagatagagagcgccgagaggaagaagatgagtagagcctgtagaggagagagcagtggcggtggccggagctctctgggctacctcttcgagccggagccggaggatatcattccggatcactcgactaaatccgttcaaggaaccaacaaggccccaaaaggcaatattgttcttggggacaagatggccagcgacgaagcagatcaagaacaccaaggctggctttggcctcccctccttgnaaaggaaaaaaggaaaaggaacctttcnccaaacccccccaaattaaggttatttccttttaagccncccggaaattccctttggggcccttttttcccaacacatctaccatactaaccaagtaggcaataactctggccttcttatcacggtgagtatatatcagagagtatatatacctcttgcttgtagactctagaaatggattatggtatgcataagcataacctgagctatttgtattgagtttgccccactttttttttgaaggaccggccgtccacgagagtccgttgtgcgcctggagggccatcgtcgcttggatttctgtttggtgatgaggatgcctaacgtgcaagtgcaactctacaagaccatagcagtgttgttatgactgtacacctatcctttgcatccatggggtggagcaagatttggcccaagtcttggagacttggaccggggtatgtcttgggttgtgcctctgtatcttcagatatttacgtttattcccaacaatacttgtgctccatgtcctggttttagggatctagtttaatttatgtacgtacgtgtgtggcaaaggtctccgccgtatggtgtgaggatgcgtgctaattgctttatcgtgtgtgtgcatgtttctgtatctttgtttcggcctgttatttgttgcatggctatttgacattattgttgtaaattgttgccatcgagggcataagttgtatttatatatgtgactagtaatttatgtttggatgatcttctgtatggtgaaattatggaccacatgtgttggtgtgttttccggataatatggattcgcctaaagattatggtgctctccactgttggtagaaaacaatttaaaccgttaatcttatttgatcgaacgatttatatctatatatactaccaccctaattagcgggagtagaacatggtttagaatgtgtggaggggtataatcgtcatttagtaggaactgaacttttttcttctttttttggctttttggatggaacagagctatgtcagtgaaatggataaccacctatcaatctagccaggaaaaaacataaataacaaaatgaccctaatcactgtagtagccaatcgctcaaagatttatggtgttcatgtataaagtaaccaatcgccttaatcttgagaattatcgatcaagatgataagaatatcataaccgactagcggaaccgatttatatatcaaaactagcctcctctataacaatttagattgattttggggtaagcacgtatttcatatgggtaaatcggaaggtttacgggacaaatctacagaggatatcgactttcgtaacaaatacaaacaatttacaacaaaaactataaaaaattatgggcgcatggccatatcgaggaaaacttacgaaaattgagacctaaacatggggagtctaggacttgggcaaccaacgatgtcttggcgttggcaagatgaccagacgagtaggcaacatcatgaggaactcgggagtcttggacttggggggtggcgcgagatgccttggcgaggcaaacaggaggtgccaatgttggtgtctcgcttgctctcgtggcaggcacagtccataggtggagcgattggacagtagaataggcgcatgcaaacgaccaaccgacacaacactatgatagttgagctagtgagctcatctccactgggtccccccaaatttctaaggcgggggtgagggggctatatgatcaaggagattgcacgcgctcatcatggttggatggacaaactaggcaaaaggttgagaaaaaaatatggctaaaaagtagaagatcggtttattgtcgagggttagggtggttattcaattgaatcgaccacaaccattttagggggcggggggatttttatataagcagctcgttcttcatttcctataagctttgggcctaaacaagaaaacatgataactgttttaattggactcgaacgaagttctcccatcgtttagaccgacctccgaggaaaagcccttatctcttccagatttgatctaaatttgtttaaaattcaaattcatgctaaacatggttgtcaacaatgtcaatggtcttgttcaaatgctatattaaaatgggccgcccaaacactccacaaccaagaacgcacggcccatcaacccaactttcatggcgccatggccgctcgctgctgcagcagcgcccatccactcgtttcatcgacgaccgtatcccgccgacgtggacacctgttgttgttgcctaccagtggtcaatttcccaaactcaggtgagccccccaattaacgatcgttgcgtaggagtacaacataagcgcctatgccgtccgaagccaagacgcagacttgcagaggccagagggaatgaaaggatcaccatcaacgagcgactcttcctcctgcaatctgcaccatcaagattgcctctgttcagcgttttttctcacgctttttcttcgtcttttcgtgcgcacttttctgacttattttcttttccgtggcggcgaggcctcacgaacgcgatgagatgctcgatcggtagacaggagggagggcaggcgggggaggcgacagcgtgttcctgcccttcgccgcacaacgcccacaggcgccgtaactgtacacggtatggacatggcacgctcgatccttgtaatttgtactctactaccgtgtggcgttggactgttctcgctgtcaggtgtcaggcccgaccgcccaactttgagaggacctactccccactcgtagtatttgtaccgtttcataaggctatttacaatgctcataggtgacgttcagcctcaaccatctacgtcgaaaattcggcgcatgtacatatctgccattcccaactgaagatcacggagcctaaacgaagcaacccgttcttcgtcagaactggcaagcgtggggcaagacgcggggcgcattgagagggggcatggccctgtgcaacgccaccatactcgtgcaacggtcacggcggcagcacagggagaagaaggaaagatggcaactgcggtggcctagggcggagaagggaagatgccggcggcggaggaagagaaggcggcggatctagcacctaacctcatcgtcgtcaccgttccgccccgcctctgaacgcaatagtgacagatcgacggagagggccgccccgaaccctgcaagcgcaccgccgagctccccccgcgccatccgccaatcgaaggaggaggagaggtggagccccgccgccgccgtcgccgcttggactgcacctctgccgctcgggccgccaatcagaggaggagaaggagaggcggcgccgcgcttgggccgcgccgccgccgagctccgttgcgccgttcgtcgcgggcgtgccacggagctccccccgcgccatccaccagtcaaagcaggaggagaggtggagccctgccggcgctgttgccgcttggattgtgccggtgccactcaggccgccgattgaagaaggaggagaggtggcgccgctcttgggccacgccgccaccgcttgggccgtgcctccgccgctctgctcggctccgtcggcaggagacacttggtgccgccactcgctttctctccgctaggcaaaattgctgagagaggagagagatggagaggaaaaatgaaggagagatagagacgggacccaccgaaaataatctgcattgtggagcatgtgacatatatagttcttaatccacgtgacttgtgaggttcggtaaaaattggtggcacattgctattgccctaagaaatatttgcccttgcagccgttggatccaaatcgaccggcaaccagggccccatcgccttctcgctgacatgaacgtctgtgagccaacgagaaatcacagtcgaatttccccgcttcgtcgtccccagatgcacacgcgttccacggtaagccaccgggcgactcgacgactcgacgtctctttaagtagtagtactacgaccgagccgcggggtctctcgattacactcccccgtcacactctcccgctccatccctgtccacgaaagcgcgcgcgggtaagatacgaggccgggagggaagaacgaccacggcatggccaccggtctctccggcggcgctatgaccagcttcgccgtcaagaagccgctcctcgcggccgccgtgcgccgccggtcgtggcccccgccgtcgggccgcgcgctgccgttctcgccgctcacgcggaccccgcgcagccgcgggctcgggaccgtcacgtgcttcgtgccgcagggcacggagagccagcaggccccggctccgtccccgccgccgacggtgcccgtgcccgtgccctcgctggaggaagaggcggctgccgcggcggcgcggcgcatcgcggagaggaaggcgcggaagctgtcggagaggcggacgtacctggttgcggccgtcatgtccagcctcggcttcacgtccatggccgtcgccgccgtgtactaccgcttccattggcaactggaggtacatctcctcttcgcttctacttccattatagtatgcggagaagtcatcgccgtaatttttgccggacaagatgtcccagtaatttaagtgtgcaaatggttgttgaccgtggttgatatctgtgcggccgtgcagggcggggatgtgccgatgaccgagatgtttggcacgtttgcgctctccgtcggcgcagcggtaagcggccgtgacaccgcaaaatccctgtttgctcgctgataacgtccttgggatgtcaaaattttgcttaattttgacgctcgctggggggttgcaggttgggatggagttctgggcgcagtgggcgcaccgctcgctgtggcacgcctccctgtggcacatgcacgagtcgcaccaccgtgcgcgcgagggcccgttcgagctcaacgacgtgttcgccatcaccaacgccgtgccggccatctccctcctcgcctacggcttcttccaccggggcatcgtccccggcctctgcttcggcgcggtaagcccagcgccctgcagggagcacgtaacgctctctctggtcggccgggcccacctgtcagagccatccaattgggatctgacctgccacgtgtccgtttcttacagggcctcgggattacgctgttcggcatggcctacatgttcgtccacgacggcctggtccaccgccgcttccccgtcggccccatcgcgaatgtgccctacttccggcgagtggccgcggcccacaaggtacgagaccaccagctgctcactgacgtttactgcaccactactactagtccacgctgctactactactactggctagagagtgtacttttgctgattttctttgtgtggccacgagcagatacaccacacggacaagttcgagggcgtaccgtatgggctgtttcttggacccaaggtgcgtgactggtgcctatgcatttgtcgtctatatgtgcttgtgaccagtacatgacaaagcaatcctggtttccttgtaccgtcttctcgatctcaacgtgtgtgtggtcgtgcgtgcaggagctggaggaggttggtggtctggaagagctggagaaggagcttgcgagaatcaaccggagcttgtgattttgacggcggcaattgcagctagcaagactgcgcctgtcgagctagcagaattgcctttgccttgcaagattttttgtatttctggccgcttcgtcgactccattaattgtcggtaccggagagaaggggactccagaagcggaagcgcttcgagtatacgacgatgtggcagcggtgaagagcacagtatatttgtttgattgtggcctgtggcatgcatgcgtctctgcggctgaacattgtaaggaggatgttctgtgggatggttattctttgaatttcactgcgccaacgtttttggtggagacgttgtgcgtccagtcccctgtcttgtaagaagcaccacattactgtgtataacacatgttagagattgttaaccacttcaatgaaactaaaataggtggttggcaacaatgctgaaatttcaggactttcacatctgtcttgttcagtggtgcgccgcatatgcgaatgattgtccacattgctcccggtcattctacgcgactccatctttattcgtagagggtatgtagtgcatgccatacggcccatactggtattacgtgacaattcacaattttcttattgtctactactctttcataaaagataaactctagttactaatctagatacgcatgtatctaagatttatagttaggattgaacatttttttttaaaacggattgaggtaaaaaagaaaaactcaccatgtgagctcgtttttcgtgtgtgctactagcagcatgatctcggggtcagataaggaaatcacaaaatctggtcattgattagacagccatggagactgggaggtaaaaaaaatataaacaaactaaattgatcacaacagaagtatatatggtcaacaatatcaaaatattccttgttcttgaaaagagagttacatgtatcttgtatttgtgaaatcaaaatgcgttttgattattattctgtgacgaacgattgacatctatgattattgattttgatatttggagattattggtgaagtggttttggagatgattgagttttcaggtgatgaacagggttactgttttgtcaggaccggattctgtgtcggtttcggtttcgggttgtttgtttggatatccgttattgtttcatgtttatggcttctagatggatactatgcgtatgtaatattgttgtttgctaccaatgagttaagttggagatagcttggcctcggaatatggtttctttgtttgattcatgtgtaggtgacttgatgtctcgggaaagtattgccggtgatggattgggagtcaacttggggaaaaggcgatgtccgtgacggtcagatatcatgcaggatacttaggctagagttcaatgcacgtggttggtgaatattccatatggcatacgatggaggtattgtgtgcgtatgggatgcggagtcgaatttggaaggagtccaaatttgatatgattggagtttgtaaagtttgtttcttgtacgggaaggtttcctaggtggattaggacttcatgtataaataaagaggaagcgtgaggcttatcggtatcatttttgagagcaattgagttgtaagtttaattagggtttcgagtttagtcgagattttcgtgaggagtgctgttgttgcactttataaacacagagagaagtaataaagttatcatctactttgagagttcttcgatttatgtttgctcggattcggcggtctaaccggcaagacaccggcggtcagactggcggcatacctgcggtcagaccggtgacgacgacaggaggcataggcgatcttcaggcggttggactgggcgatcaactccagttagaccgatggtattagctcggtcagaccggcagatcaattttggtcagaccgcgatccgtcgaatttgagggtaacttttaattccgcaaaaagtttaggttttggggtatacgaaccattcaccccctctctggttggcctagttcttatgtttttttgatcctactgtattgcgaggggg

SEQ ID NO: 22874 - DNA, 8509 bp, Oryza sativa
ccctccagtttgctttgagattcagtaccgaagttcagtgtcttttgtcctttttctgctatgtaatactgtcgagcagggttgatgacaattactactcctcagaagcatggcaaggaaaataattccaatgattcagtgctcacagaggatgaaaacatcgagccacttgttgcttttagcaggccacctcctttgccaccagttcttggccccttgatcatgctctcacttttcaatatgtcaagcggcggggatgaaaacaaaaattaagccggtatgccacccatatgcattgcatatgttttgctctttactttgtgtcacgatgccatgctcataatattcagtgttttttttcaggaatctgaatgaaatatgtggtttatctccgaccgcataccgtctccagaggtgttgtacatactaagttgtagcaatcaactactagaaaaacatgatgtagcataagctatgcactgtttactgctgtagacttgtatggaccaagtaagctgctgtcaaaactctgttgctaatgtttcagtagcgaattgacaactttccaggctgctgaaatttgttcagttgtgctgatgtttcaattgctttattttctgtgttagctgttcactttatgattcgagcccttcttcaaaacttttcaattgagccaaataatctatcttttatattattaaaacagccttgaaagaagacatcacgttcgctgtgggggctagaaattcttacattaattggagaaaaggaaaagaagagtctaactagaaatgcaatttaaaaatagctgaaattcggaattaaaaataaacaatattgaaagaagagttcatgtaagaactaaatacgagattaattaaaatttagaataaaaataaaataaaatacggaattaaaaaagttcttacatacgagattaatttaaatttagaataaaaataaaataaaatacggaattaaaaaagaaaaggagagttaagtaggaataaaatttaaaaaatagctaaaattcgtaattaaaaataaggaatattgaaagaaaaatccatataagaatacaatacgagattaattaatatttggaataaaaataaaaataaaatccgaaattagcaaaaatagaaaaataaaagaatagttcaattaggaatacagtttaaaattaactgaaatttggaataaaaaataagtaatattgaaagaaaaatccatataagaacccaatacgagattaattaaaatttaaaataaaaaataaaataatatccaaaattataacaataaaaacgatttcaagtaggaatacaattttgaaactattgaaattgaaaataaaaataaaaatattaaaacaacacaatacgatactaattaaaatttgaaaaaaaataaattcataaattagaaaaaggaaaaaagattttaattaggaatacaatttataaataactaaaaatgatgataaaaaataaagaatattgaaagaaaagaccatctagaacacatgatgagataaattaagtaacgggcctataaaggagtagagtggtggcggttgatatgacatataaaaattgttaataaaacaccaaatgggatcctaataatgattaaaaggagggacaacaagcaggctgtgaagcaaacgggcaagacggttgccgggacttctagaaagtaaaaaaaacaaatcccattgataaatcatatttgatttttaaaatctcaataacaataaaaagaagaaacatgggatgggggtgtataggagtatagttgcagagccgccgccggttggcgggacttctataaaataaaaaaaataaattctaacgatcgttatgttcgatttttagaatcccaatgacaataaagagtagacggcgaacgggctgtagaggagcataatggcatcatttgatgggacttctaaaaattataaaaaataaaacccaataagacaataaactctgaaaactacaaggtctaatttttaaaaggtttggaacttctaaaaagtacaaataaaaaacccaatgataatcatgtttgattttaaaatctcaccgacaataaagaagagaggcaacgggtgagccatagaagagtacaatggcaacgccgctgacggtttggcgggatttataaaaagtaaaaaatgaatccgaacaataattatgttcgatttttaaaatcccaatgacaataaagagaagagatagtggaggggccgtagaggagtataatggcagcgtttaatgggacttctagaaattataaaaatgaaacccagcgagataataaactctacaaactataagatccaatttttaaagatttaaaggagaatgaatagaaatagtggtaaatcgagcaagaaaataaaggagatgacagaaataaatggtatttgacttttaaaagctatataattagaagcacggagatagctatataattagatgacagaaggtttggtcttttaaagttttaagacaacaagattgctacttaataaattttaagtaaaatcatactaaatatatatgattttatctgggtgctagccatgcaattacgtgggccacccaagctatataatagcccacaagaattgaagatctagaaagaggtcggaaaagcagaaacaacaacagaatagagcgctgggtgacaagtgttaggcaattttttttttcttataatggaatttattccggcctgtgcaagcgacggccaattaattacaaaggtttcttgtcgaagcaaattaattacgaagattgctagtcgaaaactgcgacttataaaattacaacttaattctaaaaagaaataattcaaacatcaacccaaaacggggaaaacactattggcagcacaccagcagaaatgaggctccaatttgtcttttctgaaagaacaatgtccattttctggagtgccaagctgctttgaaatgccttgttggctgttggttttttcaccgagtgaagcttatggacgcgaaatggagattgctcgccgacccagacgagcagattgtcgcgacgtcctcgagcagctccggcggaccgctcgccatcatgcggacgttcgtgccaccgatctccagcaatgtggagattatagataccccatatctacatgacagttataatttagtcggatatacggtaccaaatatagatagaatatctttatgaggactcgggttagtttctaacttgtatgtgaaggaaatacccgagatcttagtcggttacgattgtattttatctgtgattccatattctgttaagatatggactactgtactttgtaaagcggactccttcccctatataaggagggtccgtgtgcctctcggggcacggtactttttttccagtttatacaatcaataacacactcggcggaatcatccccggacaggagtagggtattacttcttgaataagaaggcctgaacctgtataaaattccttgtctccaaacccatccactttccaagcttgatagccacccccttttattattgccgaaatcttgtttcgacagttggcgcgccaggtaggggtagcgtcaagtttatgccgactaagtgcgatgggttccgtctccggcatcgacgacgtcaccttccctcccgggcaggcgttccggttcggcagcctcaacttcatcaccaacgacttcggcaagatctctctccttgactcggattcgaaccagtcggggagagaccaggtccccgcgccgttcggtattccgaactcggccgaggcctattctaagatcatctctcccgagtcggcttcaaaccactcggacgagatccaatctactcctccacgaccagatgaagacggcgggtcctatccctcaatcctgatgaaacttcctgatgatttggccactgtcttcacaaccaagacatctcccactcgaagatctaggcaagctccggcttcggccccgatccaatctagatccagggaggttggtgttatactccaacctcttgggacagtctcgacggaagagttggatggctacctcaactcccccggcgtcagttctcgaccaaccgagatcctcgactacgacgacttcggctaccactacgaccaaggcgacctcgacaacttcgacgacagctatgaggataactacacgcccctcttcttcggcgtattcatggatgacaacgaaacggaggaacagcgccgagcccgagaagcggaccaagatcgcgcacggcaagaagctgaatgtcgcagactggaggaagagtgacagcgacaggaacgagaacgactacagcgtgagcaacaagatcgcgaacggattgcaaaggaggctgaagatcgacggcaacgtgccttggaatctgggcggcgaccgagagagctcattgggcaacaagacgtcgatggaacaacggtctttcgcaccccccagcagaacgcgattgcagcaatcactctcctcgacaccctcctcaaggaagacgcactcaaccaaactgatcatgttgtcaacatcttgaaccagacgaagaccatgatcgctgcctcggttccagccaactccgcaagcacccgcaccccgactggtagccgagtccctcatcttcgatctcaagactatcaccagccaagcctcagcattgccggcgtcggatctagtcgcaggagcaggggacatgatgaacggtctgttcgttcgcctcccgaacgatataggaagcgtcgagttgaacgaccacactccccacatcgaaggcgccccatcgatcttcgcgacaccatcaaccagcgccgcgcagcaagaggccatcattcaccagatcgctacgacgacgatgtggacggagttgctgccttcacaagcgatctgcgtcgagtggattggccaaccggctttaagccgactagaatcgagaaatatgacggcaccaccaaccctgagtcttggctcaccgtctatagtctcgcaatccacgcagcaggaggagacagcaaagccatggcgaattatctacctgtggccctagcggattctgcccggtcatggctccacgggctaccccgcggcacgatcggatcatgggcagagctacacgaccacttcatcgccaacttccaaggcacttttgaacggcctggtacacacttcgatctctacaacatcattcagaagtctggagagtctcttcgagattacattcgacgcttctctgagcaacgcaacaagatctccgacatcaccgacgacgtcatcattgccgcctttactaaaggcattcgccacgaggacctagtcggcaagttcggacgcaaacctcccaagacggtcaagcagatgtttgaaaaagtctatgagtatgccaaagccgaagatgctatcacggcgttcaagcagtcgggcatcacttggaagccaaagaaggatacgccgaccgcaggagggagtggaagtaacaaccacaaggatcgcaagcgtaagcccgaagaacttgtggcaacgacctctccgtcttcccgacaacgttcccgcgtcaacaccttcgacaagataatgaactcccaatgtccgcatcatcccaactccaaccacgtggccaaagattgcttcgtctacaaacagtttgcggagcaatacgtcaagaacgcacgtaagccctcagacggagatcaaggcacatcaaagaagaaagatgatgaagacgatgccccgactggttttcaagatcatcgcaaagaactcaatcacatcttcggcggacccctgacttatgaatctaagagaaagcagaagctaacaaaacgggagatcaatgcggttcagcctaacacgccccaataccttcggtggtcagagatagcaattaagttcgaccgctcggatcatcccgaccgagtggtccacccggggcggtaccccctggtactagacctagtggttcgcaatgtcaagctccgacggactctcatcgatggtggcagtgcactcaacatccttttcgctaagaccctggacgatatgcagattcctcgcacggaattaaagccgagtaatgcacccttccacggtgttatcccaggattgtcagctacaccactcggccagatcactattccagttaccttcggcactcgggagaattttcgcacagaaaacatttgtttcgaagttgctgatttcgagacagcataccatgctatactcggacgaccggctctagccaaattcatggccgtcccacactacacttacatgatgatgaagatgcctggtccttgaggggtcatatcactacggagcgacatcaagcaagccgtcacatgtgacaaagaaagttgcgagatggcccaaacccacgagatcactctcgctcgcgaagagatccgactggctgccaccacggcaagcaaaggagaggtgcctacgaccaagctgtcaaagaccgaagaaggcgacaacaaaactaagaagatttcactagatccctccgatcctaccaaaactgctgtaataggcgccgagttagattgtaaataggaaagcgcgctcatcacctttcttcaaaataacaaagatatctttgcatggaaaccatccgatatgccgggtattcctagagaggtgattgagcactctttacatgttaaggaagacgccaaacccatcaagcaacgactccgccgttttgcacaagacatgaaggatgcgatcaaggaggaattaaccaagctgttagcagcgggcttcatcaaggaggtccttcatcccgactggctggctaacctagtcctggttcggaaaaagacggggcaatggcgcatgtgtgtcgattacaccgacctcaacaagtcttgccctaaaaacccttttgggttacctcgcattgaccaggtggttgactcaacagccggctgcgagttactcaatttcttggattgctactcgggatatcatcagatccgactaagagaatccgactgcttgaagacctcgtttattacgccctttggggcctactgctacatcaccatgccctttggattgaagaacgcaggagcaacctatcaacgcatgattcaaagatgtttttcaactcagatcggtcgcaacgttgaagcttatgttgatgatgtagtcgtcaagaccaagcagaaggatgacctgatcgtggatttagaagaaacttttgcaagcattcgtgctttcaggatgaaactaaaccctgaaaagtgcatcttcggagtaccgtcagggaagttgcttggatttatggtatctcaaagaggcatacaggccaacccggagaaaatcaacgccatcctcaacatgaaaccgccaagcacccaaaaagacgtccaaaagctgactggttgcatggcggcgcttagccggttcgtctcacgactcggcgagcgggggatgcccttttttaagttgctgaagaagactgacaatttccagtggggacccgaagcacaaaaagcctttgaagacttcaagaaacttattaccactccaccagttttggcctcgccacatccgcaagagccgctactgttatatgtgtcggcaacctcccaggttgtgagcacagtcctggttgtcgagcgtgaaaaggaaggccatgttcaaaaagtccaacgaccaatttatttcgttagcgaggttttagccgactccaaggcaagatatcctcaggttcaaaagttattatatggtgtcttaattaccgtcagaaaattatctcactactttcaaagtcacttggtcacggtggtcacatcgttttcactcggggatatacttcataaccgcgaagcaaatggatggattgcgaagtgggccctagaattgatgtctttggatatatcgttcaagctacgaatttcgatcaagtcacaagctttagctgatttccttgccgagtggaccgagtgccaagaagacatgccagaggaaaagatggaatattggactatgcattttgatgggtcgaagaggcttacaggcactggagctggggttattttaatttccccgactggggaaagattgagctacgtattgtggatatatttttctgcgtcccataatgtggcggaatacgaggcgctactccatggattaaggattgccatctctctaggcattcgccgattaatcgtctgtggagactctcagttggttgttaatcaagtcatgaaagagtggtcctgtttagatgataatatgaccgcttatcgacaagaggtacgcaagttggaagataaattcgatggacttgagctcacccatgtcctccgacataacaatgaggtagccgacagactggccaattttggttcaaaacgggaggcagccccttctgatatgttcgtcgaacatctttatgaaccactgtacccagaaaagcacaattgaagccctggatactcaaggcgtaagcatgatcgaaacc

SEQ ID NO: 22875 - DNA, 2660 bp, Oryza sativa
attcctgcagccccgttatgaagagggccgagtagacgacatcaattgactagaagaagcccgtgaagcagctttaattcagtcgactcggtatttgcaagtgttgcgccgttatcataatcggaatgttcgatcgcgagcctttttagtcggcgacctagttctgaggaaaattcaagccacacaggatcggcataaattatctcccttatgggaaggaccgttcataattgtcgatgtcactcggccaggttcttatcaactcaagcgcgaagatggtactctcatcaacaattcttggaatattgaacaccttcgtcgattttattcttaggtatttcgtttgtatctttcctctttgactgctaacttcaagtttttccttgaagtttttcagtcggggggctactatgataataatggagtgtaatttttatcaattcaatttgcttacttgatttatcattgccctgtttggtctttcgactaagtcaatgaggactgaaggtttttaatagcttttgcgggttttaggctcaataaggcttgacaaaggcttttaagaaatcagaagctaagtatggaacaccaagcatagcataaattcgtcagtattgtacaaattgagcctccatcatcattaatcatcaaaatcattgttatatcaatcagtatcagttttttcatcatcagaattatcagacccagtcggccgaaggtcgacatcttggaatctctcaaccacgtcagcaacaatcttgtcagcggctttttgcgcatcattgatgaggtcaagagcagcttcttcgctcgtcccgtctgcaaagccatcaatggcatcaatgtcaactcttggataaagggatttggtcatcgccaacaccagacttgctcccatacttccagcttctttgatgttcttgaagtaagtatccggagcgactctcagcttgtcgaagatttcggcagcatcaagtgtacttggaccggcgttattgaagaacatggcttggatgagtggagtagcggcattagcgactttgtccctggccccttcaagcctattgatcttgtcaactaagacatcaaactgtgcctgtgacttgatcttgtggtctgcatcaacagattcacattaacgaatcagcatatagaagataatggcttttgaggtattgatttttggtaccttcaacctcctttaaagctgagtccctctgtcttgccagttctgccttatcattttccagagtttgaatctgcttctccagttgagatatcttggcagcttgcactacattgactctggttaatcaagattacaaagataacaacataagttagttgggcagagtttgtgtgtaccttttgatgagccgctcagttcaaaattggattcctggagctcagcaatccgatccctcagatcatgttcattcttcctggcaagctcttttgtctcgtgcagctgattcctggtggcttcgagggtcccaagatgagggactaacctctctaaggtcgccgttttggcttcgttcctaagatgaatcctctgcaagacagtttaattagcgcctggactaaatggcaaacgagatggttgagatcaggcgccaaagagcttacatttacaatgcgggtggcttggctgagcgcatttttcagcaagcaaacttcttcatcttctttttgcttatttattacgattccttgaggctgcatgttgtcatcccaccacttgaccagaatgggaggacgcgaatcctcagctgcttgtatccggaggatctcttcttcatcaccaatcattggccctagtgtatccataaataaagatgaggcgatcaaataaagtctgttggatcgaaatgatttcagatagtgtgtttacctgtgatgattcccggtcggggacgagtagactcttgtgtcttcacaggagatctggtttctgagtcattgccagcatcctttccgggaggattgtttgtttgagcttcaacctcgggaattttttggcttggccctgcatccgactggtttccagtcggggactcctggttaactctgactccagcttcggccgactagcttgcggtcgtgggttcgttgctgggttttacattgtcgctggcctgcggattatcactcgggtgatcttttgcagtcggcccggtttcttttgaggtgtctgtttccatgttagtcgggtcagagtctttctcagaaggatctatgtcggatggtttcctacaagttttgccatcggtgttatcttcatgatgggagaatattaatacaaggaaggttgttatatgatttgtacctggaagactttctgatttttggtacaggatgactggaggttttcttcttcggattagttggcttcggaggtcttccggtcgctcctttatctctgagctttccggtatcatcgccttcgtcgtcacttagaaccagcttcctcttgcgagaatctgactcgccgactggatcagaagcacttggttgggtttcagaccgaattcttggttctccgcttccctgaccagtttggcagcgaggtgattggcgttgagcgattgggggatccgatttcatcaaagcaaattcctgggcgtgatatcctttattgttaactgattcaacaaaca

SEQ ID NO: 22876 - DNA, 9183 bp, Oryza sativa
atcgtgtttgccgtcaaattcaaaagctgtgcgggatctttctttgattggagctaaccggctttttatgaagtgccgagtgatttgttctccttgcaagccttgctctttcagctttatcatgcgctccatcagttctactgcttgggcagcctcatcccctgtaggcaatgaattccatgtgtcttggtacaccggaggaagacaagagtactcaggaaggactggttcaggattttgaacatagaaccagttggcgtgccagcctttgttcgaggtcttgaagggcatggagaaatatttttggcttagtgttcccctgagttgaaaaccaacgcccccaacaacacatggtttgctcttgtttggctgaggtttgaggaagaagatgcggcataacaaggcgaaatgtggcctaatacctaaaaaggcttcgcaggcatgaatgaaattggcgatgtgaactatggagtttgggttcagatgatgcaggctgattccatagaaattcagaattccccgaaaaaatcttgaggttggaagggagaaaccgccatagaagaaatgagcaaataccacgatttcatgcgtatcgggggttgggaatgcttcgccgaatgccggtcgccaaccgatgatctccttcgctggaagaacgccgtgcgccaacatctccttcagattatcttccgtcacatcggagggcgcccactgactctcaaagctttctctttcttccgccatgaatgtgaactggatggtttaatttggtccgagatatggctggaaagggatgaggaatcagagcggtggacgcggggagaaatttcgtgaatggattggggcggattgatgaaccctagtttggccggcgcagttttgtactgtagcaggaaatggggaaaatggcgagagtctcggcggggaagacgaagagacgttttctttcacttcggtgttattagggtatagggagtgctaacaggcctgggtctgtacagtacttcagcccaatattattaccagcgtggcccgttgtgatccttagggacttaggcgctttttgctttggcagtttgtgctcacaatgatgtggcccaatgctgttaaaatcctttttaatgtggtttgataattctttggaattaacacgatgcaaacaaaagatgtccgacaggaaggtgttatactatttttgtaagccttattaggctgcaaaagctgtttgggttgattcgagatgacttatttattaagagtcattctcttagcatgttatatgcttaatttggttacgatgagggttatagcttaggctattagactcgttgattaccatgatttttatcatgtttggtggatcattttaagagtttcttactcgtagtcctatcaaatgtgtttatttttggaccttttgagtgtttatcactcggcccttttcgtattttttatccttgatacgttcaagttgagaaacagtcggctgggtattttactaagtaccatgcatgcttcgctataaaaccactcggttcttgactacatgtttagtttttcaactaatcacatagtcaggggctacacctaattaggtgcatctactcgatgcaccatgttttattttcgcccttcgcagtctttgattttagcactcggcaagctagagcaagttgaattgaagcactcggattactgttttttgtttcgagaaggctattttgtcaactgcgaaggtctcgggggctactgtggagattatggataccccatatctacatgacagttataatttagtcggatatacggtaccaaatatagatagaatatctttacgaggactcgggttagtttctaacttgtatgtcaaggaaatacccgaaatcttagtcggttacgattgtattttatctgtgattccatattttgttaagatatggactgtactttgtaaagcggactccttcccctatataaggaggttccgtgtgcctctcggggcacggttcttttttcccagtttatacaatcaataacacactcggcggaatcatccccggacaggagtagggtattacttcttgaataagaaggcctgaacctgtataaaattccttgtctccaaacccatccactttccaagcttgatagccacctcttttattattgccgaaatcttgtttcgacaagcaacatcgttgcacagacaaatttcgcatttcacgcactcttcaaaggtaacagaaccaattcgacccaaaaggagaacaagattgaacggtgcatcgtacttctgagatcgggacgacggcctacctctgcgtccccacgacgcggcttgtcgagccacgttgccggcgacgacgctggcgtcgccacgttctcgacctgcttcgcctcctcggccctcctccgcttgttccacaggacggccgcgctcgccgccacggcgatgccgacgcagaggagcagcaggtttagcaacgtccttgccgcccacgggtacacgcggttgctgttgccgtcgacggggtatatgtacaggcgctgcaccgcgccgacgagcaagaggaagatgaagaatgaggaggagacgacggcggcgagccagagccagccgttgtggccgagcaccggggcgatgggcgcgtgcgacggcgacggcttgaacaagacctcctctgcgggcaccttgtgcgcgattgcgacgacatcgcccgcggagggcacgctttctcgcgtcacgaaggcctcgatgcgcagttcgaggcgggagatgtcggagaacccaccggaggcagggacgatgaggtccagcatggccaggtcagccgacgtcttgaacacggcgatgaggagaaggctcggcgtcgcggcttctgccgccgtgccgctccggtgaacgagctcgcgtatgacggagatgaacggcgtgatgccgccgccgccactgatcatcaccaacgagtcgtactgaaggaagcttgctggtgtggcctggctgtaaggcccctcgaccgagacgtcgaggtgcccgggctgcgacggcggcagggacgagatcgtctcgtacagcttctccgtccatcttcctgctctcttgacgacgacgcttaacctgtcaggctcaaggctgctgctcgacgtcaccgtgaatgggtgccattggagccgcgaaacgcatgggacgttgatgaacaccgtactcatcggactgtgcgtcaaatctgcaagtgatcacgacatcaagtgtcagaacatgcttacttgcaccgtgaacgtgtcggatatatgtgacacctacgggggcttttgcagaagttgagctcgacggcgtcgcacgctaggaggcgggcggagacgagtcggacgcggacgcgggactgcaggaaccggaggtagcggtcgaccatgaagaggaacacgccaggcaggatggagcagaagaaggcgacgccgacgtggagcgcgaagagcacgaggaagagggcgtagaggtggtgcgcgtagaagaagagctcgaacatctggcgccggacgcgcggcagcgccgtcacccacatcaccagcccgctgagcagcgcgagctccccggggacgtttgcaactttcgttcttgtccatttcagcatctggaatcacataattggccgtttattaagtcccgacattggacatgtctaggacgatagaagaaatcgttagtttgtattacctcgtggatttgatcagtcgatgcccagaagacgatgtagcagagtccatgagctgtgaagaagagcataacgagattgcccagccagacatggtacttgatgctggcttccgacgtgaggccaatgagcggcaacagggacgagccgcgtgcgactggaaagaacaggaacgcgcagcagaagctcccaacgtggccaagccgcagcgctgctctgtccagcttcgcctgccacctaagaacatttcgcatacttacaaaagttagcacacaagtaaattacagatcatagatgaaacatatacgagtattattttgcttttttttttggacggagttaatgcatggttatcgtgagttggtcgacattttctcgacaggcttgacatggatcttggagaagtcgaggttgatgaaggcggagtaggaccagaccaggagtgccaggaacaagagaaagaaggcgagttctatgcctgtcacaattcccagtggacctctcaccagcacaggtctcctccaggccgccattctcgtacagaatactcctctgcaggaacaaaatcaagagaggaacacgcagaaaatttgcattagtactagtacatttgatgcggaatgtctgatgagattgatctcctctcccagtttagccagaactgaccgtacctctgactttggaccccagtactgtcgccgctcctcttcagcaagtgcaggtaaatgcacgcaactacactgacaaacagtattggcaaagtcagtgtagttcacgattcagacatgcacaggtattgggaacacgtagatcacgattctcgtccctgcaaatcccgaaacgaagaacacgaagagatgatcacggcggcaatgcagatatgcagtggaatggatatacagctgagctgatagtacaagagatggggaaaaaaaccttgtttgccaaagtaggtggaatttgtgtgggaggcgagcgtcggcgcccacgtcgagctgaatgtcctggtcggcaacatgacccacatcatgagccacccaacgaacacggcggcggccaggagaagcatggcgctcctggtcgccggcgcgccattcctgtctcggccatgcctagtgtccatcgcgtcgataccctgcgcttaacctgttaattaaccgctgtatctggtcaggattagattgtcactcactgggacacaagtcacacaagtaaggacgtgtgttgtgcttatataggaagaacggacggagagagtgagctgcacttttaatgcgaaatgataccgaggagatatcccttgctgtaatgctgtcatttgccatatttatgaggtaagatttggttgtggagatggcaataataactctttcgattcatcaattggcatggactgacgggggtaaagggtgtacagtgtactaacacactgggaaatatttaaccgagtgctgcatgaatatttttggaggggcatgaaaaatgcatttccgtcgtttatctctgtacggatatacaggttggatttctatcttttaactcgtgaaaaagaaatctgcatactagagaaatactaattcgataggcataagatatatgttttcattacacagtgtcgttgttctaggctgtgtgtttagatctaggggtgaaaatttttaccgcgtcacattgaatattcagatacacatttgaagtattaaacgtagtctaataacaaaacaaattacgtaatccgcctgtaaagtgcgggacaaatttattaagcttaattaatccgtcattagcaaatgtttactgtagcaccacaatgtcatatcatagagcaattaggcttaaaaaatttgtctcgcaatttacacgcaatctgtgtaattagtttttctttttatctatatttaatacttaactagcggggtgacccgcgcatttgcgcggctagcacccaaacaaaatcatatatttttcagtatgattttacttaaaatttattaaatagctatgtcgttgtcttaagactttaaaagaccaaaccttatcatcctcgtatttctaattatatagtttttaaaagtcacaccagctgctacctattacttttgtcataccgttatttatttgcttgcttgatttctatttattctccttgaaaccttatactgccattatactctacggcccgtccacggtcttttctttgtattgtcattgggattttaaaaatcaaacataattattattggggttcattttttactttatagaagtcccaccaaaccgtcagcggttttgctattgcacacctttgtggctcacccgctgcctcccttctttattgtcactgagattttaaaatcgaacacgattatcatagttttttttactttttagaagttacaaacctttaaaaattagtcattatagtttttagagtttattgttcattatagtttttagagtttattgtcttgttgtgtttcttttttataatttttagaagtcccgtcaaacgatgccactatactcctctacggtccatccgccgcctactctttattgtcattgggattctaaaaatcaaacgtaactatcgttggaattcattttttattttcttgtagtcccgccaaccgtcggcggctctgcaactacactcctatacatcccgcccactgcttctccttgtcattgagattttaaaaatcgaatataattatcaatggggtttactttctttgctttctagaagtcgtagaaaccgccttgcccgttagcttcacgggcttatcgtttctccttttaatcgtcattaagattctatttggtgttttattaacctttttatatgtcgtattaaccgccaccactctactcttttataggcgtgttatttaatttatctcgtcatgtgttttagatggtctttttatttcaatagtctttattttttatcaccaattttagttatttataaattttattcctaattgaaatctttttttctttttttctaatttcagaatttattttttatttttgaatttaacttgtttcaaaattttattcctacttgaactcttttttagtttttctaactttgaatattattttattttttattctgaattttaattaatctcgtattgggttcttatatagattcttctttcaatatggttttatttttaattccgaatttcatttaattttaaattatattcctacttgatctcttcttttctttttgctaattttggattttatttttatttttattccgaatattaattaatatcgtattgggttattatatcgactcttctcttaatatcccttatttttaattccaaatttcagttatttttaaatgtattcctacttggactcttattttcttttgtaattttggattttattttatttttattccgaattttgatcaatattggattcttatatggactcttatctcaatattgattaattttaattccgaatttcagttatttttaaattgtatttctacttggactcttcttttctttttttccgattaatgtgggaatttctagcccccacagcgaacgtggtgtcttctttcaaagttgttttaataatatactccctccatattttaatgtatgacgtcgttgattttttttgtccaacatttgaccattcgtcttatttaaaaaaattatgaattatcatttattttattatgacttgatttgtcatcaaatgttatttaagcatgacataaatattttcatatttgcacaaaaattttgaataaaacgaatggttaaacgttggtcgaaaagtcaacggcgtcatacattaaaatacggagagagtaatagatatatgtgtcaaacatttgatgcgataaagatgaaaaaacttgtcagggtctaaacaggtccctagtccacttgcgttgcgtcgcgtcgggtccgctccttttcttcctctcctcccatggtcaactgtgatgctagtatggtacagtactatacattgctactcgcgagcgatgtgtgactcgtgcgaacgagacggcaggagatgcaccgaacacgtacgcttgcaccttgcagggccgcgaccggtgcggtgaagatgggacaacgaaattgcgccgcgcgcatcggctactcggcagacgacgaccggataaggagagcaacggtggtggtggcactgtgcggtggccggtgtagtcactgagaggcgaaagaggaggccggaaaggggcagggcgacgcgcactcggcgccgcgtgacgggggcgcggcgcgcacgcgccggcctgcgccgcgccgcgcgccgtgccgagctgccatgcgacgctggccggcacggtggaacagccgcgccaccgcggacacgccagccaggcacgatattgggcctcaatttcttctttatcaacgacatcggcccaaatggaggtacagtaatacggtccacaaagcatagtaaagctgcacgtgttgtagtacagctcggcctgcaccagggctcgatggaagcctggaaggaataataagttcagtagttgtccctaatctttacgttgagcttacttggtatcctaaactacaatatcataaatcttcaaccccatcttaacaaaaccattcgagtcaagtgccatgacagtatagatgggtggttttactaacgtagtaacgtggcatcctagttgaaaaaataaaataaaaacatgtgggacccacttaaagtggcatacatcttcttcctccgctcctttctcttccacaatctctttcgatcgaacgcaacatgcgtcacgaagcacaataggtgagctcgttgtccgctcgtcacacaccgacggccccctagcgtgcgaagcaaaggggcttatgctcggtccctgatggcgaagatagaggtgatatgaccatcagcaacctcacaacggtgcctctccctcaacgagcttgtcaccatttctaccatcgagcacaatttttcttgtagagaataaaaaagtgggtgctaacggctaacatgtgaatcccacttttttttatattcttttccggactagggcgtcatgtcaatgaaaccatccatccgtactatcatgagatgacttgaacaaattttattaagataggaggtgatgattcaactatagacttaaactttgagtttatttgctgtggctgggtgttggtacgttggtgtgtcatctttttatttatctttgtttctgtctattatatttttcttataagattgatccaagacctagggccggtcctatgattttgagggccctatgcgaactcatcgcgatgggccctctaagctatgtataaaattctatgatatatatagacgctaattttacttgcaaaaacaaaaacaaatacatccatatatatatatatatatatatatatatatatatatatatatatatatatatatatat

SEQ ID NO: 22877 - DNA, 3866 bp, Oryza sativa
tccaagacctagggccggtcctatgattttgagggccctatgcgaactcatcgcgatgggccctctaagctatgtataaaattctatgatatatatagacgctaattttacttgcaaaaacaaaaacaaatacatccatatatatatatatatatatatatatatatatatatatatatatatatatatatatatatatatatatatatatatatatatatatatatatatatatatatatatatatatattaaatttaacatatatggtaattatcaagaaataaagtcgaccaaaataataatatatttgtaacttggaactaatatcattattcattaacttaataaagaatagaaccccatcatatccattgcttctcatgaaaacgtacttcttcgggcatttcttgatgcaaaatcatcaagaacgatattaagaacaatagtgtccaagatatccttctcgattgagcacatagccaagtcatttaacctttcttgcaacatagttgatctcaaatagttcttcaaaacttcaattttgagaaacttcttttaggtgaagctaccgtcacaggtacagataagagtattcgataggcaaaacatttggatagaaatctgcatccataacaaactttagaatctcaggcacggacatcgaaaaatctggcaaactcacttgcaacacctttaactctgaataaaaatcgttgatctcaacatcgcatgaggtactagactactagtattaggtgttggccccccatcatcatgggcccccaccatcatgggcctcggcggtcgcctcggctacatagggccagggccggccctgccaagacctatgtaataagtggttatagttttaactcagttgaagcaaaggctgggtttataaccattattaaaaaagggaggtggtgaaatattatattatatcatttaggtatattaattaaactcaatgtaaagaagagagacaacttgtgaacttagggttggtttggtttgtggcctaaataggccttaccaaattttgtcaatgccaaattttgacatgattaatttcggtaagacaaagttgtgtttggattgaagccaaaatagtctaagttcactattaaaatgatctattttcttaggcatgtcaaaatctggcttaaaccaaatagacattaaacactattaaaattgtcaaatattggtaaatgtaatttatgcctcaaccaaacgagcgcttatttcctcgatggaattcgaattcggaagccgaaggcccagaagaccgcaacatgcggagcacgtcttggggtggccgggtggagcgggatggaagggccccactcgcagtgtcacaaggaggacgccgccatttcctcccccacaagaaaggccgaaagcgaaagcggatcacaagggggtagcccgtcaccatcagcgctcacgcctcgcgcacctgcgctctccctcccccttcccggcctaggtgtcggaagcgcggtggggaggaagcgaacgcgccgccgtccgggtctcctccgcctcctcctcccgagaatcgtaagctccgggcatcctactccccctcccgctcccagtccagtgtcgcgtcctagcggcgctttgctgtgttcgtttggtagcttcgattcgcacgacgtggttcgctgtactgcttcgagatgccgcgatcgctcgccctggagatttatcgcggctccggcgtattcgtctcgtgcgggtttttgtggcgcggtgctcttccgctggttcggttcggcgtcgcatcatttcaagggtttatgctagtgtagctttcgggaggtgggagtggtcgccgccggtatttcgatttctctcttcttatttgacgcccaaatgtgccctgttgcttaacctagttctgattgtgctgacgaattctaacccgtcgtgagtgtgattttggggttttgggtgctagttgtctcctaagatattataaggagatatctccgttgttttggtgttatggactgcggactacttgtttttaatgttcgatttctagaagttggaacccaattagtcgatggaattcacagaatctggtatcgtgattgagatgcaaaatcgtgtttatttcataaagcagatggatctgttcatggctgcactttactgttcgatgtctataatctgtgtagctagatttaccatttatcacacaagtttaatctagttggcagtacggatctgcagttttgattatagtggattcgaatttttgtgcactgtgagtttcattttggtatttgtacatctacaattaagagtttcatgtagtatgtcgtcatgttgatctactgttctgcatgttcaaagtttgaagctatctctaagacatactgtattatggttcgttatgcatttcaacaggcttttaacacttctattactgggatgaatttcatcttaactgagcaatgtatgaagcattgacgcatgtattaatgaaatttcacgtttttcaggacttctattttgcctctgcatccaggttatttagaactctgtattcaggactgcacaatgtctatgatagcagcaactcttcgtcgatcgtctagagtaactggtagtcagaatatcatggagatatgtcttggaccttgtgtatcttctggtgcttcttcaaggtggttcagcagctgtactaagcactcaaacacttccatacttaaccagatcaaggcagttgatcggtattctccagttaatggtatgtcaatgatcagtagggtgcctctttcagctcatatggacacaaactggttgtctacttcaaatcccagatttaatgcactgccaggattcttaggtgcttcaagcatctgccgagcatactcctcagacactgggattaaggcagaagttccacagaatactgtctcaaatgtaccttccacagaaaccgttgcgcttggaacatctgatggtggtagttcttggattgatatcttcgacaatgctcgcaagtgtactctagatgctaccactgatgcaggcaagaaagttaaggagctgactgatgcaattacacctcatgtacaacagttctttgatgcaaatccaaacctagaaaaggttgtggttccacttggcgggacaatctttggtacaatgatggcttggtttgtcatgcctatcgttttaaggaggattcacaagtattcgatacagagtcctatatcagcacttttggggagctcaacaaagaatgatgtctcgtatgaaactagcctctggagtgcattggaggatcctgcgaaataccttatcacatttatggcattttcagaaatgtaaggcttctttttactttttctggcagattttatcgttgttgtggatggggtgcaacacactctagattgatgatatttcttcaatatttgcaagagatatatccatcttcgtattgttgaaatgttcattgttctgatgttttctcttcctcagggctggattcaccgcaccaagcatatcagcttatcttccacaggcatggaggggtgcaattgttctctcttttgtctggttccttcataggtggaaaacaaacttcatcactaaagttgctgcctcaagtattgatcaaaccaggttgtcagcatttgataagatctcgtcattaggactgattgcacttggagtaatggctcttgcagaggcttgtggtgtagctgctcagtcaatactaactgttggtggtgtgggaggtaatgttatattcccttcagtcataaatatttgacgtttagatcaatattacattaatttaaaatttaataagtttatgatatcaggatagtactttcg

SEQ ID NO: 22878 - DNA, 5108 bp, Oryza sativa
ctggatgatgcaatgcatttttattgtacaattcaaaggctcaaacttcatgcagaccagactgtcctgtttaattgataactaaatgaggagatgagcaccataaatttgtaccaattaacgctcatatgaacagtgcaacagatggcacagttcatcgaggacattttgcatttctcaatagccaacaaacaatccccaactgtttgcgaaaatggccacagtgaaccaagaatgaggcaatttcttgttgccattcagccattctacctttaatatttcttcctgtaaattctagtgttgagttgctcatcactacaaatacaaggtgaaaactcacttactgcctacaacatcaaaatcctaccacgctatctaaaagtattgtgtcatcaacaaaattcgtctgtttcagcagaagcaacagtatcacgtctaaaagttgtactgttggctagcaaagttaaagaccatctctgatttagcctggtctcaagcatccaccagggagcaagaatctgaacttgtctgcgttcttgatcaaataggaaggcagatgaacagcagatcctgactttggtatgggtcccatcttcttgaagagatccttgaatgtgtactcttcaggcagcatgtcaaacaggtcctccccattacatatgaccctctggattctgtctggatttaggaagctgtcctgcttcacccggtctgcgtggctatatgccttcatcttgaaagcaaactccttgatgtccttgaagcagaagctacaatgccagcctgcatcagccagcagaaggttgctctgacgggagtggcggtacaatgtatgctcagtgaacacatgtgctgtggccctccagctgttgtagtctataggaaattcaaaggagtacatatagttcttcagctcgagatgcatgacttgcggtattccatcacaccacttgagcaactgcaccgtctcagggctagggatctcatcagcatcagccatgatcaatacatcccccacagcaatgcctgatcttcgcagcagcatattaagcgcacgacggtggccggcctcaacatggaagggctgacggtgagaaccgggatccatttccatgacaggaagcatgtcatacacaatcttggagccagcgaatgcaaagcgattgatattttccaagaaagagagtgacttcgggatgccagtgaatgtggcattagcttcaaggatgacaaacctgtcaacatacggaaggagctcaccgtagcgaatttctagaatatcaagttcattactgaagaggacggcgtcaaagacacggcgaggggtggggaggataccccaaccatggagctgacagagctgcggcatggagatgttgggggcatagtagtgtgggatgcggataaatggcttaggtggtgtgtcccacagtggccgcagaaggtaagagatattatggaaatactgcgtaacaacaataacagccactgaaagaactagaacacatggtatcagcaacttgagggaagcgattttccgtctagttagaggtggaaaaggagaggttctagccatgagaatatctgtctatgacaaagacaggaaatagatgagactctgataagcatagatgagaggtgtctcggatattctctactcctgggaagtgtagcaaacttcggaatgtgaaagtaaatctgtattatgcaagagacagaagaaagtaagcaaacagaaaaaataagtggcagaacaagcaatgtgatgcaagtatcaattagagaaagtactaatttcaaaataagaagaaagagatgaattgcaggtacaccctttatcttctaaatttgtaatgcaacagccatggatagaaatgttagtaggacagatatactattattgaatcatttcaataaaaaagggtcttaaacatcatgttcacgtattcatgtgttactgaaggaagcaacttctatcagcacctcatttctaacaatccccaacatgaaacattttctattttagaggacaacaaacaattaaagatgatacagtcattactaatttcagaattcagacctgtgtagaccacacaaatcagcattcaggcctagttcgttggatcgcaacattggaagaccataacaaatcagccttctctacaaatgaagatctaatctctatgcccagttcgttgaatgtatgcccaaaaatgcaattccatttcagcaacacaaacaaaataagaaagcccctatttgccccccaaaatcaaatcaaaacagcacctctactacccttttattcatttgttcatcaatactaacaaactgcagtctgcaggctaagcattacaacattcctaaagattagaaactgccgccaaccctaaagatattggcatcaaacataaccaatcagacaagcaccgccaatagtagatccatccaagatttgcatagcgagatgtttggagcactgggatggccaaagaacaagaatcacctcaccgcgaggacgaagaagaagaagaagatgaagatgaagccttcgccgtctctgctccaccaccaccgccaccaccgccgccgccgccgccgccgcggcctcctctacatcgcccggccggtgccccgccacctccttcttcttcctcctgctcgcatgtaaaccacctctcccacttctcctccgacaatctctccctatcctccgcctattcctgtcgccccgccatccgccatgggaggggaatccgagctttgctgctgctaaaattaggcgctaacaaatctcctcctctcttcttttttgcttgcagtgctctcactcttttccgtactggaagaagtggaggtgaagaaaaagaaactcacaaaaaggaaaagaactgtggatgcggcaatcaatcgaatcaatcacactcgcgccaccaggagcagcagcagcagatttcgctttgggtttgggaggggatcgtggtgggatatgcgatgattgctcagctttgggcggcgcggcacactggagactggactactgctagtgttgattctgattctctgcatggatcatctgtgtaggtaagagcagttacaatagcaggctatgagccagctacaaacatattttaaatagatggataacagcgggctacagatttatagtcagctgtagcacgaactcaaagacacactgtgtgtatgataagtgggaccaggtattaatagtgtagtatgtaactattgtatgaatgagctattaggttggttataaatgaattgtagctagtagttggctatactattaaacttgctctaagtgcaaggataatagtaaaactcactatctattattagcccgtcttagagccaatacatataatagattaggtataaggttggctataattttcttcttctatctctatctctcacttacacatttattatttctgtcttggagcttgtgttaagctaactcttgcatgagagccaacatctttgatgtttcgctacatctctcctccacataagcttataagcttatatagctcactattatacttgctctaagagcaggttcaatagtatcggagcaggttcaatagtatcgccggctgctggctccatccatctttgcagctattactagagccaacttatacaatagagtagctcctgtgttgatcatatatcactaatcaataattaattctgtacatatattaatgtacatgatccaagctgaagtcaattcctgtggccgtgtctgtgctaaattaacgagtcacgacaatcacgggccttagcaactcattgccagcatgtcggccacccgcatcaccatgaaggcatttcaacagaggagaacaagaaaaagggaaaaagggaagagtcgaatagattagacgatgacaaactcaaattagtttttaaaagaaaacaactcaaattaaacaaagctgcatagcatatcgcatgctctcgtcggtgattagaccaggagagcgagcgaacggtgctcaccacgcgctcaacgatggtgattgagcttttgcttccgcagaaccccctgctcgcgacactcgacaggtctcggccaattcgaacttcatttgcagctgcgcaatttgcagatccatctgcgggcgcccggcagcgggacgtacaaccgccggcgtctataaaatgttaggaggatatttggttgggggaagacgaagacgaggcgacaaagatgcaactagatgggccgcgctgaagaggaaaaccacataagatccgatgggcacgtcagtggacccacaaaaattgtttttaatcgctaacaacagctcccccgcgttgaaagaagcgttagcacccggcgatacatttgtcgcgcccgtttgtttctctttcctcacttctctctcctctcctatataatgatataaacacacgtgatggcctaggtttgcgagccaaaaacaaactgctcgcgagtcagctcggctcggctcatttcaggcttgggcttggctcgagcttagttagccaagcccaagctgagctcccaagctctagcttttccacccttaaatatggccgcccaaaattttaaggtgtttggatgatatggctaccacttaggctctgttcggtagcgagggttaggaaccctcactccccgacacacaaaacgaaacagcgttttagtgcgtgattaattaagttttagctattttttttcaaaaatagattaatatgatttttttaagcaactttcgtatagaaactttttgcaaaaaaacccaccgtttagcagtttgaaaagcgtgcgcgtggaaaacgagaaggaggagttggaaactcaaatggagccttagagcaggtacaatagcaggctataagccagctgcaaacatattttaaggagataaatgagaagagagaagggcagcgggctacatatttgtagccagctgtagcacggactccaagacacagtgtatgtatgacaggtgggaccatgtattaatagtgtagtatataattattgtatgaatgaattattagattgactatagataaattagataaattggagttagtaggggtgcagg

SEQ ID NO: 22879 - DNA, 2219 bp, Oryza sativa
agcctcctcaactcaattgccgacattcccatgttgaggaggctgccactgccggagtggcaccgcaccttccaaaagattcctcatcgcccttgttcatcgggccggcttacagttgagcccagcatggcccattggtgacgttggcccactaggagtgggagtggtagtgggaggaacagaggacgctgatccttcttcctccacggcggcgagggccgaggaggcgaggatggacggccatcgatgaagaacaaaaacctccagcctcctcaattcaactgccgccattcccatgttgaggaggctgcgactgccggagtggcaccgcaccttccagaagattcctcatcgcccttgttcatcgggccggcttacagttgagtctagcccagcatagcccattggtgacgttggctcactaggagtgggagtgggaggaacagaggacgctgatccttcttcctccttcactccagactcctccaccaccgccgcgcaccccccaacaactctccctccacgccaaaggtaaacttatctggagacttgctcatcgttatctatcttttggagatttctacatctcattctcattctcatgtatggtgtgagctaaagtttattattatggatctgatgtttgcttactgctttgcatccgtcaatttcctactctgcctattatattatacaatattagacagtagagcgagagactcaaaccaactctgaatctaaagaaaaacaatagagagctggttgtgtcaataatatgaaaaatcttttcttgctacatagaactacctttggtttttgggtaccactgtacatctagtataaaaggagctctgagatatttatgattttagtgtactaacatcagtaactaaaagaggtgatgatgaatttctacgcttaaggcccttcgctctgaatatgagagcttttattttagggagattaaatactctccctaaacagtaaaccctcaaacctagtttaaatctctaatctttctttggtctaaaatgattaatctctcaaaaattactgctgtgaggtaagtcttttccttttccatgtccaaatcaatctaggctatgttctgctattgttcaatctccactgctaagtaacctatgttatgctctcaaagtggattgatattctaacactgactagctagtatcatcgaaagttgtattacaaattctcacttttagttatgctgtgatttaaaagacaaacactagtttagtcctgaggctacatcagcaaaccatatatatcttcagttcaaattcgtatatcccatatagctctgtgccttggctaaggtcaactgacatcagtgtggcaccacttcttcctgttgctgtaacattctcttcttcagtttctgcagcaaccggtgcaaactaaagatggcgggattcggcagcctggcacccaagaccaagaacatagtggtggctggaggactctctgctttcgtccttggcgtgtattactacaccatgagagcggtgggaggcacagatgagctgcaggtcgccattgataagtttgaaggcatgaagaaaaaggatgctgggaactcatccgccgcgggatcctaagaacagggtttagaattggctccatatccgcctctatactgaactgtggttttgtacaataatggctcaatactaggttgtgcttatgctttgacgttaagctggaataatttttgactgaatcgactatattaaaacctccccggagttgctgggctgagagcgttttggactggtgctcgcacgcggcgctatccatttttattcacatgacattaagaaagagctttctgtgattgaactttaactaggttttttttgccttttgtatttagtattgtttcaatggtagttatcctctggaaatagctgtttcaagtatatttagctatgcctttttcttcacggtgttgatttggtgagtagagaatctgctatgtttgctactaatattatagttctgcccttcaatgaaatgtaaacaatgtgaattgaggttaatgtacgatagttggcatgtgactaggtgagattttctttgtgtatcctgagatatctacaatacatcaataaattgtgcattgtacacatggtcttcagattgacattatatttttaaactacattatggttacttttatgttgttggggtgcagg

SEQ ID NO: 22880 - DNA, 14792 bp, Oryza sativa
tctatattaagtataaaaaggaggagttctccgatttcaatcctaccggtgaaatcaacagttgaaatcttaccgtccatccgcggcactttcagcctccctaccgtccaccgcaaagacagaagtggctggctaagtctttgcgatgcgacggtgaaatcaccgaatccccatccgtaccaagtggacgcacgattccatcgcaataacaccgtgcgcttacctcgccgccgcaagctccgctccgccataagagcaatggtctttattagcggtctctcttcattgtcatgcaagtatatttggtgacgtggaagagagagaaagaaggaaagagaaagatagttgctatggagacgtggaagagagagaaagaaggaaatgtctctctttattgtcatgtaagtatatttggtgacgtggaagagagagaaagaaggaaagagaaagataattgctatggtgacgtggaagagagagattgaaggaaagagaaagatagttgctacgcatgacaacgacatagagtcgactcttagcatttattaggaaattttttgttgcattgagtctaataaaggaaagatgactagtaagaaagtattttggcacattaatggttagagactgtattgtcttaactattgtaacgcgatagtctctaattaacgtatcggtctctacctttgtacttgccgtaacgccgctgccgcgacctcccggatgatgcctctagagtgcagctgcgagcaaatcgactccccggccaccgcttgaacaccgggacatctcctcacagcacccttgttgacccgtcgtccatatcctctctagcggcctcctccaacaagcccaggtgtgcttgatctgcgtgttaacactctgggattttggtgtattgtttgatattgttcaactcaggaacacctacgctttctcaagcaaccaattataattcagctttgttactgcttccagtatcattcattgcaagcagttgtccaccaataatcccaaagtaggttgtccttctcccattgtgccatcctcgatttctgtttccatcggccgccctgcgatatgtaccggaggtgtacttgctatagcagtgtgctggtgtccagttgatgcacccaaggaggctcaaatccaagttgtgatgtggcgatgatgagcaagtcagacaagaacctatatcaggttagtcttctcgagaatttgcatatcaacttttaacattttgcttcaccttgtgaatttgatgtgtgattgagcttccagggtcatcagctgatatactacggctcccatcggttgccattttacctaaaatggcttatttggcttattagaaaattaaaattagtttataagtaaaacttttgtagatttattcgtagcgacttaaaagccaaaattaacaaaaattacgttaaaagcatttcaaaatcaacttcaaaattaaattcaaaaattcaaattttggcttattctttggctgtttaggccaaacgatagggctgtacataatgatattctgcggactaaagacatgatattctttcatcatacaattttttgagcttcatgtatttggctaatatttcttatggaacacacatgttgatttcagtctttcaaatttgttctgccctttttggtatggaatttctgttaccttggaacacctggtatgttctttcctatatactatatggcaccttaaagtgctacttattaaacagcgcgtgataaacactgcacgtccccacccatagtgtaactgcactccacccacactgatcccggctcaacacatccccaaattttggcagtcaaaattttactacttagacaaacacaaaaactcaccatataagacagcgtcgtttagtatttttttaactaatcatatatacatgcagttaacaaatcttgaacaacgggatatgttagggcagtaattttttaaccgaaagcaagttaggttcctttttttttcatcgaatgatgacatgatctagagttatttttttttactagacatgccattaaattattaatttttgattctttgtttccagttttttgaaataattgttttagaataattctaggaactatcatttttgtacataatgctgaacgagtaattttttaactgacagtaatatagcttctcactcacccaacggtgtcagtatatagagttatttttttactcgatacgtcatgaattttatttttttgttgaccgatgcaattagtaatttatttactcatagaaccatatgtatatatacagatgcggtccaaccttaccgtgtgtatgaaccacacacttttccatctctctccgtttcttcaggatctgagcagaccgggcgtccacccgatgattgtgttatgtatcgagttactgtagttgccaattgttgtcatttctcttttgtggtctcactgagtcaagtgtatgtctagacctggtgagtgtgagtcgcgacgtgccgtgctggtctggcggacgcgtcgggtgtgtgtttgacttgtacatataaaaagggaactctcctgtctgagagggcatcgaaattgaaatagaaaaatcactaccaactccttcccaaattgctctgttctctctctcaatcccaaatccttctgagaactctagatcaaatcctggcgagacgccacggaaaacctcggttcgtgacaatttggtatcagagcctaggtctcgctagcgaggaagaagggtcccaatctcatggagaggatggccgcggcggaaactgagctgggggatctgaaccagagggtggtggatctcacaagcaacctcaacaacatccttggatcgctcaccaagctggagacatggatttcgacggttgatgcgggaatccaaggcttgaacaaggtggtggaggagatcttggcaagggtgacgaagctggagagctcaccagcgacggcgacgttcgtggcgacctaaatgcctgtagggcccgacaatgtcgaggagcaccaaggtgatgcatccaaagcccttgcggctcaggagcgacccctggtcaagggtaagtcccgattgccgattttccccattaatttcgaattgggtgaaacctctgtgcagagttaatttagcagtcggtccaatagccctagattgccaaaaacagatttcccaaagtttgatggagataacccaaaattgtggaagaagaactctgaaaagtactttgatatgtaccaagttccctatgaaagttgggcaaattttgctactctgcatattgtggggaatgctgctctgtggctgcaaaccttgaggctctgcatagcgttgagacttggccagaactttgtgtagtagttcatagtaaatttgggaaggataaatactaggagcatttagaggagttagagagtcttaggcaaaccagtggagttaaggattactatagcaaatttgaggaatttatgcatttgaggataaataccaggagcattattgatgtgaattatttgctctatacttctaaaaatacaggctcaaacaatgttcttctagtacattgcctagacaaacttatactacattccgctacatttctccctctgcacacatgagtagctgattcgacctattttcttttgatgtgtatttgtatccgaccatatcatgcaagtcaggctattccagcgcagctatgaggtgagtttgactcgagcttgttcttaggctatttcccaactctaggttgggtgaaagacttgtttggtgcgagatggaagtaacactaatctttggctaagaataagattgagttggacttatcacatggtcacgctagatgagcttggtctagcttgggaataggcagttttcaatgtgacaatgttgtgtaggttgtttttttttataataaaaatgggttatgaggtagaacctcaaaacaaggatgacaagttgaggcagtttatgtaattttgcgataaataaaaagaacatgggagggactaaaaaaacgtagtggcagagtcgtaaataaattgagaatagagggaacagagaaaatgggtattatactgtctacatgggaaaccgaattatactactacaagtccaacaagaggtgaccgtctctgatgagaataatgagagattgagatctccccttcgcctcccttcccccgttaataagtagtaggagtaattttcatattttattctattagggaagtagtagtacgaaaataaactcgatcgagaggttttaatctgtcctccctctcaccgacctcgtctcctcttcccccgtcgttgccactgccgcctctagattaaagcagagctatagccgggaggaacgcgcgccaccatgtgcttggcaacgtcgccatcctcatcgaacacgtcataagacggtggcggtcttcgcatcttgatcgtcggaagatgagttattatatttgtcttattggattttgcagcggctggttttcttcaataaaatcaagatgagaaagatgagcttggtgcaaaactgtgtcgctgagaaaggtatgagcttgtaaccagatgagcttggttgtatgagcgtggtcaaagtttaatttttcaaccttttcttttaaatcgctaagaacacgtacataaaagttttattcataaattattcttcgtttgcaaatatgttgcttcgaaacaatggggccgtacatcatgtgttattaacaacttaacatacaaaaacgagctgggaatagtttgcttgcccccagatttcaggagcaacagaaaagctgagattaagaatagggggggggggggggggggatgctgcacattcaatgtacaagtatcatcactcagtttctggaccttgaatgtccatctgaacaactggtccatgtaagaatttttttatccactaccagcccatttcgttgaggaaaaagtccactttgactctcttaaaagtcatccgaatctaatccgtgaccctcaaccgtaaaaccggataggatgactccctgaactattcaaactagtgcaatttgactccctcaacggttttggatgacggttttactgacgtggcggtgttgacccggtcttcatcccacgtggcgcttatgtggcattacaattaaaaatattttgtggaacccacgtgtcatcctttctctctccaacccttcttcctcccctctctctcccttctctctcttttctcctgcagccgcacccgctgaacatgccggtgcagttgaacccgtacgccacctcgccggtgccggacaccgcgatgagcccgatgaacccttcgtccagccgttccttgacgcagtagtcgatggcctcctgcagcccggcggcgacgtcgcgcgccagcgtggagcgtatgatggcgttgccttccccgatccgatcaacggcgagtcgccaatgcgcccggtcatcttgttcgtcagcccgcccgtggacatggccgccgcggtgtggccgtttgagtccaccactgcgcaacccaccgtctccggcgcgggatacggcaatcaaactgcttgtaccaattaatcacaggatgtcacggttagatgttagcaattttcataggcgaattggtaacatgagtcaatgcgctgatcgatgaaccaagatgctgttggcctccttggctcctcggtgatgaagtagctattggctccctctcgttcgtcccaccctggcgcggcaccatcgtgggggacgcccctgccttctccggtgagctgaggccgtcgccgccgaagccgccgctcgacccgctcaagttccttcctctgcgccggccctcaccctgccgccgccgccgctccagattccgcaccgaatctggaggaagagaaacatacagagaagggagagggggggggggttaagaggatagatagaggatgacatgtgggcctcgtaatttttttttcatgtgaatgacgaatggagcccatatagttttttattttaatgcatataagcgtcacatcaacaatacagatcaggtcaacatcgtcacgtcagcaaaaccgctgagggagtcaaattgcactggtttgaatagttcggagagtcatcctatccggttttacggttgagggttacggattagattcgggtcacttttaagggaatcaaagtggacttattcctttcgttgatctctctacttcgaccaagaacattgggcctggcccatcaagaacaattttagtaggccctgaaaaattgatagcaaatccattcccctgccaatctggcatcgcagtgctatcaaacaaatagtactactttatcctcctcatttcagtttgtcaagctaaatcatacactgtcactaacacactgacattaagttgggcgctccttgaaaagtgaacctttattattttcccttatttcagtaacaactcatgctgcagaatttcttgcagttgtttcttgtgaggtgtagcagtaatgtcactcttctgaagaatgacagtttgtaactacagaaagtaattaatcagatgctgcagaatttcctgcattgtttcttgtggtgtgtaggagtagtatcaattttctgaagattggcagtttgcaagttcagatttcagaagttaaccgatgctagtagtactccctgtggttgccaacaagttcacagctgctactcaccatcctgacactgcaattcaacttcaatactactccctccatctaaaaaaaagacaaaacctggtttccgtacccaatgtttgaccgttcgtcttatttgaaaaaattatgaaaaaaattaaaaagacaagtcacgcacaaagtattaatcatgttttatcatctaacaataataaacatacgaattataaaaaaatttcatataagacgaacagtcaaagttggacacgcaaacccagagtttgccttttttgggatggagggagtacaattcaagtactgagatttagatagatgttccatggacataaatatatgctccaacctgagagtcatttctgatcaactgtctgtctcgctctcacctcccacacagacaggaacatgaaatgaatgcaatgcagcatgacatccttttctcacatcatcacacccctaaccaccaaaacatcaagatcaaaggacaacaaaattacacaaagaccctgcatgccctcttttgcagatgactactcctagatgagacagatagtaaagccaattaaccatatactagtacttctgtatttctgttgtcctttctgtatttctgtatttttgttgtcctttgatcttgatgtcttggtttttttttgtatttaatcctagaagaaattgtgagcgtgttgaaaattaaacacgggacctcagagttagaaaccacataccccttaccatttcactatcaagtgaatctcagtactaatataaatcacagaagggttttgtctcaggtggctcctacctaagtgatcatctggttgtgcatctcaccattcacatgtctctagctttgcatagaaaagggtttgattttttggggatccacaataattggttgcctagagacattctaccaaacaatgcatacatacccctatatcctccttccacctcagttagtgggagggacatggagatcatcacaaatattataatcaaaattgcaccattaattagtgtgtgagtgctactaaaagactactactacctaagtgtgtacagatgtgggctcaggaattatgaggattatgaccagcattagggagacatatataatcaactacatatgtaccttgatagggtataattcatgaggtatagctgaaattttatacatttgtttgtacatgcacatcatggacaagtatgtgtacttaatgaggattgaatattatgatatagactgaaaatgaagccatatctacatattgtacaaagaaaaatcagcaacatcaactcgcccacatataactacataataaatcaaagattctagacaaatataaatacataagatggatgggaagcaacaattattgagctgcatgaaaattaagccaaacattattcaaatctatccgtggaagttgaccgtttgatatgactttttgaaacaagctagggaatttcatgcatgactagggatcaaactcatcatatgtaaaaaagaaaggacgagagaaaacaagtaaactatagtaaacgtcccatgtctaaaaaggataagcattattttttctcatggtctactgaccataagtccatgatatggtaacaaaattcaatcgattaccaggaatttgttgttatccgtctctttaaacatgtgttgagcttggagcacattcataggtgtgtgtgctgtgtatatgtatgcacttgtggagattatgggtaccccatacccacacggcatagttatccgactagttataggggataacttatatatatggaatatgtaacagattatgacttgggtattacgtttccttgtatattacggaacggcctaaagtcctggtttgataagattgtaaagtagatctaggaaaccgatactgtattggataaggtttctatcttgtaatcctgccccccatcctatataaggtgggcaggaggccctctagaaggcatgagacaactagatcgtcagatctataattcacccggcggattcaaatccccaaacaggagtagggtattacctctcattgagagggcctgaacctgtctaaatcctttgtctccgcatccatccacttttaggtctcgtgtgctacccccttttattattgccgaattcatgtttcgacagttggcgcgccagataggggtgcgctgagttttctattgacaagtgtgatggaatatatcatcgccgctgttggcgccatcttctgatcaaatcaatcttcgaccccacgagtttgtcgctccaatctgcttttattatttggttgattcctaattgctgattgatgtacgtgttgttatttctgattttcatgttccaacgatatggctggatctcgcaatgcgaattcgtcgagatgctacggcgcggctgctcattgtgcatgcagagccgcatgttgggacaccgtgctacagatcgcgtcgtgcaccctcccggcagcccttaaaccacgtctgcaaatcacctgatctggatcattggtgttaaccatgattttgtttgcatacgtactactcccggagctgcacagtccaaacatgggaccgatcttcatgcatacatacgtgcatcaattaatatccataatcatctacacttttttatttgtttctgctactaatctctattcgatctgtggtttcttattttgcatgtacctggctgccccgagtctgattctctccgacttggattcgacccggactcggacctgcgatctatgtgcaggaccacggatcagtctaacgatgtgcatgtgtgaatgcatctaccacgggagattaattggctaattaacaatatatgcatgtggcatatatgcgttggtatgtgcagacatatatccgcaagattagttttcttgattctaattagagatttcttctgtctctttacatgtaccgccggccgccttcgtcgctgctgactggtttcttcgcctccacggtcggtgtgtgccgctaccattgctgatggagataacatcttcaccgactggcctgctccgtgctgctgactagtgtctcgtctatacggttggttggtcacaccaccgttcatgggagtcatcgtcttcaccgaccggttggccttcgccgccgccgactggtggttccgcctgcacggctggcctattatgccgccgctgttgggagtctacgacttcaccgccggcctgcctccgtcgccgccgactggtgtcctcgcctatacggttggttggtcacaccaccgttcatgggcgtccacgtcttcaccgaccggctggccttcgccaccgccgactggtgttttcgcctgcacggctggcctattatgccgccgctgttgggcatctacgacttcaccaccggcctgccttcgccgtcgccgactggtgtctccgcctacacggctggcctattatgccgccgttgttgggcatccacgtcttcaccgaccggcttgccttcgttgccgccgactggtgtttccgcctgcacggctggcctattatatgctgccgttgttgggcgtccttcgactattgtcctcacctatacggttggttggtcacaccaccgtacatgggcgtctacgtcttcaccgaccggctggccttcgccgccgccgactggtgtttctgcttgcacggctggcctattatgccgccgttgttgggcgtctacgactttatcaccggcctgcctctgccgccactgactggtgttttcgcctatacggttggcggacttcgccaccgttaatgggcttcatcgtctacaccactggcttggttccactggcgccgactggtgtttttgtcaccattgatggactacttcgttcccacatcggctacttttgctgtcaccgagggaatacgacaaagctaagtcatcatttattttattctttatataatattttgccttttcctttgcctcactacatcaactggttcgccgttgactagtgagtcgagggctacagatgttatatcatattttttaaacaattttcataatatttatcttgattgcttgcgacatattctgagtacaaaagtgcctatcgagttatggagttccatcttcctatgctttccgtttggtttgccaatggatagttgcctttgggccgattcctagcacccgggggcttgttggatggaccgaataatgcaaggtgctaagtattattcggaataaatcaaaagcatagagataagataatttattttctgctcttaataattgcaaaagtacccgagtagtaaactccgacccgtgaaactttgttccattaatgacgaactcatgtcactcatatgcatgtttgggaagtgcttaggccgactcccggtgcttggtggctatgactagtcgggcagagtgtttaaacgtaatgagtcatctgctcggggaaatcaaaattgacaagagaaaaaatacatatttataaatattttaaaatacttgaatttttctcgagtattatatttatatcagatactactcatcctatatatttgttctgcaggatccagatccatatatgcataaaagggattcatggctttaagcttatctcttacgctctaggaatggatcagtcagaacatcaccaccggcttgcctcgtccgccgccgactggtgtttccgcctgcacggctggcctattatgtcaccgttgttgggcgtctacgtcttcaccgaccggccgcctcatccgccgccaactagtgttgattggccttatcgtcttcatcgccggtcgtctcgtttgctgctgactagtgccctcgcctctacgtctggtttatacagctaccactactgatggacatcatcgtctttcgtcgccgactggttatgccgccgccgaccggtgcttttatcttcacaactacgcgtcttcactaccggtttgcttctgttgccaccgactcgtgttcacttcatcacggctatgcaattttgtcaccatggtggagcaacttcatttttattatcttcggcatcgacaaactctattgcctctacttcaccaaccatgacgactacaagagtttcgacacctcggcatacgtcaccaaatatgatgccgtgttattttattacaacaagtggtgttccaatcttcaatatttatcttcactcaagcaatgactactcgacgacaagaagttacagttctcgactctatattcagttgtttcccaactaaccaaagagtcgggggctacacaaatacaagactcttaaaattcgacaagctgaagcaatcaattaatcagccaacgagtcaattccaggagtcattatcttcgtctttgctttagagcagagttatcaaccaatcagctcagtttcgacgagttggacaacatcatctactttcctccaagtgaagcatctgcaacagatataacaccaatttgatggattattgtcactgacatcatcaccagcacctctgcttcatcggccttgacatcaactctgttgctaatggatgactatgtcttcgccgacttattatttcactttcacggttgctatcgactggatcaccgacatcgttatcttcatcaacatcctgtcaagcctcttcaacatagcccactctactgctattgatgggcaacttcgtcattatatttgatcatctatgattgctgcttatcatcattactgtcggttgcgtttgtcgtcgccgattattttcttcatcttcatgattggtggatttcgtcatcgcttttgatgcgtgtctacatcttcaccgtcggcttgctttcgtcaccaccgaccggtatcctcgccttcatggatggcttattatgtcgccactaatgggcatcttcatcttcttcaccagctgcatcgtctgtcaccgactaattatttcgctgccatggctacacaactttatcgctgggcgccttcatattcattgctggctgacctgactgttgccgactggtttcttcgcctccacggctatgcaacttcatcacttttgattggtatcactatcttcactactaacaatatttttgccacctctggtgggcaatattatctctatattggtcgtcttgtctctatgccaactgcgtcagctaccatcaatggacaattgtgactacgacagaaggacaagctatatactcagaggcttactacctcaaacaccagtatcataccttcaatttggacttgttccggatacatgcaacatgaatttgataatcatgggtctattttctatgctcaaagactggactatttattattccccgtatgggttatcaactgaatacttgcgccagtcggaattcaattgttatatctattttggagtatcccataaaggataatcactcagatcagaagctattcatatgagctacacttggtctatatcacccgaaagatttattactcgggagcatgttacatgcgtcatcctttaaagggtgtcgaatgcatattttttggcctaggcctaatatgtctgcagcccatattttcaggtgtggcctgtcacgttcttttagggacttaggcatctttttgcttaggcaaaagtgcgcgtgattatgtgcccaataccttaaaattcttttataccgcagttacttaactttttaggagttggtacaatacattttaaaaggtgccaaacagtaatgctttatatagctccccgctgacttttttatataagtcaaggcgttgtttgggttcataaagcaattgattggatacaatatcattgctttttgccacgtaagtgtgcacttttattgaccaatattatggcttaggctgattatatattttggtcattttccacgcggttggtaaatcctttatgagtttatttactcggattttataccacatatgccatatatttccaggtgtggtggaaccatgtgtcttctagggacttaagcacatctgttaaaacagtgtgcgcatgatgtatgcccaatactttggaaatttctttattcacaacatacaagcttctttatagctggtttgctatgtgaattttcaatgatgtagtcaactttaggttacactcatcatattttacaaagcagtcggtatatcactcggatcatgttattcagggattcacaccgcatatgctacatattaatatcaagtcacttggttgactataattatcgaagccactcggttggttggattatttattccttgactatatgcttagtttgttcaattaaccacatagtcgagggctacacctattaggtgcatctagtcgatgcacctgactttatttttcagccctccatagtctttagatttggtaaaagtactcgggagaccatggcaaagatgattgaagcactcggctgtggagtaatctagttcgaaagaagattatcttttcgactgtgaaggtctcaggggctactgtggagattatgggtaccccatacccacacggcatggttatccgactagttataggggataacttatatatatggaatatgtaacagattatgacttgggtattatgtttccttgtatattacagaacggcctaaagtcctggtttgataagattgtaaagtagatttaggaaaccaataccgtattggataaggtttctatcttgtaatcctgccccccatcctatataaggtaggcaggaggccctctagggtgcatgagacaactagatcgtcagatctataattcacccggctgattcaaatccccaaacaggagtagggtattacctctcattgagagggtctgaacctgtctaaatcctttgtctccgcatccatccacttttaggtctcgtgcgctaccctcttttattattgccgaattcatgtttcgacagcactgttcgtgtaaaaaaaaataaataaagaaataaagattttctgttctgaaagtatgtactacaattaaaagattctacaattaagtagtacaacattattgctggtcgcatacatattgatcccattcacgcatgtggcgatatctaactagaggcaggtagac

SEQ ID NO: 22881 - DNA, 5855 bp, Oryza sativa
ttatcgtgtgttacttaaaactaagcgtaaattatgtatatataagactagcaattagtacacgagtcgttgtcagatgcatgtttgcattgttcagagatcgaatatgcacacgttgcattgttcagacttcagacaccgtcaccgtcttgcgcctagctacctcccaacacaaggtccaaattggcaggttaattaattgctatgactaattaagctgtgattaattacgatgagaagaatgctacactgcccacgaccattaaagacaggaaccacaccatcatgacttcatgatcaggttgttgcctttgcctgtgaaaagtaatcagtataaatcttttctcttttttttccttcagaattttatttatttttggctttttacaacttaatttgtaattaattaccacacagaagtacagaacatacacacccttttatatacacgtacctagcctagctatcttctgcaacaaacaaatgttagtatttcttacaaaaattaattaacaccagatggtccagactaattaattaaagtaccccctcctctcaaaattttaaaactaagcctttttagataattaaaaattaagcctagttaatcaactgatcattatacctcctcctacagctaatggatgacattgtaatttagcgcacgtacatacatacatacattatccaacatgattaattagtgggggaaaagttgattgattagtgcccaaaaagcagcgggttacacggcgaagctctgctaatacgacagaatccggtgttaaacccttgcacgatcaatggcctgtctttggactagcttacatgccagaaagctcttgtctgctaatgcaggcaactgtccgggtccggaagttaatgactatacttaattaaccaaaccatataattatccataattaattaaactcagatctatatgattaatactatatcgaaccatgcgcatatgtcgccctaaaaatctagctagggtgccgtcttttcacttattcttatacttatcagccaaactttaaattttcaatcttaaatttggagctgattttgaggtttttttcattgaagtttagtttttagcctttgcttttagatcgctatgtaaaagttttactcacaaattacttttcgtttgtaaatatgacgtttgtcttatttcgtgaataagcgaaacgatgggtccgctagaatgtatgcagttgaagtagctcggaacaataaataattacttaacataaaaacattaggactaattaatttcacatagaaaaaaattaatatgttggtagattattcgtatgtaggtagctaatatatgttaggatgtgatatagaaataaataatatgttagtgtgtacgcgtcaaccaaccacaagcacatctgtctatatagtatatgcagccaataatgaatgaattagcagatgtggttagcagtagctaacacaactacttttcgtgcgagaggtgttgtcgcacactaatgggaatgaataggactggatatatagagtatggtatgatggttaattggtcgatcaattaattatgacgcatcagtgtgatagctatatatatgtagctagggtaaatacaaatatatgttactgatcccaaccttgctaattaatttaattatcagagacccaacacttcaattaattacgtgtacgtacgatatataaggccagcccagctagcaacttagagctcatcgcttgctcatattccccactaataaaccgttttcatttattgaagaataaaaattaatttataaaaattaatttatatatatatatatatatatatatatatatatatatatatccgtggcgcgtctctgagtgcggagcttctccggaatttccgtttttctcccaccgagcaagactttttttcccggtagggtcacgccctctagcggcaggacgacctccaagtccctttttaattggtgtatcagtaaaatagttcccgagtaaaatcaggcctatgctcgacacgtagtaaaatatttactcctgtttgtttggggcttgataaaaatcatcggtcagtaattttttcactcatcgtatttcactgccttgttggagtacaaaaaattttcactcctcgtatttttcactcgtatttcactgctgattccattcggagtaaaaaaaatcactgcctagattaggtctcagtgagaaaaataccatgtcttatctcatgtagtctcatcgaactgtagtaaaaaaattactcatcagctaggttatttactaattaagatgcccaataaggaagggtagtaaaaaaatttcttttaatataattacatagatagtaattttttactgcacatgtttttacgtacctttcccacctctaccgtcacaagtaaaaaaattactgattcatctctaaattttaattttcctttcttgcccacctcgtatcaacactgagtaaagaaattcatctaccctaatttgtacgtggagtaaaaaaatcacttcgtcgtctctactttaatttgcttgcacaaatcatcctattagacagcaagtaaaatattgatcattttggatccgttaatagtaatatttttactcctataatttttatcacttttcggtatgttgatattaatatttttactcacgtctatttaaggtgcacaaaaatcacacccaatcaggattattcaatcgtgatcatactatccacattaaaaaaaattacagatcgaaagaggaagaaaaacagaaatgcatctccgctttctcctgttatatatgatccagtttttccgttcctccgttcctatccaaattccaccttttccgttatttccattttttcgctttctccttttccgttcctatccatgtagtaattcccattcctaaccacgtaagtaattttcttaagaaaaatctttgaagtattttttttactgatagtatttccaaaaggtcataatatgatattatcatatgaacactacgtcgtctctgtctctgtggaaaaactacaatatcatcaatcctttagtaacaattcttcccacgcgccgtcgacggagccgctgggagatgaggatagggccggcgcggtcgatagcccctccgtgcctcctcaccggtggaagggaaggaatgcaggtgattggaacgcctccaccgtaatcgcagcacgccgtttctcctcgctgatgccaaccatcccaccgctgctctcctcgtaccgtccacagattcgtataaatcggatggaaagaaaaagttggattagaaaatggccatagcggccatagcggcctcccagcagctgcgcgcacggcccatccgtctccgcgtcaagccagagtaagggcagcagccgccacggggttggccgccgggtcagccaccatgctgcctccctcccatggctgctgcaggtgaactaggacgcgaagaagatgaggagatcgtcgccgcttgccgactccacgccagatcttgccacctaccacctcataccctgacgccgacggacgcctctctgcctctccagatccgaagaaatcggtggaggtgggtgaaatgttctgggaacataaaccccatatatatatatatatatatatatatatatatatatatatatatagacacacacacattagagtaaaaaaattactacagtagagagagtgggggcaggggtgtggaacgagagtaaaataattactggtatagagggtggtgggagatggagtgcaggatcgctgtgaaacgtgctacttagtttcgtttcgtagcaccctacgtgctgtctagtagttctatatatatatatatatatctatatccaaaaacagccggcgcttgatttagaaattttaaagtcctactcggtactagccgtatgcctcacttatctgcctatttaagcaaccaacttcaggtatccctagtcatatttgaactagctaagcgtttaccatctccccaggcagttccacccgaggggaacacttctctacggatactggttctccagacgcctatgcaagatgcaggctaaaaacgagaacatccgagaggtttctcctatagggtccctagcataaacgcttatctagagcaaacaaatagggaaacttaaagaaaattacttcatattaatcaaataggcttacatacggttttccctttcgggaaccccgaaggtagatacaaacaagtttttctcaccttacaaacctttatattacaactccttgcttcaatatatattatgcaaggtaggctagaggaactactactaagaaagatggaatggagggtgagagcgcgcttggaagctttgctctgaatggtgtcttcgtggttgtgtgtctccggagtgaaggccaacgtctccttttatagaggccagggatggcgtcgcctgtgcctcctgcttatctcttcgctactgtatcttcacgggagctggctaaagtcgaggcctttccaccgaaagttttactcttcacagtgatatgtcattcaacgcaccctatattgtccccttatcctttatagggtgtccttctggattctttcttgggtaatcttctgaatttcttttattcttttattcttcattcttttattcttcttccacgcccaaattgttgatattctattatcaatatatattgaaaaacatatttagcttatattaatttattcatctggttgcccatggccaccaagatccattgtgtccaaatcagaaaaagaaacttctaatttctcatctactgccttttttatttgctcaaatttctgatccatttcttgttttaattctttaagtatttcttccttcaattccttctttaactgtggggaggcttcttcaaatttttctattatcttccaatcaatatattccccatctaatggatccactccttttgttaagcattccttgtatgtgggttttttaaaaaacccttcttcttttatagtcatcttaacgggtatttctgaagtcttctttcctttagcttttttgcatttttgaatatattcttttgcagcaggctctagataataatttattcctaatatttttctagcttggcttaatgcttcatcaatatccttatatttcttccaagatattcctcccattaatttagcatctattttttgagccacaatttcttcaaaagaaatgtagaccccagggagctttccatcaaatactacatatataggcttttgttggattacttcatgatcttcattggcaggcattaatgacccatttattaggtgaaaatattcagagaggctattcaatattgataacaaataccctttttcttcccttttattattgtattggtaccagaaattatccaagatgcactcttgaacttcatctaggattatatggtcctttggcttaaatttatatgaatttggtgggaatattctgagtttgttgtcatctccaaatgtgaagcactcgactccggcgtaattcattgatcttttcatacctgaaatatggttaaacgagaaagcatgtcaggtaaactattatctttccccttaatatgttcaaatataactctataaccatttcctgtaataatatcttcaaataaaatccatcttctagttgagcttttcttgctattaagctggttataatatctacagatggcttcacaatcagttctaaccgtgaattctttaaaccctaggtataacctaaaggcattaattgcattgataattgccatgatctctctatctgtattattgacagtttttaatttataacttccaga

SEQ ID NO: 22882 - DNA, 519 bp, Oryza sativa
catggggacatcacacaagcccaaagagagagaacattaaaaggattccgtgaaggccattttaatattttgattgccactgatgttgctgctcgtggtttggatatcccaaatgtagacttggttagtgttttccttgattattctgctcttctaattttgtatgaaatagctgtttctaggttggttttctttcgctgtgttttaggttgtttttttttaaataaaaatagcaactacactttgtgttgaacagtgcttgagtgacttcccttccttttacaggtgatacattttgaattgccaaactcctcggaattgtttgttcacaggtctggccgaactggccgtgctggaaagaagggtaaggcaattgttatgcacagctatcaacaaagtagagctatcaggatggttgagaatgatgttggctgcaaatttacagaggtaagacttgattgtatgcaaatgcaaagctgagagccaatgtatcttagcatatacagctttctatgcaag

SEQ ID NO: 22883 - DNA, 8388 bp, Oryza sativa
gtacacagtccacatgatacacacaggagtccatattgattgtgtcaccactggcttgttgcattccaatgcacatttgcaccgcatatattgcatctgtcacttgacagggcatgcatacatatattgcaatattgcattgcaagcagaggcagccggcagagccaggtactcgatctatgcatacatgcacttactcctacagtgccagtgtgctgcaggccagcactcaccaggtcagcatacagcagtatatatactccctccgtcctaaaaagagacaaaccctaagccgtgtccaacgtttgaccgtccatcttatttgaaaaaatataaaaaaaattaaaaagacaagtcacgcataaagtattaatcatgttttatcatcttgcaacaatgaaaataccaattataaaaaaattttatataagacggacagtcaaacgttggacacggaagcccaaggtttgcttttttttttttttgacggaaggagtatatatgctcctacagtgacgccttaatttcaagtcgaggctagctattgcatgctctgcatgccactccatatctctgagactctgaatcaattcgatcataattcagagctggtagctatgcatttttttgcagcgacttcgcagtgtgtcttgttcacgcatggatcgagaaagccagtaaaaaaaaaggaaatttaagtttttttttaagaaaaagacacggtacaaagacaaaggttgacgcacgtagtcaagcacacctactactactgtatgagcatcttcgaaaaactgtccgaccagcatatcttagtgttaagacttgagagtgataaaatcactacagatatgagcatatcttaagagattaacgaagtcagcataggtgcttcatgttgacgcgatcacctagctaccatcgaaagaacaattagcaatagaatacgagtactgggataggatggttgctaggaacacttaatttgtcgtaatctgccatgtaggttagacgagtttaaccaagaaaatttgaccagttgtgataatatttgattccaacaaattagctcctacaagtcattgacttaaaaaaatgtgacaatattttcttatccttgataaggtgtggcacatatttaaatcaattttagtaggcaaatgacatagtaaagtgtagatgagtagcgtagatgagtttgaagacagtttgttgccaccttagaagagtatttgctggcaaaggacgataaactatggctgtacaatggaaccgtcaattcgagtatacctagttgccctaagtcgattccaacatttgccaaccaaacttgaactatatgacttggcagacaaattcggacggacggttagagtgacactcagtttgtgaatctaagtttatatcacttatatatatatatgattaatctacatgtgcagcctgcagttacggcacaaattaataaattgttgctgaatttaattcaaagccacgatcgaatttaatttggaacgaaggtgatttaaatgctgggcacatgtacagtaccaaactgcagtgtacgtagaacgtactaggtactgtacgcacgcacacagtacagttggcacttccatgatctcgatcgcggtgagctcaatcgcccgtccgtacatcgatcatggtcatggattattattgggtgatgcatgatcaattaatggctaattaaccacaaataaatatatgcatgattggatatatgggggatcgagcgagattgatatacattgtgcatgcatcctttaattttgttaggagggaagaaccctactagggcacgcccactctactagtgtagtgtgcaccccaagttagaacacaataataatgcggtagaaattagatatattatgtcgcaattataacacatattaatggattttcaactaattctgctgctaaattatgaataatggatcgacaggcagaatacatgcattgatgcatatagaacatggatctactggttgttaaaatatcatatcatcatatagggagtatttcgaagcgcttggacaatagaacatgtagccacaagaaaaatcatcagggtgagattgatattgtgttttttattaataggaaaaaacatcatttatttatctaacaaattatatgtctttgtcttaaaatataagaaattttatccatatatattttttacattccaagataaaggttatagtatatgtcagttttacataagtggaccaatactaaagaaagccaataactatctcatactacatttactctgacaacaaactcaatgtatatataatccttactattttctagctaataacaaattagcaagacattgcatgttggttgtaaagagttttgtgcatggatgtatacacttgtccattactcttatgcacaaataataaatagacatggagaatgaatattgatataacgataatttaaaaatagcataaaaatgttatatgatgatcaattgaaaataaaaatattatatgatgaccaattgaaaataaaaggagtataactcaagtgaatgggcactgcaggacaatcgtaggagtaccattcaccatgcctttcctgcataaatgcaacaaccatcaactcaaaagcagacaacaaattactgccaggtcaccccaaccccttggccccactgtcagtgactaacccccctccatcgtcctggcccactgaccccgtggccccacccaccatcttctactccctccataaaaaaaaagacaaactctggtttccgtgtccaacgattgaccgtcggtcttatttgaaaaaattattaaaaaaattaaaaaaacaaatcacgcataaaatattaatcatgttttatcattttatcatctaacaacaatgaaaatacgaattatgaaaatttttcatataagacggacagtcaaagttggacacggaaactcagggtttgtctttttttttacggacagagggagtacccatgatctgcctgtccatccggccccaccactccacaggtcagccactgtcctctctccccccgacacacctgccccgcacgtgcgctccactgacacgcgggccccatacctccccaccacgtgtccacctcccgatccgcatccgacggcgaagggaggctgctctcacggcgtgcgtgtatacgagtacgacaagcggcgtctcgagccacgtggcggtgaaggcgtattctaccggaatacgccttcgcgagctgggacgcgtacttgccgccgtttataagcttaggccgtcgtcctctccgcgagggagaaaggtgagcagtagtaaattggacaccgcaccaccaccgaaaagctcgcactctcctaaccatggcgtcgccgccgacgccgcagccgccgccgccggtcgacgtcgacctcggcaagctcagctacgagatattctccctcctcgagagcaacttcctcttcggcgccggcgccggcggcggcggaggtgtttgctcgctgcctgggacgcccgggagggcgcttcttggagggaaggtgagggtgctcgcgatcgatgggtgtggtccgggaccaggtgatgctctgctggcggcggcggcgctggtgaggctggagacggcgttgcgggagaagtccggcgatggcgatgcgagggtggcggatttcttcgacgcggcggcgggggccggggcggggggtgtgttggcggcgatgctgttcttgaagggggcggatgggcggccgcggtacacggcggcggacgcgctggcgttcgtggcggcgagcctcgggaagggcgggtggcgcggcggcggcggcggcggcggggggaggaggtggtggggggtggcggcgctgttccggcgcgggtcgtcggcggagaggtcgtcgctgcggcgggtgttcggggacgccacgctgcgcgacaccgtcgcgccgctgctcgtcccgtgctacgacctcgccaccgcggcgccgttcctcttctcccgcgccgacgccgtcgagagcggcagcttcgacttccgcctccgcgacgtctgcgccgcgacgtgcgccggcggggccgccgccacggccgtccgctccgtcgacggccgcaccgccatcgccgcggcgtcgggcggcgtcgcggccatgggcaaccccaccgccgccgccatcacccacgtcctccacaacaagcaggagttccccctcgccgccggcgtcgacgacctcctcgtcgtctccatcggctccggctcctcctccgccgccaccccttccaccgccgccgggtggcgaacgcctctcccctcccgctcgccgtcgcccgccgagatggtccgcctcaccgccgagggcgtcgccgacatggtaaaaaaaacacacacccacacccaatcccaaccctccatctcgaatccgacggctcccatcgaaccacgtcactaactcaccatgggtaaaaccgtaaattcccaggtcgaccaagcggtggccatggctttcggacacacgtgtgggcgcaactacgtccgcatccaggtcagacccgaaaaatctaattaccgaattacccctccatttttaccattttacccctcatttttactgacctcgtcggcgatgtgtgttcactgaccaggcggcgtcgccggcgtgcaagacgaaggcgctgagctcggtggacgcgaagaaggcggcggcgatcgccgacgggatgctgacgcagcggaacgtggaggcggagctgttccgggggcggcggctgtcggagaagtcaaaccgggagaagctggacgcgttcgcggcggagcttgtgaaggagcacgagcggcggcgggcctcgccggggctccccaacgtggtcatcaagcaggtggccgccgccgccgccgccgtgacgccggcgcgcctctcgtcggcgaccaccacgtcgtccgccaccgccaccaccgccaggaccaccgtctccagcatgccgtcgccggcggcgtcgctggactccggccgccactagcagcggcggcggcgatcgccggcgacgtcgtacgtgtagaagttttgtacatttgccatccatggacagaccgatcgaggagatggttatttaattttttttttatttacgtcttccgatgagtcactgacatgcgggcccaaccaagatggaaatgaggtgaaatatttataaacttaagttatataaatatttatgtaacttatatccatcaagcaaggatatgaatgttatttattcggttagttagtttcgtgctcgaatggtttcgaattcttctataaaaatgggttattaagatatgcaagaaacttgtgcaagttgcaaagcaaaagcagatgatgccttgacaaagtctcctcctcatcatcatccattcatcctcctcccaaaatttttcaattcattttccctcccatcagattgaaattgacaggattcggatcatcactgtcctaatcagcgattagttcctgatgttaatagactactaatcctactgccatggattgcaatgtttaaactcccatttaatcaaattcattagcctccttttccgtatcagtgtagtacattttttgtccagcatgaatgctgcacagtggcagctaaactagctatatagctccactacaacactgaatcaacgatgaacatatagtgataaaaataattaatatccccttgacgattttaattcaattcttgtagtagcttgctttcaagtgagaaaaataggctggggaagatgagacttgaagtctgcataaagttgctgataacttctacgtactcttcagctgcatcattgcctgccatggacactgtagtagcttcagattgttgtaatcctttcctgtactccatttcttgtagccttataccgtataggcgtatatacacagtatatacaaatagttttacaatggtctctctactaagtagaagtaatctagaccattcatattttgtaacataatcgatttatttatacttccacctcaactaaactttcaatggtctctatttataccattatctcaacaactgatggtagaataagtatttttttctattagtagtataactcataaattaacggttgatatcgtttttattggtgataataccaatagtaaaatattgccattatatacaatcgtaaagatatcgtatacggagtatatacgtagctgaagaagtaggtactgtgtgtaggcagcaagcccctttctgacactttagtttgatccaatccaatcctgaaaactttaatactgtagtatagtagactagtagtagaccagtagtagtttgattttggtagtccactagtatcaagcaaggatatatgttgttttcaagcctatttatttttgtttctcaccaatcatatatacatttccccataaggttggaaaaagaaacatggaaatcattcttgagtgaggacataactatatctgagctaataatatgtacaaactcggttcgaattagttggccttctcaaccagagtttatgcttttgattttggcgaaaattttggtaggaccaaaattttgtgatttttagcacttttcaaaccaaaaatttttgagatttcgacttaatttgaataaacgttgaccaactttaaaaaaaaaagagaaaacctgaaaatttcggttgatagatttgccggtggggtccaaaattaccaaaattttgttctcaacattactgaggattcatctggaacataggatctcacataaagctctacaaattacatatgattttttccaattttatatcgggacgcggaaaaatatccgtgtcccggacgaacttgaaactggaactgaaactgacaaaagtggacgctgatgggcaagctacgatcctccaacccaatagctgccatttgaactaccagctgggttacttacatggactttttcttcagatcacacggatggagaagactagcagaaacagcacataccaaactctttctgttcttgtgctcaaaaacagtggctgctgcagcatctgaattctgcatgtaccactactcaccaaattcaccagctgcatgcacagatgctactgagatttttacaggcaactcgaagacaagaaaaaaagatgagcatctcttcagttcagtacagtactgctgcaaatctgggagattcctgtacttgtgtttgatatcttaaaagattgcaaattgcaatttgttcagggctccatgcatctcacggcgctgcatttggcccaatgctcttagctagcttcaaccgcggttaattcctgaactaatttagtatctgcacacgatctagtaatctacaaaggctgaaaaaactgcatcatttttttttcagaatggaggtaaataaataaattacagtcttagagagagtgtaggtaagtttttttttcccaagagataaactaactaaccaacgccatagatctcacgtcgcccaattaccaacgcctgatctgagtgatcacctcgttaaccatcatctctcctacctctaagtgcgattttttcaccgcctccgagcagttgaaagttgttgtcactgcgatcctcggatgctgtggcctgaggatttctttttctcagtggcctcttaattgctcgagcatttgggaatttgggagcagagagattcagagatcagagagcttcactggaaccttccatgtggtgggcaaatccagcaagattaacagctttgtttaaccattcaggtaacgtgatcgagtcagacttttgtcgtcgagttttcgcggcaaatttcgcttgcaatttgtagcatgtcgagacgaatctgcagctttagtttttagtttcagtgtctgaatattttagtttcagtgaagaaacacattgatctaggagagctttgcttgattcttatttttttttacctctgctgttttcaaccaaaggtcagcgttgaaatgttaggttaacaaattactactagggtcagctacacataatgtggttagttattgttaattactgcatggtccatggccatgggtttagagggcagtaaaaaaaatgtaaaattaacactgctagcttgtatggcatatttaactagaattaaccagctcaagatcttatgagggtctcttccctagtcatatatggttgaaacgacatgaccgagatctctgaatgagtagttaattcaggttacctgctactgctagttaattagctcgtgaagcacattttttttcctgtcatgtttttccctttcagaagttcagagacttgagcaagcccaggttgtactaaactagtaatgcagccaaaatcactcagaaaaaactactaattt

SEQ ID NO: 22884 - DNA, 8523 bp, Oryza sativa
  unsure (1)..(8523): unsure at all n locations
aaaggcttgagaacctgttcttgcagtcttttgtccttgatcaattggcttcagagaaaatgtacttgtgctgttatgcacttatgctgatgaagtgaaaggaatttaggccgtgtttagttcacaccaaactttccccaaactcccaactttccatcacatcacattacatccaaaactttcctactcacataaactcctaactttttttccaaactaccaactttccctaaacttctccctaatttcaggaactaaacacagccttacaaagaaatgtaaaacaccgtcatcgacgcatgtaaaatggtcggtcaccgaaaaacgctattagttgcccgaactccacagcaccgcaggctccaccactggtgaaacaattttggttatggagtgtgtcagtttgagtgagatcccgccttgtcatgaaacgcatggatacttccattgtccctcaaaaagacagtgggtagtagtaaaggtgaaagcatggctaatttataggtgaacaccaaagcaaaagtgcagatgtgagtagttacacttgtccccatgaaagtggtaggagctcaaaaggagaaaaaaaaaagagagcaggggtcattcttccattgcctttttcaccattggtaatctaacctaaacatgatgcaaaagtttgttcacatgttgacacaaaaataaactatccttatgcaaagccatttaccccttttcctgctacatgttcagctcatgtatgtactgatagtacactatactttgatgttcttctatcatttgggggcatgcatagttgagtggtccaaaaatcacaatgggctttatggcatattggcatcctcattaataccttttctcactgaaattcagaggcatccatccatcaatcaatcaatcatcatccaagggacccaacgccaagcagagataaattcgagatcaattctatgctctgtttcagacagtccttttttatggtgtagtagtacttgtaccagtatcagcttccatgctgcattaaaccaaagcaacttctgctcatcaactaaagcttcagtctttcagaaaaagaaaacttcataatttgttttgcctaatttgcagaatacgtactttcttactaactcatatataatccataaccttgttaactcattcatagatataattatataaactttgaacaagagaagaaatgaaagaaagagagcaaggaatagcatatagtagcagacagcaggaaaagcagagccaagctcaagtcacgagcaagatcttgctgctagtagtataactttgcatttgaaatttgctcctaattcgttcgaattaaagttgacagcagtcaccatcagccaatgattggatcattgaagattttgggaaatggagactggagagtgcagaaatgcagcaaagtctgaagaagaagaagaactgaagaagggtttcctttctgatctcgcacgccatctcgaggaaattttgcatgaccaaagtcagaaattgcgaagctaactatacctaagtacgtatgtacgagcatcctttattctgttagtctcaaacgaatttgaaacggattggcaaacttgggtgatgaccattgtgagagtccttgcgtttcatcaagagtgtacgcttgggtttgtgacaaaatttcatgctaaatgcatgcttgcttgggttcgcagcctacatgagccaaagttttgtcatttgaagacaccatttttatcctgatgtcaaaattttggtaaaatcatcttcgctgtaagttcacctttttaatctgcagacgatgtcaaaagttctttgattaacttttcacctacagcttcaatccaccgaggcctttgtttggataggccccgaaatatacatccaagtttgtgggccaggattttagcccaagtatctagcccacatatggatgggctagaactgaggcccatataagcaaggccctgagactgttaaccaaaacaggccacaagcccactcaacggcccaagaggacaaccaagcccacctccaagcactgaataggctgagtttgaggcccaaccaaacgaggcctgaggctcacaaccaaacaggccaacaagcccatcatcatcaacacaaaggcccatcaggcccactccacggcccaataagacagtccggcccacctcccaaaccgccataacttttcctccaagcaatacatcccaaccaaaccgtcccgaccccttacgccactgacaccacgaccccacacctcccgtaccccacatgtcatcctcctctgaccccgcgactccacgcctccccacatctacctccacccatcgacctcttctcccaccgacacgtgggcccaatgcacgcgtggatcggtgggtcccacgtgtcagccactgccctcccggggaaaatatctcacgtcctgtgccttttaaccccattcgcctctcccttctttttcacttcgtctcctctcccctccaaaaccctaaaccccccaaaccctagccgccgccgccgccgccgcagtcgtcgccgtcgtcgcagcagcagcggcagcgtcaccaccgcgaccggcggctgcagcgatgtactctatccttcgccgcgcggcgccgctccggcggcgcgccgtttccgccctggccgccgcggttctccggcgggaggaggcggcggcggaggtggtcgtgtcgcggcgggcgacgatcccggcggcgtggttccactcctccccggcgtggctggggttccgggagacgggggccgcgggggcggcggcgaggccgcagtacgcggcggatgaggggttgttctacgaggaggataagaggggggcgaaggcgggtggagttgctgcgggcggcgcggaggaggggttggaggtggccaagctcgggatctcgcccaagatcgtcagccagctcgcctcgcgcggcataaccaagctgttcccaatccaggtatcaggagccggcagtccccccatcttctgttccatttccaattgaatcgtgaacaatttgttccttgaatcatactttcgtagcgaaagtttcatcctcttttacaaattgtggcactcatatgccaagctgcatcatgatcgcttgagctaagatttgggtcatgtagtcaagattgaagtgtgatcaataggtgcagagatattcagtgcttaagaaaattagtcagagtatctgtgagggggttaattctttatctgccctaaattatgcttctttttgtgtgctgtacactgcttgatgctgaattaccagcacttgttatgggatttctatattcagacatttaagttatacattgaaatatttgctgtgattattgtgatatccactttatataactgcacaagtagacaaatgcctggttcagatattttggtttgtttaggagtcacggggaagctgtttttggataaatatgtgcgtttgtgtgtaaataggtgtaaatagattaatagacataacacagtgcggcaattcaatcatttatatttttttattctcgagcttatagtggctcatttatagtggcttctccatgtatgctgtggccaagtttcaatgttttcctggcaatagcataggacattcaagttactttcatatattaagtcaacggttcattttgttcagtaataatcatggacttatgttttgctgctctgcgcagagagctgtccttgaaccagcaatgcaaggaaaggacatggttggtcgtgccaaaacaggtacaggaaagactttggcttttggaatccccatactggacgcaattattcggcacaatgaaaagaataggtaagttttggtcctattgtcttcatatatttttttctttactactattggtttgttcctctttgttttttgggtaacctttgagcctttggatgcaacagccctggtaaatttcccttggctattgttttggccccaacaagagaactcgcgaaacaagttgagagggaattttctgattcttccaatgtggaaacgatctgtgtatatggtggaactccaattagccagcaaataagacaactcaattatggagttgatgttgttattgggacaccaggacgagtaattgacctgcttaaaagaggtgctctgaatctgtcagaggtccggtttgttgttcttgatgaagcagaccagatgttgtcagtgggttttgatgaagatgttgagacaattttggatagagtacctccaaaacgtcaaaccttgatgttctctgcgactatgccaacttggattcagagactcacccagaaataccttaagaatcctgttacaattgaccttgtgagttttatacttgctaaactcctttgctcttggttttacacataatccattgcatagattgtggaactatatctgtttttatttaaaatgcactctcctcttgctgtgtttcaatgcattagtggcattgtcagattgtaaactaaattgccatgataactgtagttctgttgtatttatattttgttttgctagatgcctgatccttcaaaccttaaatgctactcttgaattctgttgaatcttttatattctaattaatatatatttcattggtgcaaaagaccaatgcagtataagaacttgaggtattagcattaattatttccagcaaggtataaaatttaccttgaagtacattttttttggttcgtttcattcactatcttcagtagtataactgccaaatgaaaactattgaggcaaatatggtccagtttaatctattttgaattatacagttaaaattgttcttatgtctttccattaagaagtcattggcacaatatctggtactactttatgatattattccttttataggtgggtgaagatgatcagaagctagcagaaggaatcagtctttattctatcgcttcagagggccatgccaaacctgctgtccttggagaattgattaaggtgaatgtagtttactgtcattttttatgtttgaccatatcgaccttaaatactaatttttactataaaatgctttaaattaattgttcattcatttcaggagcatgcaaaaggtggtaaatgcattgtatttacacaaacaaaaagagatgctgatcgattgtcctacaccatgggtcggagtttccagtgccaggcccttcatggggacatcacacaagcccaaagagagagaacattaaaaggattccgtgaaggccattttaatattttgattgccnnnnnnnnnnnnnnnnnnnnnnnnnnnnncccaaatgtagacttggttagtgttttccttgattattctgctcttctaattttgtatgaaatagctgtttctaggttggttttctttcgctgtgttttaggttgtttttttttaaataaaaatagcaactacactttgtgttgaacagtgcttgagtgacttcccttccttttacaggtgatacattttgaattgccaaactcctcggaattgtttgttcacaggtctggccgaactggccgtgctggaaagaagggtaaggcaattgttatgcacattttatcaacaaagtagaagctatcaggatggttgagaatgatgttggctgcaaatttacagaggtaagacttgattgtatgcaaatgcaaagctgagagccaatgtatcttagcatatacagctttctatgcaagttaattttcaaaccatttctcatacatgattctaaaagagctatccaatttgatccagcttccaaagattaatgttgaaggttctgacttgatgagtggtggctttgattccttcggtggtggtggatttggtcgtgaagggggtgggtcctatgggcgtcgtggtagttttggcagctcttcaagccgaggcggtgggtttggtgattcagggtttggtcgttcaggtggtggatttggccgttctggtggtggaggatttggccgttccagtggtggtggcttcggtgattctgggtttggccgttcaggtggtggtggtttcggagactcaggatttggtcgctcaggtggtggcggttacggtgattcaggatttggtagttccggcggtggctcaggccgttctggttttggccggtcaggtggatttggagattctggctcaggtaggtttggtgggggatttggtaactctggctcaggcagttttggcaactttggcggcaacaattctggacaatccggtgggtttggctcctcttagattggcagcttctatactagggcaaaagtaactacagttttttatctatgctatgggtgcctgctacaaatttagatggacggttttcagatattgtccaccaccacagaagggaattcctgaccaattgtttgttttccggaatcactacaagactggatatctagtgcaaatagcatatgcttatcgttattatgggtgaagggaatatgaaggcagcagaaaataatcacgagtcttattttgtttttcttagttattcctcctgcaggcattcatgtttgcaggaggactttagtttctggtgctcgatctagctcatacctgtaaaatatggcagaggatcttctgcagatgatatattataagtatctttttttggtagtagttctgtattgtatttaccggtgccttctagactataataacctagatacctaatgatcagaattgcggcttcaattctgtagtagtgttcatctgcaatggaaggatggcggctaagatgtgaccattgtctgaagtttctcgtgcttcttgcactggttgatgcacatgccagaaccaaaagaaatgggatgctttctttagattttttttttcttttccactttgacgaggctgcattctttcaaagaatttctttgatatcctggaaaagcattttcgctgaagaaaatgctggacaagctgtaatgctgtccccctcctgatgaggcagaatttatgttaatctcaaagaaaatgtgtatgccggttagcaaaggcacagcttcagtgcagaattaattaattaatgcgagcatgaattgttagtgtatgtactgctgctactccgtggaccatcagaaacgtacatgagactaaaatgtcaagagtgtattacttgaatggccaaacagtcagaaagccgagttattcaaagcgtattgcttagtacaagtcagtggccatgcgtgcacaatggccagtacttcaaagttctaactacttctaagtagcttatcaaataacacaatagtgttaaccgaaccagcaagattgtgtgtgtcaccaggatcatgtgcagctttcaagtcatattacttctctgtcggttgattggtcatacactctagcttcatttgttccttgcttttcttactcacaaggatagggatgaacatggagcttcatttggttcttggcttcttgctcttctactcacaaggatatggatgaacatgtaaatttaaagctggaaatttggaatgcaaaattgcattgtcacaactcacagtcccattactgataaaaaaaaaggtatacatatgtatagtcatggatatatacaaggccaacactgcatcgacaaggataagggagcaacttgataggagtgaatttcacattgtgttatttgagggactaagctcccaattcaaaaagcctgcatatatttgattggatgtagagacgggtaaaaaaatacctctctagaaaaaaaggagcaacttgattagattgtgacaaatttccacatgctgttactattagtgacagtatgcctaatctgtttgaccagtacttgcctgaacttttatttcttgagagctgtacttttctgaactggatagcattataaaccccttgtcattttcttatcatttgtatttggcttgcctgttcctgtcagcaaatagggctccatgtctacagctatggacctatccacagtgtcttttctatttttcgatgatggaatttaacttggcctctaaatccacattatgacaaaaggcttcgcttggcatgacatcagtttgggtcattttccttccatggctagtggacaatgaattatttttgggaggttttgctttctttttcacctcatccagaagcaaggatgaataaaatgtcctcatcatgtttaaccaagttgctgccaaaagacaatttggtcagagtattacaaatattctctctcaaagagtgtaaaatatttgctttttcaaaaaatgcactattgtttgttaagacaaaatatttaatttcagtgttttttttcaactttccattttctccaaaagactagtttttgtcaattgttttttttttcggtataactcttgaagtcaaggtaatgaacaatcactatggacttttcatgtggtgcattagttatatacctctctagtcaatcaattaataaatgtatgatatgttctaaatgccaaaaatgaaactatataaactccttcatgaaagacttgggggtat

SEQ ID NO: 22885 - DNA, 2938 bp, Oryza sativa
tgatatccctctctctctctcacacacatctctttttgcaagatctcttcttgttcatcatcttcttctttttttctcccccttttgcttcaccaatccatcttttgtcacgagatgtggccgagctgaagctagtagtagtggagcagcgaaagcaagtacgccaagaaaaaaaaaaggaagaagaaagaagaaagaaagaaagaaaaaaacgccagcttgagggcagagggcaaaagcggcgacgaggagcagtggccaaagctcagattcttcccgtgggctatttttaccacccgcatcccctctctttgagccccttggccgattcattcaccgacgcaaagatccaacccctcttcaggtgtcggcagatgccgcctttgtgaggtttccagtggggggatttctcgtcgtttcttgcgtgcggttgcgttcttgatccagtgagcgcacggatatatccgccctggtttagtagagagagagagagagagagagagagagagagagagaggttcttgattgagttccaagtgttggattgggttcttggagctgttggattgggtttttttgggagagagatgggggtttggaggtgtgtgggttgaccgaattggatcaagattattgcgggaggggggggggggggttgcaatggcggatttggggctgtggaagcaagggtggaggtgggtggtgtcccagaagcacatcctgacatgggcgcacatggcggcgagcggcggcaccgagaggctggccttcctggtcgaccggcattggcccgccgtgtcccgggcctgcgtgagctccggccgcctcgcgctcgccgcgctgcggcaatggcgcggctgcgcggcgcgcgggatcctggagatggctagcctgggccctgcgtccgtgttcgtcatcctctggagcttcttcgtgtgcatcacctcgccggcgtgcgccctctacgcgctcctgggcatggtacggcatgcaagtcttgcttgctttgcgctttcgccttgatgatgtagtggattatggataacgatttgtgcgcgttctaaatcttgtcatgtgctcgtctttctttttttcttctttttatcaagggtggattgcatgttaggttacctttcttttcgaaaagtatagttaaagtggtaattggtggtacaaaagtagtatgtcattacactttcatgagattgatcagtttgatgtgtttctagattcatttatgctttagttattgcaagtttatactacacttcagtaattcacacgtgctgtttctagatgttattttggaaccgttcacagtattttaagcagagaaagttttatctagtttgtcttgctagaggaaggagcacatggaaactaacacttgcatatttagggataagcactactggttctattcctattttgtgtatgttagctaatgtgtttcttgctgagtggttcagtttcaggttcattagcagattatcttattggttgatttatgtcaaaatacttaaggtcaattcgtagtttgcacagtgtacttcaataacatgaatgcaactcgtttctttgttcagcctgatatttatgaaaaatcttataatgtgatactgtgtttaatatgtatgaacctgtctagagaattactagctagtgaaattctacttgtttcatttcacacaaagtcaactatgggtagactggttcatgaccatttatttaggctctggtacacctgtaactactgctgtagttgactatatgacttacttctgctggttttctactgtggtatgagtttctccctttgggataccacctgtgttcagtggaatgtcaggtagtatctgaccttttcagctagattgcactggataaattatactgaaataagcaataggaatgaattccaggactatgtctcctcttgttctctccttgcaattcctcttattgcaatgcagactgaaccacttgtttttactatcatctggcatacttgttcagttagtaacttctacttgcgagtaaggatgcaagatttcccatgtaagatggatactataaatatcattttgtctaattgcttaatacctttcttttttcagggagctgctggggcagtcattcattacatgggctatacgcctggtcttttcattgtaggattatttggaatattgattatgtggatgtatggctatttctggattacaggaatgcttctgattgctggaggtttgttttatcttaatatttaagtctgttcataatgataattttgtgtttttgtttgtcaaatccataaatttttcttcctccctagttgcatccgtttgattcttttgacctaaaggaggatcctctctggtaatgcaggctgtatgtgctctttgaaacatgcacgatttgtgatacctgtgttggctatgtatgctgtttattgtgtggctgttcgtgttggatcgcttggtgtcttcttgacattgaatctttctttcctgacaaatgatcttctgaataagttgctgcaaggatacgagggaagcacagaagaaagacagtttgaagagccaaaacattctgatcctgtcatggatgagttctatcgcagttgtgaatttccctctgctcctgatagtgaacctgagactgtttcttctgcaaagcccttttgctcaacacccgtccaggatgtgttgcatgtacagaaagaggcatctcctagcaaagtagtgaaatcggattctgtttcattggatgagatgaagaggatcatggatggtttgacccattatgaagttttgggtattcctcggaatagaagtattgatcaaaagattctgaaaaaggagtaccacagaatggtaataaaccacggccttctatacaagggaaaatgagaaattcatgttacaattacttcatt

SEQ ID NO: 22886 - DNA, 8695 bp, Oryza sativa
aaaaaaaacaaaatcagctctaaatttaaagttgaaaattcaaaagttgactgataagcattagcattagcgaaaagataaggccgtatacaaaaaaaaaaaaaggtgctactccctccagttccaaatttcatgtcgttgaagaaattttgtgggtagaatgaaaatttctgtcgttcgataaattaatgaacattttagacgagtccaaatttcctgtggacccaatgaaaatttcacttgtcgaatatattaattaatttttcatatgagtatactactgaggtgagtttggttgggtgaagtttttaaggagggattgaaagtttagggctcattcagttcagaggattttcataggattattgtacgaattgaaacattaggagttcttttctcatacgcatcattcattccataggaatggatcataccaaattcctaagaattgtagttccaaatttcataggattcttagaatgaggtaaaacctctaggaaaaattcataaggaatggagtgcatgtgacatcttagttttttttctattcctttgatttggaaatcctataaaccaaataagccttagagggatagggttattaacggtttttatcaggggacatgtatggattgaaaattgtggaaggaactcgtgtttttaactacctaggtaggtggcgagagttgggaagaaatttcttatttacgtgcctaaacaaatctctaacatctaaatgccttgtcatgtgcactacctttaccaaataaaagattggcgaccttatagaaagggattgggagtttaaaggagagaattggtagagaggttggtcatggtagttttatttttactccttgtccctggttaatgctgctgtggtttctacttcccagtgagaaatgccaagttcaaaaggcaagttcaaaaggtatttaatataggtaggacagaaaatagacactaattaattgctcctcgataaataagatcatgttcaaaatgaccagaaatatggacaataagacaacacataattcacatttcacaattgattcaccataagaacagcatgctccattgatcaatccaaatgttcagacataggttcaattaccatcatccatgcattaaaatgctatagacataacaagtggaccaccctcacacggttttattattgtggttttgattctttcacaagcttttacataacaagatcatcagcaacagcgcagcaaagattcttcaggttctcgaatgcgccatcttggagtgtgactgacgccattctgttggaaatttcattctcagaagctctgtcaaaatcgtacttggcgcgataaatgaagtagccactgcactcccaggcagaaagacaacatccagtagccagattcttcacctaaagccaaagatattaacagtattcatcctcttattggttgctgaaacaaaaaaagtttgcaaaggaaacactgcagatcaacgagtttcacctgtggaaacaagaaaacctttgtgccattgttggagatcagcaggctgtacgcagtattattgtcatgcagagttaaagatacttcactgacaaaattggcaagcgtgtttacgtccttgccagttaacacaagagccttcataggataatcaattatttcatacaggtgaacggctgatgtggctttgccgtggtaaattgcaacagttgatgcagactccactggcaacgggtttgcgaagtaacaagcctgtgatttttataattttgcaaataaataaataaataaataaattctccttcacacaacctttgcaagtagagaattacagtatctcagctacatattattacagagaacttattcactcactagtttccataccgaacattaaaccattcaaaaggcaaacggtacaggatatcatggctgtattcaaatgtactgtttacaatcttacatatcatagcaaattaaagtagaagattacaaacaacaaaaggcaaagattaaatattgatatatgctgcaaacactagagatacactataacaaaaagtacaggatagcagttcaatgcttaacatgagtgttctacttaaaaaactgaatgttgcttccatcaaacagggatacaggatgcttaagtgaacaacgcatgattgaagtaatagaaagttctttgagcatcagaactagacagtattacctgaaaaaacatgtggtctggcatcgtggatgtgcaactatcaaagaaaacccggaatgctgcactatttacttcagaggcaatccttgcaatcagactaaacatccttttgtcccagaagaaggatagctgattggttgcgcttgggaccaagaagatatgaccatattcaacaggatatgccttcagaacaagaaaatgcaggtgtcaactagcagttatatagaggaaggtaaggcacgagttatttgaagctcatcctgcaacttacatttgcaatcagcagtagtccatcctttggtggttttgttgaaggaacaacttcaggtatatccttgtcaccttgagcaatgcacagaagcaattcatcataactattcatacagtttggcttcaggcatccaacaggttcaaggaacttgtcatgttccttgaggacacatgaattccacttatcattcagctgaacaacaaaactccatccaccttcaacaacctgcagaaacaggcaaacacattgttacaatcaagttcatgtctaagggcatcacattgacctagagatattgctaactgggctggcatccttttttttataatggaaataataatattggtttcacagccatgcaaagcctctgaatgcctattaatgatggacggatagtagggaggtggttatatatccaaaagaaaaatgtttaattatatcgtgttcaaaaagcaacttaagcatgccaattttacttatggattgcatatcataaaccactataaacaaaaggaatttaataattttctatcatccaactttggaagagatggatgaacaaaaagatccagtaagcaccttgagattgcaagcagttacgtcatatccaaaatggcccttccaagcataatcctcccactgttacaaaggaaaatccatgtattacaaatggggcaacgagaactctgaaaatgatgtggaatcctggatgatacaaacctgagaaagaatgattgtatcaagcaaacttgggctgccctgatcagtatatgcaaagcttttgagggtaccattttcatgttctgcaccgagacggtaaagatgtgtcttcacacctgaaaatccaaagagttcatgactattgcaatattaaggataaaacttaactgaacctatgctgttattctaaatttattcgacgtgcttctgagaacttattttggtgttctcattctaaactaacccttgtagaaggaaggcatttatcatgaattaaaactgcaaaacagctagcttatctgactcatgtcgtgtaacacagaattttattgcaaatgcaatattattcagcttacacaggctaatcctattgtgatattgctgtgttttcagtgtcacacttgagtagcgagcactcccagcaggtaacgttttggcagggaatagatataactcagaatataggagtaaagaacagcatggatcagatagacaattattgcttaccttcaaattgatcaagaggagatttcttgcttggcaacgaatattcacctttgaactccgtggttgataccatacttacaatgcttaatatctgtactactactaaaaaaatatctacaatgctaaagcctaattcagacttgaacagcaccaccaccggcaaggtaggtcaaatcagaaggatgcccccctgcagatgggagggcaccgcgaccaccgtggaaagaaggggacgcaagaagaaacttaggaaagcgatgggcacattgtgttccccttcttagtgcaacacgggatcctttctttggagccgtggttgctcttttcaagccagccctaccggaccagctaaccacctgagcaagaccaacttggttattctttaggagcctccaacaagttcttggattatgatggagcctttatgcagcctcacagggcaatctggcacatgatagaagtcagaatcaaatcgagcacttaaaaggagtagtcaatctgaaaatgagttttgagcattaaaagaaaaacaatccatgagtggatctatggttgcatgaagaattcgcataaatatactatattcatatgccaaaacactgtagagatactccaaacagatcagtctcctaatacacctggacacttgtaagcaaagaggggaatacataaatttgtctcaagtaaaggtagtgacttctgaaatcaccgtgtatattggattatattcacatatctttatgcaacataatatctaacgctgaagaattcttattactgtccaaaaaggtagacacctatgcacattcttcaaaacaatcgaggaaaatatagcaattagagtatgtataacacaaaggtagattttttttccttcttttgcatgtattgccgcatcaggtgtgtaaaaccagaagcctttgaacacacactatcatcagaattctaacccaataaaattgggacgtgacaaccgtagaagctaccagattgctccacaccacggtgcaaaacccaatctttccccccacaaatccagattggaccaatcaataccaaaattttcccacatccgccaccaatctcgcccaatccaaacaccaccaaaccaagaatcggcggtaaaggtaaaaaaaaaaaacatgcatgaacaggaacccaagaaattgcatcggatcaagaagaagggttggggtaaagaattggtaccaagaatgaatcggcggcggcagagtgcgcgcggtcgtcgtctgacccaagggcaggaaggggggaggaggaggaggaggaggagatggggaagtggacgtgtggacggctggtcgaggagggagagagagaccgtgaaacgtgcggacgcctccctctcggccgctctcttctcctcttcttcggccttatctacagtgctccccagcggtgaaaatcttaagccttgttaaatcacgagtaaatttcacttttaccatattttattactttttttttgtttggactaccctttaacaaatattttcattttgaattgaataaatttaccctggtagcactttagaccatccttaactcatctatccatctacatcaatttgtcatatgtcgaaacgttctaaaagaatatttctttgaaaaacattccataaagatagtttttggctgcttgaaaccgtggcaacccaatggccttcagaacccaattaggcaacaaaatcgtcatatagggatgcatcggaatggtaaaaaagacacatagcccttccaaatcagtagatgattgtggatcttgtcgataagttgttgaaagaatctttttgatgaaaagagggatacccagatacttgcacgggaactcggccataataaaggggaagacatcatgtattgctagcaggtcgctccccatgcagtagatcggcgtaatttcaatcacttgtcaaagttagtgaagagttctgatgtaactctaaaacaaacaagaatatcttaatgcctttcatgtgtcaagggagaaagaaagagcattaggtcatctgcatatagagaatctcgatgtgagatggcatatacgttcagtggttgtaggatatcgaagtctcccgtgcttcacaaagggagagactttttgataaaaaaaaatgcaatccattgagttggatttagaggagcatagttagccataaattaactataagcccatacgagaaagagagaaacaaaaatatgaagcgttaactctaaagcaagagctaactatatacatactcgaagacatatattaaaatcatagtaatagaaagagagaggagggaaaaattagagtaattttatagctaatctattcagtgccttgctctaacctgagcaacatgtgatacttgtgctaatcataccccagacagggagacattaactagttctagctgcctgaaacggaggtaaactggtacttggcttcttgattctacatgggcttcacggttttgttcactttttaattaaaaaatagttgtttatttattacacttttgtattgatccgtgcagaaaatgcctgtaactagaaatgttttgtgggatatttaccataaatgacagttatttccctttttttcttttattattttcatggtcagttgagagactttgtaatatcacactttacacttgcatttgcacagttttatttcagaataccaggagacgcaaggatcaactgaatacacagatttcattaattagccacctgatattacaactcctacctactgccttccattccacaaagaatctttacaaagccatctaaaaaagatcactgacaaaaccatctataactatagcaagctgcactttgttgcatgcagacaagtaaactactcacagtgaaacctgaaactacaaccaatacaaatagaccctataagcctgtactactgtactcacaacaccactaactgaacactgatacaatcatataaatcaacagatgcggttggtaaccctatcaatggaacaatggtagctagctagtttactatgctttgcctttgtgtgttaagatcttaatctttcttccctgtgagacaatgcaaaaaaaatttgcctacggcaatcaggtaactgaagtattgaaaaatctcagtcataattctatccatgtcaagccttttcatgaatagtgttaaggtttttcctgatcctactaaatactttctcctttcaatgctttctgaaccagattcaaaatctctgtaacctgaaagcaatatgaaaggaaaaacgtctttatattgaatcttgacagaaaagaaaagcatattcaggacatcaacaaaaaagtgctaaatcgttgtcaggagatttatggattaattgtcttaccccaggataatgcttcaatacaggagaataatgatcaagtgctatgtagatcttcccaagaatactaagaagagcatcaacttcatccccaagtatatcaacctgggtcacaatggtaaaaaggttgaatgaatgaatgctattgtcacatgaataaaactttattttgtaaaataaatattattgtgctttagtctctatatacttcgcttattattttcgataaaattcaagcatcatgtgatcactacttcgtgcctagaagatgaaaatcaactatagttttcaaggaaaaaatgtttcttagaagtttaaaagtgaaatgaacagaaaatagaaagagcataaagagaaggttaaacctcagcttctgctttctggagattagagcatttaatctcgagtatctgtttataccagaattcttttttctttaatacagcaacttgctgcaccagtgggttaaactggcaaattatattagtcaacctgcatgggaataaaaaacaaagaactcaataattggcaagttatactagtcaacctgcatgggaataatatatgccaaaatatgaagtggacaatttaacttagctagcattcactaacatgcagaatattacaatacattaagtgatgagttcaaatagtcagacaagtgagcctaacttatctagtattgctctaagtaaacaaaaacgaccataacaaatattcaaggatattaattaatttacatacctaatttcatttctcttcatactttgagccaatctgctttcaaaatcgctgtatgatttagataacttctccatactaacaagggcatattctaggtgccctgcttgtcccttatgactgttaatgcttggcgccgatgttttcttcatttcctggatggtggcatcaagtgaggcattctgttctttggcttcctccaaagcaatagacatggcagttaagttgtcagtcagaccatgtatctcttgcttgcatacattaatttgctgcaaagcctcatacaagctactcttcattgaattagactcactcttggactctaagatcaacaactcttgctcgcacaccttctccctaaaattggtaaggtcattaaccaagttgacttgctcatggtgctgcattaatgttgatcctgcaattgctacaagttgattgttttcatactttagcttctgtctgtcttcatacataatactcaactgctcttctttttctataagcaactctctgaggaaggtctcctcctgattagcatcatcaatatgattctcataattatcaaaaacttctcttaatgtcgacagctccaataaatctttaatgtggctctcaatctttaaatcttcaagttcatggctaagcttctcaacttgtttcacaagttttaactcggacaacgagtgctgtgccattttcctctctgcatctaatacttgtaaagacagatgtttagccaccatttttttgtcagctagcaaaccttgtagttgttcattttcatgaagtaaagagccgattctgtcctcaaatccgcaaacctcggcatcatcataattatcacaataagggttatcttctctca

SEQ ID NO: 22887 - DNA, 583 bp, Oryza sativa
aagatcggagatagctcgtcactgaagatcggagaaggatcgagctcgggtgccgccgagcgcgtcatggccaactccagcgccgtggagctcccgctgttgacaaggaccaactaccacgaatggtctttggtgatgcaagtgagcatggaggcgttggagcagtgggacgcagtggaggcagtgagcaaggaccggggcaaggatcggcgcgcgctggccatgatcatctgtgccgttccaagggagatgaaggccgggctcgccgtgaagaagtcggcgaaggaggcgtgggatgcggtgaagaagatgcacgccggcgacgaccgcatgaaggctgcgagtgtccaacgtctcatgaagcaggttgagaacatgacgttccgtgacggagagaacgtcggcgacttcgcgatgcgcatcaacggtctcgtcgccagcctgcgcgagcttggtgaggagatggaggacagccgcgtcgtgaagaaagttctgcgcgtggtccccaagagactgaagcaagtcgcggtggcgattgagatgctcgccgatatcgacaccatgaagatcgaggagctcgtcg

SEQ ID NO: 22888 - DNA, 754 bp, Oryza sativa
tgggctcttcctttcggttcttgtgcttatcatcagttcatctatttctgtttgtaaccgtcagttcatcttctgaagatcaacggtcacaccgcaaacttggttactctacaattcaatgtgaatacaagtgttttttctcatggattttgttggacaacatacaattcttaactctgactgggacgagtgtttctctgtcagatttgcatacttcatgtctttatttctttgttacaatttttctgagttttctagagattttgttcttcgtttctgctctctgggctcacagcaaggagaaacacaagaaaagagacggtgtgtcttttcttccttgagggcatgagttttgcccttttttcttgaaattactctagaaagagaaaagtaggttcattgtgtagaatttttcaacaaagtactacattatctcaatctctttttatcgatcgattattttctctcaggtttatacttttataccaagagtacttttacggtgatctctacatgatattctgaagatatagctgaagagtcctagaagaaaaaccctgaattacagtaatgacttgctttcctgcgttctggagaaacaaaaaatccaggagtcaaattgtgcagcatgacaaaggtaaaccctcacatttcatcaaattttcttcttctgaaacatccagatgccttcttctgattgatcttgttctttcccagatacaccgatcatcagaaatgtgaagatctactcctc

SEQ ID NO: 22889 - DNA, 12625 bp, Oryza sativa
actcaagaaatacttatattttgggatgaaagagtacacaaattccatatgatttgtacatagagatggattcagacggagacaaggacaaccaaaaaaatcacagggggcaacacagcccacagcactaataattaagcaagcaaggtggcgtgtggacggcggaataattttggacgctgcaaaaagccctcccctttgaaccacaatcatatcccaacacgccacaaaaacacaagtggccaaagaagatacaattttgtacacaaactactacaaagactcatgtcgaccgtgtagagcttctctggaccaccaccggttgcggactcggcgaaaattatcatctcacaaacacacagaaaatgattgactttgcactataaaattcccagctaggactctagctaggaggcttaaatcacaagtgataagctctggctgctgtgcagaggaattttgtaatgagttggttcgcttgtttctgaagccagaccggattaccaggatgttagtctcctccaaatggcaaggatctgaaaagcagaaggaagtgaatagcgcggttaaatgttgcaaatgtgagcacagatttacctggtacaggaaagcattgagattgcataacacagttctgacaaacaatggtacattgcctggaaattttggataactatttagaaatacctgtagaaaagagtaatggagttgtatgtaaaaccatgcttgataataggatgactgctgtacagcacatcctatatattttggtcctatgatcagtatacacaagggtagtttaggtgcaggttcatgcgaactttgccaatgaatcattgtcactgctactatactgtcctcaaattttcatcgtgattatctggatagtgtcataattatcatcttgcaaataaacttgtggtgcatacaattctatcgaagatattcagcaacaatagtgaaaatcaacaaataacttatggggcgaattattgtctaacagaagtttaggggctatttctaggtattgatcatgaaaatgtctaacacaagtatgtttaatatcattactgcaaggacaagcaaggcattgaattcatattcagctcattacctaaattatgactcaagactcaagagcaaatgatcagatagaggctcagtcattcaattctccttctacatcatttgccttttcttgaacaaagtagagaacctaccccccacgtaattacagaacaacaaggacattagcctttttcccaggcgagttgggataagcttatttcccaacttaattatcgaacatatttcaaatgccaagtttgcagacataacatatacctgaattatatcatcctaatatgcaagtcacaccagagctaaaaagaattttatccaaatatcattgaacatccaagattttacacatgaactgaggtggcataatactattgcattgcaactaagtcagatttttttttatgcatgagtatgtgtatcatttcattaagaaggaagaaatgacaggggagtggctaaagcgccttccacccccaaacaacaacagcagattgctacacaaacacaactcacttgaactgaccttacccaactggagtaagcgactttctaaggaactcgccgagcttagaggcctcggccagaaatggcatcattcttacccaaaaaactgtgggaacaaaattggcatccaacattgtcttgaatccatgtattactgatcatctgcgatatcctgtcacaaaacgtttgatgtctgcaaagtctaaaactgcttcaacatcacgaaaagaagaatcccacttagtctgtatgaaatcgacaagaaactctgactgtttgttgccgtttgtctgcatcatagacaagagatctttgtcatgttacatcttttggagcaacatgtcaaaaactgaacatcaatgcaagtccttcaggacttgcaaagcaaccaaagcaaaaggaacaaggtacatctgtcccatggaaggaatgttagtcaaggctcgctggggtcactcaggtgggatagacaagaatcttaatagatgtaggatcaatccttttactgtttcatgtcatgtgagatcataatgaacaccactctctctaagaaaatgtaccagacacttgtactgagtaaccaattgcgagtcataagaaacaaatttttcccttcagcttaagatgaaagcatcttggtagaaaattaaagtttcaagtaaccgaaacatcttgaatttatctagtgatatttgcagcggtaaggtacaatacccagcagtaaacaaacatatatacataagcaataaaagactaacaacacaaaatctaagacatgccatcaatagatattttacctcaaaaacaaagaaaccaccaggcttaagtactgatgacaatccttcacaaagatgaagcagatgctcaagtccatctttgcctccatcaagtgccagctttggttcatgccacccaacttcaggttgcaggccaggtagatcttcagttggtatatatggagggttactaatcacacccatgagctttcccttcagatcttctagaggctcaaaccatgagccatgccttatctcaactttatcctaattataaacatggacaaactcaagatcaccaatgagtgtctttgcatttaaaaattgaaaactatcaactcaattatttttaaaagaaaactttgtctgtttcaattgcaaagctcctcacctgcatcccgtatctctgaacgttgagccgagctacgtcaatggcgacctcgctgacatcagtggcgaacaccctcccctccgggccgagcatcctcgccacggccacggcgatggcgccgctgcccgtcccgaggtcggcccaccacccggcctcgaacccttgcaccttcgcgaccatgtccaccaccgcctccgtctcggggcgcgggatgagcacgccttcccggacggcgaccaccaggtccctccagtgctcgttcccgacgacgtactggaacgggcggcggtcccggacgtggcggagccagagggactcgaggtcgccgagcggcgcgcggaggagcgccgggtcggcgcccgcgtcgcgggcggcggcgtcggcgaggagccagcggaggtggcggtggaggtgcggcgcggagtccggcacgagctccgccgcgcggcgccggaacgcggcgagggaggccgccgcgaccgggtgcgccgccgggcggaggaagagcggcgtggtgtccgcctccgcctccacccccgcgccgccgctccgggggctcggcggcgtcgacgcggaggacgaggcggtggcgaggcgcttgagaaggcggggcgtcggcttgggcttgagccgccccgggagcaacgcggcgacgccaacggcggcggcggcggaggcgagcatggcggcggccagtgaggagtggccgccatgtgcaatatagatgggcctcaatttggaacgaaatgggccggcccaatgcagtacagataggcctccatttgaagcaaaatgggccggggccaactgcaaagtgagtacttcagcaaagagcataaattttaatacctatatagaagatcgattttgctatatctcactcgaaagattttttcttatctctcactcgattttctcactcaaatttacagtgcattttcttgtaagttacagtgtaattaatgaaacttacactgtaacttttgtaagttacactgtaatttttgaatcttcgcatgtaaattttaaattttgtattggatttggtctttttcttgaggatatggtaatttagtgtccattatggtgtttcttaattgctttttgctttttattatatctatcggattttaatccaaagattaaaaatctgtgtgatacgatcataaaaatctttcgaaagatgtataggtactcccatagaagatatagatttgcgtatgaagaatagggaggctagtaggaatcggacgccggatttttgggtgaaaaatcggactcccacgtcagcatgacgtcatcaagcatgcacgtatgcaaaaccattttaaactatttcatatcttaaattatttatccaaatcatgatccgattacaccattaaattcgttgcaattaaatcttaaaaacaagaccacgcatggatatattccgatagaaaacaaatcagcttattattgaattatttttaaatgttgcacgctgttccaccgagtatatcgaaattgtttcactaggtagataaaaaatgtttcaatcgtttaaattaggcgttatttcaccttatataaaagtaatgtttcagtaaatagcgaaaaaatgtttcaagtcactgcaacatttgatccatacaaagtttgatccatacaaagtgaaacattaaaagtatactaggagaaacattttggtggaacaaaaaatgaaacgaattcccttaaaaaagggtttccataatatgtgggtgatttattgcaaaagattgtttcaattcactgtaacattaaatttatacatagtaaaacattgtgaatacactaggtgaaatatttttaatggaagaaaaaatgaaatggattagggtttacaaaatatgtgggtgatttgttttaacggaatatgtggtgcggacacgtgacagcacgaaggcgcgcgtgggagagacgtggacgatacagtatgcggcgtggtggcccctggaggcagcaacccggcggctggcattctccgtccgatttttacctcgggcccgacgtccgacagaaagcattcccgaacaattattgtgtaattacccaaaaagagtaataactagactagtactccctccgttttttaatagaagacgccgttgactttttctcacatgtttaaccattcgtcttattcaaaaaatttacgtaattataatttattttgttatgagttattttatcactcatattactttaagtgtgatttatatcttatacatttgcataaaatttttgaataagacgaatggtcaaacatgtgaaaaaaagtcaatggcgtcatctattaaaaaacggaggtagtataaattaaaatgatcgaagcttaataatttatctagctataggtagtagtaagcttggatttagcgtagaaggtttcggccaggttcttgatgactaaaactgcgaacaaaagttcaggaccagcttctccaatagctccaacggcgccggcgtagacggcgagcccaccgacggcgaagccaccgacggcggcggccgccgcgatgacacggtcgatccgacggctagtctcgtcccacacgaagtatcccgttccgatcacccgcgtcctgaactccctcgccgacgagcgcgacgcctcggcccaggccatggagaggagcgtgcacgacgcgacgacgaacacgctatggatcagcagctcgtggatcaggccgggatccaccagcagcttcgacggcggcgtgacgtagtagacgaggccgcccaccgggtaggcggcgccgccgccggcgtccttccacctgccgagcaggttgacgacgaaaccgccgccgccgccgccgctgctgtggaggtggagctggtgcgagacgtacgacgcagaacgccgagacggcggaggcgtgcagcatgatgggcatcgcggaggtgtagagcagcttgattgggacgaactcgtcggtgccgcggcgcggtctggagcggtacagccgccggaggtgggtctcgtcgaggcgcacggcgaggacgaacataacgcaggtggtcatgtagttggagaggttggggaggtccaggcggagcagcgtgaagaggagcgccccggccttgtgccgccacgacggcggcgcggcggccacgcggtgggtgacggcgaacacgggcccctcgaactccgggccggcgccggcgaggcggagcttcacggggctgaacaggtgcgacaccgcgcgctcgcaggcgttggtggcgatgagcaaggaggcggcggagacgccctccacgccgtagcccgtctcgtggaggaggtcggccagcacgacgaccacgccgccggcgaagagctggagcacgacgagcgccgcgttgcccgctccgccgctcccgcacatcccaagcgccgccgcgatcccgatcaccaaccgcgacgcgttcctacgagagaccgtgacgtgtgtaaagccggagagaacgtgacgtgacgtaagcgaggcatcgagctagtaactcacaggaggccacggtggttgaggagtcggagtcgaagaggagggcggcgaggaggcgcaccaccacccacgacgtgacgacgggggcgacgccgagctccatcactgtgccgcggggcgcggcgaggaggggccgcgcccagaacagcgggtcggggtcggcgtcgccggcgccggcgtagagcgggacgtggctcagcgagagcaggagcagcagcgacgccgccgccgtgttccgcacctggccgcggaacggcaccgccgcttccctcctcctctgcatccgcggccccagcacggcaagcggccggagcagccgccacagcgccgtgccgcgagcccgtgacttctcctccgccgtgcgagccatatccgccgccgcgatggctcgccggcgatctcttctgcctcgtcgttgattcggactgttcgatcgataggccgagttgatataacatgacatccgcgcatgtgcgtaggccgagttgggctgcaattgggcccaaggaggggaataagttcaatttttgaccctcaaaagtggtcgaaatctaatccgtgaccccaaactacaaaactggatatctcgaccccctaactctcgaaatcggtacaatttgactccctgggtggttttagagcgcggtttcgctgacgtggcacctacgtaacggtgttggctcggtcttctttccacgtggcgcttacgtgacattagaaataaaaaatatttgggacccatttgtcatacacacaggaaaaatgtgggagtcactgttatgtggagcccacataatcctctcctccccgtcttcctcctcccttctctcctctccacggacgatggagtctgcgccgactcgccgccggccaccgccttggccgccgtcacagacggcatcaccaacgcccctcccccgcgggttgtcgtcggcctcccccacccctccccgcggagccgttgctagcgcacccggcggcgggcgggagggcgggcgctggagctgctgcgacgacgaccccttgtctcttgctctccttccttcttcaagcggtgtggcgacgaggagcagccgcggagcatgattcctgcggcggagatggcgatgacgcggtggaggccggtcggcctcgaggtagcgcgccgtggcggcgcacggggtgaggcaggcgtggaggacacggtggaccgggtggaggaagaggtggaacgcgtgcgggggcgcaggaggaagcgaccagcatcaattatcacgacgagctgctttgggtgtccgtccacgccgacatcggctactgcttttctgactcgcgccgcctcagcctgccataactccaatccaacatccaggtacagctcttactatacaattaaattaaatctgccattagttagtaactaagcttgataatatttgataatcagcgagatgtacagaggatcttggccatctccgagatatacagcggtgacgcctgcatgacaatcatcggtgagatgaatcaactgatatagaatttctccggtatctgcgccacagctcagagaaaggcacccgcccgccgccgccggaatcatgctccgcggctgctcctcgtcgccacaccgctcctactcgtcgtttctgtttcgccggaacatctccgccgctgacccccgtcccacggccgcagctcgccaacggaagagagaggggggagaggatgatttatgtgggccccacatatcagtgggttccacccatacttttggtgaatgacaaatgagttccacgtatatttttttatttctaatgccacctaagcgccacgtcaacgccacatgaaaagaagtccgagtcaataccaccacgtaggctatcagcgaaaccgccctccaaaaccactaagcgagttaaattgcaccggtttcgagagttagggggtcgagatatccggttttgtgatttacggttacggattagatttcgatcacttttgagggtcacgaagtgaacttattccccaaggaggacgcgaccgttggatcctattcgcagcccagctcggcgaagcaaatggattatttatttatttatttatttttattattactacaataaaaatgcccgtgcgttgcaatggatgaatgctattttaattttattattgttgtacggtttagctagaatgaaattcactttggcaattcgcctagatatttgatgaactaagtctgattttcattttaagttagcagtatttttaaagagatttttatatttccaaaagtaaacgaatttaaaatccgactcaaacacggatctgtattttaaaaagcgaacgaaattaaaaaccgactcaaatacggatgacgtacgaaaataccagcaaaaacatattcaatttttataatagtagagatagagattggattgtaatgagaaacgtaaagctattcttttgttatctgaaaagtatgtctcatattttcattgctcgttggcttattaattgcagcccaattttaaaatatgaaacttaattttagagttgtttttctcattgtaatttgtttttcaacgttggctttaaattattaagaacacgacataaaattgtactcataaattattttcgattgattatctattaattgccgcctccgcctccacgccctcggcgaagcgctccaccaccttctcctcctcctcgctgctgctcatgtcttcttcttggcattcttcctcctccagctgctgatctgtgtccatggcagagatcgccggagaagagatcgctcgacttgaggcccgcggcgtcggcgtcagcgccggctgcgaggcaggaggtggtggatcgacagacatccgcgcacgtgcgtgggccggtgataggctgagttgggctgcaactgggcccaaacaagacacgattctattcgtggccgagatcagtgagcaggacgtagcactgagaaaagtctatttgggctccctcaactatgtaccacaatcagcaaaggataatggtttaagctgagagcataatgagccggttttgataggtagaaacgcttttgttttagtttaacggtggaggaatacgaatcacattcagcaaatacttccttcagctacatatgcatcaacaatggttcagcacggcataaaccaaccaaggtaactcaatgccgattgctcaaagcatacacacatcacacaattcatagcattagcatagatagatagagatacataggtcctgaaacttgttcatccacacagcagcagaaaaaaaaaaaccagggttctaaaattttaagcttcaaacatggagagaccatacacacaggtgctagcactagctaggataaagcaagcaccatgcatgtatggacgcatatgtttaatacaatacggtggtggtattcaggtctttgttcagtttgccacaatggcacaaaagcaaaagcactagctggaagctggaaaccatggatggtggatcacatgaaggtccagttgacgagcatgaaggcgaggcagtgcggcgcgtcgtcgtcgctaagaaccttccacgccaccgcctgctcatacgatgcctgccgccccatgctcgacttgcagacgcctccagggagataggtgaaaccctgaaagaagatagacagaccccaaacaggcttgatcaggaacattgctcatggtctggtagtactctgatggatgcgtcaccgattgtcgcgaggcagggacacggtggttttacctgctgcatgatcttggggaactccgagcacagcgccttccggccctcgtcatccaggatcatctcgagcgagatgtcctggaggttgaccagcgtcgtctcaaggatgtcgaggccggcattgttggcgaaggtgaacataggagcaggctgccagtagataaccaaactgaccattagcaaggtttccagaacatgcatgtgatgaaatgagcataaaattagtgggcagcactactaaccttcagagaacagcacagtattgcgtcgctgtgcttccacaggagcgccaggggagaatcggcatcttcggtatcagaccaacggatatctgctccggtgtgagccctgaaagatccacggaaataactagtgcattaacatcattgatcacaacttcagatgtggcaatgtgtaggtggttctgatgatgaagaacctgagatagacttttgctaaaaataagtattttacttacctatagctcctaccaatccagctagcaagtgtaagcgcctcaggagaggctggagggtgcttcattccgatctggggtccaagtcgagaaggagctattgccacagccaccctctgcacggatgccatcacagctctgacataactcctagccattgccgccacgctctcacgaaggtggttctcgtatgagaattggaaagcaatggtcaggactgatctgttacatgtgccagatgcttcaactgaagcacgcgaagctccacctggtccaacctcaagggcggatgcaaggtcgagcgtgcgtgttgcagatggcccatcctgcaggtttgagtgcataacggttaattggtgagccaacatgggaaagacaaggcctctggaataagattatggaccagtcataccatttttgtatctagtggtatcacacggaatcctgagggtaaaagtggtgcatcatcagcaaaagattcgtcaataggagcaaagacaagctgtgcagatgcactagtagcattctcatcaaccccgctgcaaagctgcatagaaagcaatctctcagaaccaggaaaatgcaacaaacaggtacaacttaaggcaattgtcatgagcaaggattatgtggagaagaatcgggatgaatggggatagattggattatagtagatgaaataacaaggaatacggtcctgaacctaaacggcgcgacgctctccgtcgcactgagaaggcaggccgatgggcactaagataaatcttgatctaatgcctaattgacctgagataggatccctccttatatagatggaggactccttaatctaatcctaacaaaccttatctaatcctaacaaaccctaatcctatccaatggacctaggacgcccggcccaaagcccatgacattactcccccctttttgagcagctcgtcctcgagctgcagcacaccctgctagacttaacgaagcaccataacctaaactaagactcttaaaccttttacatctcagcttttattatgaacaaaaataaaaaataattcatgcgcaggaggacctgatccaccagaaaccctgagcagaaggttaggcccatacggtggccaagaacagcagcatgcctcccaccgaagcccacttgtccagcccaacagcaaaggaataaatagttgactcggatggtccacaatacctgtagaaggtacatatcccgtgatagaagcacctcatcatggctgaaaccatgtccttcgagcctaataacctccaagaactgcaattcagaatgccaggttgatgcattaatatttgccattcattgtggaaaaggagctacaagcctacaaggactcaattacaacattacctcttcatgctctaaggtatgagcgaggggtagtataacctgactgcccataaacccgctggtccttaagcctggaactgcatatgggctggctcgcaaagaagcagcagaataagcatcaacaccaggatcagcccattcagaacgatgctccctcagaaatcgcacaagtagagcaggaggtacattctacattataaaaaaaatgacattttgtaaagcttaattctttgatttggaacaattttggtcaaagtgaaacaaagatagagacaatctataattagctgagcaactaaatagagcctatgtcaacctgaagtagcattgatgcctttgcgcacaagatgccacctccaacagtagaaaacagagggttcgggctgacatgggatccaacaagcttgtttggagacgagtttactgaaattgtaatgtcctcactaccatcactgctcaacaaagaccacccatcatctggaaatccactaacagcatcattgaaacctctgcaaattagagtatggagttcagatgcgtgagcaatgagacatgcatggaactgtgtcatatgacagtatgccaattggttctaatacatgggaaccctcaaatagctacagacctgctgagcctttgactgaaggtcctgaaaacagcaggctggcgaccagcaccgtaggggatttcaccgcttgactcatgcgcaatttgcctaatgtgtcgcaatgcctgaacagaatgaaccatgtcattggtgat

SEQ ID NO: 22890 - DNA, 2496 bp, Oryza sativa
actcccatcttcaagtccacttgtgtagcggagagtccaaaagtcgcgtggtgccgccaaagttgtcggtgcatatgtctaaggaattgaaaagggcaatggttattaccaaaaacaaagagtagctagtgatgcttgagaaaaatgcaacacatgagtcacgattgggtatatttacctgcatgtagattagctcaatggttccgccgttacccgtagggataacatggatgatatctacgcatcggcaatcacggtaccaagaggggcgatccttgaggatctctgcaacctaaaatgaagcttatcagggtctgtagcatgccagttaatgggaaatgtaacacaatatcaaggaaaacaaatcatacctttgtgggctcaaggctcaccaggccgcaagctcgtgctgctacgccactgcaattgtgcgaaacagcgatgattccaatggaatccggaccaggctgtaatcaaattttcatttcagttgatttgaacaaaaaaaacatgaatggaaagagaaaatcaacatactgcacagttttcttgtacaacgaatacattaccttcatcccaaccatttgcacccattcgacagcagttcctgtcgccttcgacatgaactctgccaaggtctcctcagcaatagcgagaagactgcgcaaataaaatcatctcagcaatctttcatacaaaaaagcacggcctaacaaaagaagaaaatagaccaggttttgtggataccctgctgggttgttcgcatccctttgcggatgcagaactgctgggttttgctgttgatggtgctgaccacttgtcaccacagactcacagcttgtatctgtggtggctgcagaaggctacaaagtacatacaaacattactgattaagaaaacaggatgatcaaaatatgaagcaattgtaagaacaaaagcctgtaagcacagggagctcacattgtgcagttgagtccgcatgtagccgttctcgtagacgagacgggacacctgcttctgcagccggtcattttcctccatcaacagcttgttcatcgcattcagcttccggttcacagtttgcagccgggaggcctccttgcgctgcttctcccggcatctgccaattacaaggaaggcacaatttcagtggcaaaagtacatgaataaactatctaaaggatggtgtcttctaatacacaagattccaatacttgttaatggatactgattggcacagcccaaatgagcacaaaggaagttaggcaaaggcattttagcaaatattccccaaggttaaaagggggatcattgaacaggaacaagcaaaaggtcatttgcaaaagagacaaatgactatatactatgcaataacagttagtattccatatgtgaaaatcattgcctaattgacagtgatgtttctgtctgcatctgtgaactcaactctaaacaagagcatcctctacctaaaaaggattcttgatttatatttggccttcatgagtacagtaatagtatataccaaacttgctcaaaatgttgcccttcacattcttccacagtgacaccaccagtgacaaaactattgccctacttgtgatccactgaaaaaagaaagcgagatgataaccaggaggtgatgcttatggaggcctatagcaagaaaacatgaacactaccacagcccacaacacagggttaaaaagatggcccttaaaatggcaagcacaggaaacaagaaatgacctaaggcaattttgctccaaccaatcattggtcaccacaagcaacaaaacaatcagagagcatatatttacaatttaaaccaaacaaaattaactgtaaagtctgtacagagatccaggatatttggctattcacatcaccacaaaatccaagaggaaaccaacgaatgatgctgccatttcgctccctacccaccacacaacccagcagaataatgcagcgaagaacagtgtgggcacaggaactcaaatcattgccgcaaagttttataaaagaaaatatcctgataaatttcaagcaaacagattgcgcttcattattgcacaagacgaactaaaaaaacaaaacccatcatataggatgcaaatcccagaaatgaaccttctcgtcaccaatccaacacattgcaagccctaaaatcaacacccaaaaagttacagacatctacaaatcaaacagaaaaaaaaaactcatctcaagaacccaaatcttcctcacaaaggatcccccattcccacaagaacatgaaaaaaaactgcaaacaacaaagcaatcaatctcatcacattacacaaaaccaagaaaagaaaccgaagaacacacgccatggctgctgaacaaacccgagcagaaacagatcgaagagagagaaggagatgagactgacctgcgattctgaaaccagaccttgatctgcttgggctcgatgttgctgaggatggggcactcccggatgagctgctggcg

SEQ ID NO: 22891 - DNA, 6252 bp, Oryza sativa
  unsure (1)..(6252): unsure at all n locations
ttgcaaaaagaaaaggttgtttttttagttctttttttttcttcagacttggcaaggtacagcaaatctcttttctgaaatgatagtactactttttttcagaattggctatagcaagtttgaactgactgagtaatttgcaggattttgcattaatcttgaacagatcacttctgcacttctaatgcgcatgcacactctcttttttaggtttaaaacagggatgagctgtccaaaactgaaaggttttttgggggtaagtggcagctttgaacagtgtaaagctgtctctctctcgagagagagagagattctactgtaggcgtggaggcaatgcaagattagttttttatttctctgaaatgtactgctgcttttgagaactctgtgaggttattttttttttttagttttcgattgaagcatggtttctattctttccaagtgtttgtgtgtgtggctttttctgttataaaaactattttcagtgctggatatactcctacatgaactgtctctgaaaatacagcggtgcagctggcctgccacctgctcagctcagctcctctgtactcgtgtggttgaaaagtttatcgccatttcaaactaaacttaattatcttggtttgcaaaaattccggactaataaagcttgagagataactgaaaaagagagatctacacaatcttcagtcattttctccctcagtaaatgaacaagatgtcggtggtaaaatatttgaatattagtagtaggatatatttgaatattagtagtagaatagtgtatgaaactctgtgtacactccagtgtcaccccatcgtccacgatcgattatactctggatacagtccagtgtcaccctagaggctggagaagatagtactttatccgtttcacaatataaatcattctaacatttctcacatctagattcattaacatcaatataaatgtaaaaaatattagaataacttacattgtgaaacgaagagagtaatacttattagcgtttaggataaagcaattttttaaaatttctctagaactttgacatagcgttcttagcatcttaaaaaccaatgctaaaaataaactaccatgatgaactctaaaattaagttaaattttaattttgttatggttgataagatgaagagcaaacgatgaagcaatctgtttgcagataataaataatatttaacctttttatgtctgaattatttaaaattaagccttggctgcagataataaagccaactaagacaacatttttgcacaatggctcattgaagatgaagaggcaaaccacactagctaagtcctccatgtcaaaataaatcgaacaatcttaaaataaagcaaaaggctgatatgatatatatcatatttcgtatcaggccttgtgtagtttctattttttttcccagaaacatcataacgaatctttggatacatgcataaagcattaaatatagataaaaagaaaaactaattgcacagtttgcatagaaatcacgagacgaatcttttgagcctaattagtcttataattagctataagtgctacagtaaaaacaacgtatgctaatgacggattaattaggcttaataaattcgtctcgtggtttacaggcgagttatgaaattagttttttattcatatccgaaaaccccttccgatatccggtcaaatatcggatgtgacaccaaaaaattttcttttcaccaaataaacatggactgaatttatttcgaatcggaggtagtacgaaaaatcaaatgatgcggtagcttgcatcaccgatcgctcaagctcaactttagtccatgtcactgttcctgtgcagncttgcaaatccaaacagtctctctctctctctctcactgtgcctcacctcaccagctcacctagatcttctgagttctgtctgatacaccgcaatgagtagcagcagcagcaggagtatactccaagtcgatagcatcacaagccaagctgccaaacacaagcatccaaacattacaatcagatatactcctcctactactggtacgtactagtagtagaagtaacattgcaatatcattttctttcagggtctcttgatttgtaggaaaaatatataaattttgaatgatttaggaaaagaaaatcctatgaaagcatttgaaacaaatgattgaatcatatccaatcctttaaaattcctatagaatgggtaatcctatgcacattttgaaggaaaattagcaagagatctaacctcttggaacatttcctctgagtctatctctctcatctgatttctgcgtttttcctgtgatccaatcaaacgattattcctgtgttttgcaatcctctgttttacaattgtattcctgtcagaatcctgtgttttttctattcctcttttttttattcctacgatttaaaggggcccttacaaatgaaatatgcttcgtacataaaatcagaaatttgaagtttgtccaacacattataatgtacatctgcaaatactcatcgctacggctatttcattgtcatgacatggttttccaccggtaggagcggtcgaccacaaggctaataacaaatatgtagatgatgctacacatgagccgtagcgtccgaaataagcagacgggattgtagtttacttcctataaagaaattctatcgtaaatcaatgaaccttatattttccctcctaatatcaatcaaataaggtggaaattaactcctaaaatccctggtgatcagtccaaaaaacaacgctttcaacttgtgacctttttgccaaaaaaaaacatttatcagaatgtgttgctacattctaagggtctgttggcatgcccttgttctcagccccctctcccttgttttccgcgcgcacgcttttcaaactgtaaacaatatgttttttacaaaaagtttctacacgaaagttgcttaaaaaaatctaattaatccattttaaaaaaaatagttaatacttaattaataacgcgctaatggatcgctctgtttttcgtgcgaagggaatgagttcccatccacaacatacaaacacagcctaatttgacaaactatcaagcttccattcatcgcaaaagtaaacaatgtcgaatatttgcaaaaggtttaagtctttgggatgtgaagctgttgctgctgctgccgagcagccacagaagatccggagaacagtgacagtggcagcagtgcgcgtgcgccgtacggtcgaagagagacgggctacgtggaccgggcaatcgggcattgaccgatcgtgagccgcaggatcagcgtggccgttagggatggacggttcagatccgccctggtgtggggattaattaatatgataataataactgggacgcgattcgtcctccccgacggcggatctcggccgggatctcctctgtcgctttcctcttttcttcctttccccactactccccctgttaataatacttgttatcgttctgaataacgatacgttctttaaaaaataactttaaccattattttctattataataaatatataatattaacaaatatatgattttactaaagtatttttaagactaatctatacatgtagtcacaatatttaaaagataaatattttaaaaacgattcacaatcaaagattctaaagtttaacatcactcttatctaagacgacaagtattattagttaggagggagtagtatttttttttctcaagtaggagtaatgttatagtatgtactatccaattttataacccatatataattagagatatgtactaaaccataaatcaattaaagaagaatatgtcatatgcactgcaaccgtttacaaacgttgatcaaattcaattctacgtgagttggatagttaggtcgtatgcatagtaaatttcttttttttcttttctttcttgctccatgagtagcccagtgaaagaaatcattttcatatttttaaaagtgttaggtaataagatatttaatatgaaaatgatttttcataggtacttgaatatgaatatgaaaatttttgaaaatgtcatcttttctttcttgtttcattttttttgtttcataggtagtacatgtaagagataaattgtaagaaaacaatgttaacatggtttcataaaaaaatactggtatgacactttattatttttttatcacatcatcaaaaatactttcatgtcacctaaatacaacttcattttagttctccattaaaaagaccaacataacttggctctttgtctctattctctccctgactccctctttaatccatttaagctctctttgatttataaataaggcgtatgaaatttggagtatttaatattgcaaggaaattttgtatgaaatactttgaaacagatgattgatagtactatgaatttcaaagttgaacatgaagaaataaaacaaaataaaaagtagcagcggcgaaatactggtacagtggcagtgcactgtgcagcatatgagagacagtattacagcactgtatccatgtcgtctctgcttttgcattgcactgcatctgtctgttgacgtgacattcaactgcacactccgccgtatcatttcgggtatacgagaactgttactgtgggctcatccatcctgattcgcggtttgattcgtactccctctgtaaaaaaacaaaacctgcgtttttccgtgtccaaacgtttgaacgtccgtcttatatgaaattttttataattagtattttatacgtgattaatactttatgcgtgacttgtcttttttttatatttttttttcaaataagatggacggtcaaactttagacacgaaagtctagggtttgtcttttttttttacggagggagtacgactgtactccatgtacataatgaaaagtatatatcacatgtaactataattaagaattttgttaggttttactcttagcaaaatttctactcataattaaatctaagattattaagagtgctcttaacaaatcttagaaatctaaattttttaatcctttgatagattttaagtttacaagtgtatgtcctctatactacatttcattttatatactccaccaaaccgttttagatgggattaccatcacctcacggtttgacggtaagcggttaccaaaaaaaacgtatgggtaccacgagatatgatatggttctaaaaattgaaaatattactgcacgtggtaaccgtatgataatcgtacggttttgtcaacctactatgtatatgcattgtagtgctccacctatatatagcccgtgagccctgattaatctacactcacgagtaatcaacagcatcatttttattctgcatattactattgtactatacaaaagaacttcagatcagatcgcagattaattgatggataatacgttttctcggttgaaaagtttatgttttgctcgggctcaggacttcaaccaaacacagatctcataggcttgcctggttaggcataaatcatcgaattctcaggcttgcatttttctcagacattactcagggcgccaatcaaacatgtcgtaggatataatggtagttaatattcgttctttttgctaatgaatgtttggatttgttgtgccatacatgcgtatgattttctcaatagtctatagaattgtattaattaactttatattctactccctctatcttttttttaagatgttcaactaaccagcgtcaaaaaaacaacaacatggagtataatatttagtaaattcatgtattaatttatcagctgataagtataatcaaacgggacctcatgtagcaaggtcccgtttgatatagctgacattgatggataatctgattttgtgttagctagtaatattaatctggggatatgcacaaatgagtaggaaagttgctttagaaaaaacattcggagaaaaattagcatagaaatttttttgcatgaaacatgtggcttatgcacccaatttagttctcctttagttctcctatatgaagtgtccctagctctccatgtaggagccgatccccttttcgagtcgggaccatggccttacgagggagcgcatcgctctatggggtccccttgtgcctcggctccacacattgggcgagccatgcctctaccttgtggtagtccatgtacaggaaggaatatcacagggagcatcaatattcagttattgctcctctccatgaactgaagtca

SEQ ID NO: 22892 - DNA, 7218 bp, Oryza sativa
ttctgttaaaaaaagtttatttttcacccatacatcctatacataacagtaaaaaatcataatacttccactttatcaatcataatacaattaatcctcgttttatttacttccattgcattcatcatctacttttttaaatctgatattaataattatttaaaaatagatttactttaaaataaacggacgaagttaaaacttaacttagagcttgtttgggggagtttccaacaaccgaagattcttctaaaacctaccgttgccagaaactcccccaaacagtccagattttcacacagtttttaagaaactcctccaaacagcccagattttcacagcggttttaagaggttgtttctcaaaaaaaattaagctttccaaacagcatcttattttaaaattgaggaaatactcctatatactgtacggtactcgagagatgctccatgtcagtactgtacagtacttactgtacagtacttgtttaggccgtgtttagtttcaaagtttttcttcgaacttttaacttttctatcacatcaaaacttttttacacatataaacttccaacttttccgtcatatcgttccaatttcaactaaacttttaattttggcgtgaactaaacacagccttagttcacaccgaaattagaagtttggttgaaattggaacgatgtgacgaaaaagttgaaagtttatgtgtgtatgaaaattttgatgtgacggaaaaattggaagtttgaagaaaaattttagaactaaacactgcgtaactactactacttacatgcaaggcaaggcaaaggcagcagagttaagcctgcacagtaacgtactcacaagtagcaacagatatgttgaccaccacccatagccatagccatagctaagctgcatgcgcgcgtgagccaatctgtttcaggctggagacacgacgacgacgacgacgaagagctcgatcactgccatagccatggctggctcatgcagctactactccgatgcagacgtatagataggttggagtagataggatagcatgatagcagtgagccatggctgctctgatctgaatcttctgttgttcgcagctgcttttgtgcctgcgtcgttgtaacttccatcccttttgcccccccttctgctgctgtctgaattctgatcgatgccatcaatatatgcttctgtctcgtgatcgattcatccttgtgtacacattgaatggctggcctgatcgaggacgatcgacgcattcatatgcatagcccgctgctgcagggccattccagtatgctatactcatcggtcaattgctggtatagcatgcagctgcatatacactgctcgacagattaagtcctgtttggatcattgaagggtgtgtttagttcacgccaaaattaaaagtttgattaaaattgaaacaatgtgacggaaaaattagaagtttgtgtgtgtaggaaagttttgatgtgatgaaaaagttagaagtttgaagaaaaaatttggaactaaactcggccgaattatactactccccttatattaaaatagtacccctccattctaaactatagtaatatgaaaggtattagtaagacataagctagtacaataaattaatttaaaattctgaacaaaagttgcaataggttaccagtatattctaggacagaggaaagtacatgaaactggtaactctattcggttgaacttttgaaactttaacatcagtatatctaaatcagaagtcataagtacttgtaaaatattatagaatattagtacttaaatagaccaaatagttttgttatatattatcgttatatgcgaataggaaaatagtgatcgaagttgcacaccatagaccaaatgaagtgagcagcattattatatatttaaatacggagatagtaatacaaagtactgtaatttttttgggtaatgttacgaggtactcctatacgacatgcataaaaagtgtgacaaagttttttgctgcattagaagcctgtcaggacggggctagctgtttggatgtagagctagcaagcaataatccctgcatgttggtctcattacatcataattaggctatgcttaagcgtgcagtagcaatgcacggcctgtgccctagcacttaattgatcttttccgtagcttaatttttacagtgctgctcctgcttagctgaacatgcatcaacagacagaaagacagacagatctcactctacacatctctagacaacatcaacctaaatttcactccatgcttggtaatctaattaactgttggtctctctccactatgatactgacagtaaccagtgattagcagtaagtaagggcgtgttttgttctttgccaaactcaaccataccaaaattttgtcaatagcaaaggtttagccactgccaaaaaattgataaggttgatcatttgatttctaatttcttgccaaaatttttgaaatgtgtgtgctttacttggttttggttgctaaatttttggcaaagcctgttttggcaacaaagcaaatggaaccatcattcattgtcattacctttttttttttgacatggttgaattggacaatgaaccagaatccaaattctaaaattgaattttccatttgctcttcagcttatccgccacagccaaaatttaaatttcaaaacttaattttagatttgattctgatgtttcttgctcaacgtagtttatttatattactgcctttttaagtcgctaatagttgtttcggtttataatcggctataggcaagtttggggagtttctagcagatgcggtttcttccagaatcaaaagctgcctaaaatagttcggttttttattcatattccgagaagctagacttacataatttcaaaaaataaactacaagtcaggagttatgctttcttcttcagatttctaaagccggctacctatcacccgcttcttaaaatcgtaaagttcaccaaacagaatccatggtagcctgaagaatgaaaagagagtgaagagaggatgatgatgctacaggcaatgcttggataattggactccctttggcattttatagcattagcgttgggaggagtggtgaggtagcaccaccatgtgtcgtgctcgctgctgatgctgataccagggttcgccataccgccgttatccgcgcggttactgcggttaccgggcttatcgcagggatacggtaatgtaaataccgcggtaacctccttaaatttaaataaatttaaaaaataatttaaatttttgatgaattttgcacggttttgtacggtttttcacagttaccgcggttaccacgcggtaaccgtgcttaccgcaggggcgcggtaaccccggctccggcggtttgggaaactctagctgatactgctgctagcttaagctagtagtactagctgtagctggaatcgatcagtagcagcaagcagcatgtagtagaggcgcatcgagaggcgagagggtccagatgcagatgagatgaggttttggagcagaggtgtgtgcgtcgggcgggcgggggtcaggctttgctacagcctcaggcgacaggtcgcagcgcacgccgcatctcccccctccacgtcccatccatcgcccaccatccacttcttcttcctctcatcagtttttgtttccactttgcatatttctgcagctcggatcttgcaaaagagattcataccacgggtatgtttagttcacggtaaaattgaaaatttgattgaaattgaaacgatgtgacggaaaagttagaagtttgtgtgtgtaggaaagttttgatgtgatgaaaaagttgggagtttgaagaaaaagtttggaactaaactcggcccatttcttgtagtactacctaataatctactctcagcagaagtatagagtagtagttactaccttgttaagataattcattctcatcagaagtttcagcaggattttttactgcaagttcagtttcagcagaaaattttagttcagtttcataagggcaacaccaatgtatcttgtttaactaggtaataagtagcagggctaagtagtaggtctttggaaagtgggtcccatgaggaaaaaaatactgctttttagttgctttttgtccaactcagcatgcagtagtagcacatcttgtgttggaaggagagagtgagagagattttaatgtttttttattcttatgagtgggtcataagcttactacctagcattagttactacccacttccacaatgcttattactagatcatagaaatattatattgcttaatacctgctttttcctaacattgtggatgccctaagaagatttcagctcagtatcagcagaaatttgtaactcagtttcagaacacattttagttcagttaaggtttcaacacaagtttctagttcagtttcactacaaattcttagttcagtttcagtacaaatttttagtacaattttagcagaaatttttagttcagtctcagaaaaaagtttagttcagcttcaacagaaaatttttggttcagtttcagagcaaatttcgggaaataaatcctgcatttgaaacggtgcctttgctgcatatgatcttgttgttgatggtgtcagcgagaggggctgtgaatgcccgtatggatggattatccagagttcagagagagagagagagagagagagagatagtgtttgctggtggtatgcgacgatatggtttcagacttttgatccctttattcttgtggactgtggtgtggtgcaaatgtgcaatacttcagaatgtcagaatgggcatgctcaggaccacttggcaagaggaatatttgcatactttcttgtggggttgcctcccttcatgctcctcccagtcattttctgtttctgttttactatccattttttctttgttttactcacatcctgctcttgtttgtgcacaatttattcagttacaaacttacaatctaggtagcattcagcaacaaagcatacttcttatattgatgcgtagctttcctacgtgttcgagaaaaaaaaaacaaaccatccaaacttctcaaattgttatagcgttgagtgagatgatgttcttctggtcttcctatcaaaatccagtgtgcattgcaaatgagactagaatacataaagttgtacaaattccaagatgaaatggtgagagaaaaaaaaacaagctttttattagagcctcaagtgccaaatgggggtaattagtggggtgcttcttgggatatgatagtttttaatccacacattgcagttgtcagtggagcacccagcctactgccctggtgttaggggcaaggcaatggcatgcatgatacatgagtgagtttagtgagataatgttcatcgggagagattaaataaagagattagtatacattagcaccttcctattgggctttgctggtgtgccttgcatccaaagtgatgccactatctccacaaatgcaggctttaccccatgatcaccaaatatgcttatgggaaaaggaattaaaggagaagattttggccagttgaatgagtttaattgcactgtttattctttcagtgttggaatgaaatgtgaggtcaaaattgttctggtgatgtattcagtagtagaagatttttactctgaaattgaccgttgtcctgaagataaatgactgtgaacagtaaattttttacacttctgtaataactgttgctgacttgctgtacctgtacatcattaacctgtctaaaattttttcaaatctttacacaagcagaacaattgatgctccgtggccgtaaaattgtctctcttgtctgattcctgcaatctttggacattcaatccagatctgaaattcttgctgtttctacacaaacaaggagtatactattatgcagttgccagtggatttcaccatcttaaaattgtttgcatttacatcagcacaatagacagaaacatttctatgctgtactacaaagatgacaagatctagcattgcatcaagaagtatctaggaagaacagaaaacaggaaactgttcttagatcttctcctcatcaggtttcctcactgaagaaacttgcaatgctcatctctgcaaaaggttgatgcatatgcattgaaacagctctccaaaatgctacaagcattatctatattgaccaaagatctgttctttgcatctgtacctcacagaagagattgcttggaacataaaaagagctaagggtgaaataatttccatggaaagtgtcatgctcttgttgcttcagaatggcaggcaagggtggtaaaagctgatgggtgcaagatcctgcatttaagcacctgggtgcagttaatggcattactcatgagattgtgtagatggatgtgaggcagttcaagtgcctctgctgggtttgaaatggcatggcaagcttctggctgacagagtgacagagtgcattcaattggttgtcattgctgcatatactcctctctctacatgcagggtactaggggttgaaaatgtgcaattttttatagactttgagatgatgctaacaaaacagtaacacctgatgttttttggggttttaggatagattcatgatcaaagagttgcaggctattcattgacttgagtttcaactggttaaccaccaattggcatgtgtagtcccattcagagatatcactgtctttttattatttttgagaactcattgagttgcttttgggtggtcagctttttcttagagggtaacaaaaaggagggactactggctggctgagtgagtggcatgaaaataagagaaaaaaaagaaaggcaaagcatgcactcctgcaccttgctactacattacaaacatagcctttcaaatccagagcaaaagcagtttgtcaagatcatgcagtcagccaaatggacatcacatttcttcagtgtttgttgatcacacacagatctaagctagtgatggagtactatcaacagccttaacccctaaaaaccctagcaggacccctactttgtcctgaaagccactttcttggcatgaagagagtgaggcaccaaccttcactttccaataaatttctttctcctctctttcactctcatcttccatctctttttcattttttctcttccatgggtgacaagtgaggatgttggccacccatctcccttcactcc

SEQ ID NO: 22893 - DNA, 687 bp, Oryza sativa
agaaagacaccgccttttcagcgtcggagtccatcaagcccccggcgagcacggttggcggctcggggatggagctgcgatacgcgaacatgatcgtgtgcgccgagatgctgctcaggcaactttggccaacgatccacagcaacgaggtggacgccgggatggatctctcgaagagagacgagctgtacaagatgctgcctgtgaccatccgcacggccgtgaaggcgaagctgagagagagctggagagggcagccagtggacgaggctgcggcggcggcgtcgatggacgcggtggacaggatgctgcggtggttggggcctatggcgcacgacacggtgcggtggcacgacgagcatagcatggagcgggcgcagcggttcagcatgcggccgcgcgtgctgatggtgcagacgctgcacttcgccgaccggcacaaggcagagaatgtcatcgtcgaggtgctcatcgggctcagctgcgtttgctggtacgacgatgagcgacgccgtccggccgattgggacgacgacgactagactgttgggtctggcgctctactgcccggtatattggcatggtatataagcataaagcatttgtatccaccattatggatacaccgcaggacaattttttttgttatgatttgaagagtgacctgtaaacagctagctaaatgtt

SEQ ID NO: 22894 - DNA, 639 bp, Oryza sativa
aaacattgtctaactttttgttaaccacacacttttatgcttatttgttgttacatcaagttcactgtaagtgttgtttccatggttaagaattagctagtaatattctttgtctatacagatcataaaaagtggagaaaagttaaattgcttttgaaattatagccttcacacagattagcacgctatttcttaactcttattcattactgaagttgactttagtatcttcataaaaatcaaactggatgacttttatttctgtttcttgcaacaactaataattttagatgttctaatacatgtctctctacatttaacagcagagtagatgggctggctgtttttctgccttgtcatgttttggatcacagaagggtggaaaacgaatagttcctgcagcacgtatacctgatggcaatgcgtcaactagtcgtggaaatgcacaccaatctggtagcaattccaaccaaaatgtggctctgaatttatctcttcttgctccaccatcttctccggcgtccttctcaaattctgcaattccttcaactgcccagtcacctaatcgcttcttgtcaatatctgcaaactctcctggtgggccaacatctaatatgttcgctgttgggccgtatgcta

SEQ ID NO: 22895 - DNA, 3701 bp, Oryza sativa
tgcttgcctggggagtccaaaattttaatcactggtcaactcgccgatcagtgatcaaaatcccctaacaatctaacaagtgatggtcatgtggcagatggtgatcaacctgtacgggtgcaacatgaacaggaaggagtgggagtcgccggaggagtgggtgccggagaggttcgccggcgggaggctcgaggtggcggacatgtacaagacgatggcgttcggcgccgggaggagggcctgcgcggggagcctgcaggcgactcacatcgcgtgcgccgccgtcgcgcgcttcgtgcaggagttcgggtggaggctgagggagggtgacgaggagaaggtggacaccgtgcagctcaccgcctacaagctccacccgcttcatgtccacctcacgcgcagaggaaggatgtgaaccattatattcattggaagctgttgctcgttgaataatgatatatagttatctttgagatgtatttactattagcaaaatctccatgctttgttatggataggagaaaacatattataatatatcatggactatatttcttttatcaaatatggttgtatataacttgttacttgtttacttattctttgttatggataggagaaaacatatattataatatatcgtagactattaattttttatcaaatatggtagtataacttgttacttgtttacttattcaaatatatggtatttatttatgtgaactattcaatagtagcagaaaatatcagggtgccactgtagccttttaaaagagtgcaggcaaagaaccttacaatgttagcagtgaatctttcttgaggtaaacctcaaaagagcacccaatacgacaaatcaaccgtttcaaggctgagatattataatttgaccgacatccacatatatttcaaaccaatttcactaaaacaatcatttataaagccaattgttcattacaaaatattaatcatgacaatgatttcacagttacttatatttttctatatatatacttactttctctaatcgtacggttaagagttacttcgatttctttacggtgttatctaatcctatgaaaaattacttctattttttagttcctctagcagtgtacttgcttctaatgccataaagaattacttctatcttttaaaaagttactttcccctaactatgtaattacttttaataccatgaagagatattaaccactctaaatgccgtgggagcgctgagattttagagcgccatgtcagcgattttttttcatagaagtccccgtacttctggttaattatacattgatcccagttgctatccaccgtgaaccgtttgatctctctctagggttgatcccttgtggtggctcttccgcatgcgtgaaattaatcgttggatgcggaatggatggtgccgatttcgccgactgcatcaaaccctagccccgtcgcccccacccttgcatgagccctcgccctcgccctcaccctccaccctcggtgcatcaccacgctctcctcccctcgcatgtgccatagttgtcgctgccgccgcagtttcgcactcctccaaccatcgttgcggcgccaggcgccgtcctcctcgccggcgtatccggccacccagatgagatggatgcgagtcgctgccctcttcttccctttcatctctacgccgccacaggccatcgcttccctatccctcgccctctccactctgctcggcgaggtgttcatcagagtgtcacggttgtgccattgccggacatcacagtggcgacaaaggaaggagaacaggggaaagcgtaaagtgagaagacgtgtcttcgccaagaaagcgtattgtgtaaagagagtggtaggtgtgtgtgaatgccaagtagggcacaggagacagctgtgtgagtggaggataaaatcccctcgttgttgtactgatacgattacgaaatgagaaatgaaaaagaatctcacctcccccaagttctgtctcttcttctcgcctaagtcttcttcttcttcttccccatgctagttcgccgtgtccctcaactccggtgagctttgccgccgcggattgggttgtgacaagttggtatcagtcgctttgttcggtctcggggctgtctctcacattctctcggctcgatcagtaaatcctgtggctccgttcgtggtcttccttcgggttgtcgccgcggtaaatcatagtttggtttgattgggtttggaggagacgacgccacggcaccagcaaaacctagtgcgcaggttcggcacatggtggcggcgatggaatctatggaggagcgtttgatggatactctcaaggcactagcactcaaggtggatggtgtggaggacatctccaagcgtttgacgcagatcgacctcaagctggcgcagcaaggcgagtggctagatcgggtgcagacgaaagtggatctctccatgacgtccctcggccaggttcagcaagaacagagtcaggtggcgcgtgcactgaaggcggccgcggcaccaccaacaccaccactgccgccccctccgccgcctccgcgtcctccaccactgcttccatctccggagtagccgttgggagcatcttcatcttcatcaacaccaccaccaacaccaccgcctccaccacctgttcatcggtctcgtcaggtaccaggtcatcaaactgctcctgatgtttctgattttggggatttggggcgacgccagtggactccgaagatggattttcctaaatttgatggtactggtgtccgcgtgtggattgataattgtgaaacgtattttgccttttatcaaattgcggaggggtttatggtgtcagctgctgctctgcatctagtgggggatgctgctaattggtaccaggtgtggaagttagaagtgggttggcatgattggaccatgttaaaaatggctatcgctggagaatttgaggttaatctcaggagtcttaagatggatgaactgattttgttgacacagacggcacagtaactgaatatcgttccaagttcaatcagttggtgtatcagattaggctctatgatccttctctgtctggttcggggctaattaatcattttgtgttgggattgaaagatgagttgcgttcttttgtctaagcggtgcatccaacttctattactcaagcatatttggtggctttggctcatgagggggcacagcttggtaatgtgggcaagagacattttcagaagagagatcctgttgtttggaaacaacctgaaaagcctaagttagccactggggagttatggaaagcacagcaactcaaggaatatcgtcgagctcacgacctttgtttcaagtgtggggataagtatgtgcctggacatgtgtgtgtgaaaccagataatgctcagctaaaggccatggaagttcaggaggatcaggtgattttgtctgatgataatttggatgctgtggtggcatctgacatggtggaagatgattgcaatttatctttgcatgccatggctggtacatgttctgcttctactttacagttgcgagcaatggtgggcaatcaagttattctgattttggtggattcaggtagttcacacaactttgtgaccgctgatttgtgtactaggttacagctgcatcctgtgtcaactgtgccaatttctgttaaagtggctaatggggag

SEQ ID NO: 22896 - DNA, 2171 bp, Oryza sativa
actgaggcatctgttcatcaggtggttaagtggactcaaggcaattatatttgggctatggcagtacttgaaccagatttctctaagggctccccacctgttgaactagctgttcagtcagtattggataagttttcttccgtctttactgctaccaattctttgcctcctcatcgtgtgttggaccactctattgctttgattccaaattcggtccctgttaattccagaccttataggtattctccaacacaaaaagatgagattgaaaagcaagttttggagatgttgaatgctggtttgattactcctagttgcagtccatttgcttcacctgttttgttagttaagaagcaggataattcttggaggttttgtgttgattatcggcggctgaattctttaactattaaaaataagtttcctctgccaatagttgatgagctattgaatgaattggctggcaccaagtttttctctaaactggaccttcgcagtggatatcatcaaataaggatgttagaaactgatgaatttaagactgcattcaaaactcatcatgcccattttcagtttcgggtgatgccatttgggctcactaatgctccagctacttttcagtgtttaatgaattctattttcgctccattccttcgtaaatttgtattggtattcatggatgacatcttgatctatagtaggagtttggaggataacattcaccatatagagttagtgttacaattgctgcagcaacatcaattgtgtgctaagctttctaaatgttcttttcctcaaaataagttggaatcttggggcatatcatttctgctgagggtgtggctactgatccagaaaaaactagggttatgcaggattggccacttcctagcaatgtcactgaattaaggggctttttggggttaactggttattataggaagtttgtcaaacattatggcatcctggcaaaacctttaaccatgttactccaaaagaatgctaagtttgtatggacacctcaagctcagtcagcatttgttgctcttaaagaagctatgtgttctacacctgttttagcccttcctgactttgctaagccttttgtgattgagactgatgcttgtgccacaggaattggtgttgtgttgtctcaagaaggacatcctgtggcattttatagcaaggcattgggaattgtgaatcagcggctgtctatatatgaaaaagaatttttggctataatgatggcagttgatcgttggagatcttatttacttcggggtccttttgttatcaagactgatcacaaggctctttgtcatttagatgatcagactttggacactgagttacagaaaaaggcgatgactaagcttattggattacagtacaagttccagtataaaaaaggagttgagaacaaatctgctgatgcactatccaaagtagggcatttttttgggatttctgtggttcaatctgtttgggtttaggagattctcaactcctatgctgtagattcatctgctcagcagttactttgtgagctagctgtctcttctccaaatgctaagggtttttctttgtctaatggtttaatcaggaaggctggtaaaatctaggtgggtgcaaattctgctttatagactaagttgattgctgccttccatgcatctgctattgggggtcacactggtgtgctagtcagttatcagagagtaaagaagctgtttgcttgggttggtttgaaaaaggctgtggaagaatttgtccaacaatgtttgatctgtcaacaagcaaagcatgagcattgctcttatcctggtctcttataacccttggtgattccctctgcagcttggcaagatgtttctatggactttatagaaggattacctctgtcaaaaggtgctaatgctaatctttgtggtggctgcatagatatacaaagtttgcacactttttgcctctcaggcatcccttttcacccttgcaagctggctaaggtctatctgaacaactgctggcatcattatatgggtttgcctaaatctattgtctcacatccgtgataaagtctttactagcaacttttggcagactttgttcaagcgctttgagattcctttacatctgtccacaacctatcacccacaatccgatggaca

SEQ ID NO: 22897 - DNA, 1607 bp, Oryza sativa
caatcagcgactacggtgactaccaaaagatggcgaagcgtaatattatgattggcatgttaggttttaatgcacaggtacaaatctcagcaaaatttaaattcaatagtggattttgggtaccattagcactcagttaattgagctctaacaatgaaatgcttgcataaatttcagaaacagtttcgcggtacaagagagaggatgatcagtaacgtgttaagcactttgcataagttggtttctcttgacccacattcccctctgaacttcagggatgtttacattaatgagctgttcagcttgtccttgatccaggtttgtattacctctgaacttgaactctccagtggtccgtttgttacttccaatacctgtcatgattgttatgaacttataattgttgcaatttcgtagttactaggactgatcttgattgttatgaacttatatatatttgttacaatttcagagtttaggtgaggatgtgagttcagtttatgtggaagagtttgggagggagatatccaaggacgaaatctttgatgtccttgtgcatgagatgatgatgtgtgcagttgaggctgactggagggactacttcccctacctcagctggcttccaaacaagagcttcgacacaattgtgtctactacagaattcagacgagatgctatcatgaatgcattgatcaagaagcagaaggagaggattgcacgcggagaggtgacacaaaacttctattcgtatccaaaaataactttttttttctgcagatcatctgaactgaactgtaacgtattgcatgcaggcaagggcatcctacattgacttcttgctggaagctgagaggagtgcacagctgacagatgaccaactgatgctgctgctgtcggagtccatcctggctgcagctgatactgtcctggtgaccaccgaatggaccatgtatgagattgccaagaaccctgacaaacaggcaagaaattaactgatactacctccagttttattttttggtttcggacaacacatgttttagcatgttttctttgtaacttgtcgtaaacgtcaattaattttgtccggagggagtactttcaattatcttttgtatatactctttcttgtattgtattgtgatcctctgacataactttctcttgatatggtcattgacatgtcagcgatcatgtctctataactttacgagaaagaaagtcagaggatctcaatccctctttctttcaaatgcatttcagcattttgttgccaaccaaactaataaacaattgattgtttcttgttcttggcacatcgatcaggagctactctaccaagagatccgagaggcgtgcggcggcgaggcggtgaccgaggacgacttgccgcggctgccgtacctcaacgccgtgttccacgagacgctgcggctgcactccccggtgccggtgctgcccccgaggttcgtccacgacgacaccacgctcgccggctacgacatcgcggcgggcacccagatgatgatcaacgtgtacgcgtgccacatggacgagaaggtgtgggagtcgccgggggagtggtcgccggagaggcttcctcggcg

SEQ ID NO: 22898 - DNA, 1242 bp, Oryza sativa
tgatagaaaatttcctagtattaggatagaggaaatgtcatatccgattctaggcttctatattttaggacagagggagtattggatttcaacgggatgtgccaaggcaggtttgaaacaaggatatagaagaaaagtgtagcttaatcttgtgttatttttattcaaagcttgttttcttatggtccactgtggatatagaggtcagatttctatcaattatcttaaaaataacgcccaaaattttcagaattttccaaagttttgtgaatttggtcaaaattttatacaaattcggttaaaaactcaaataatttcgtgcaaaacaagtaccgaaaacacgaaagtttcggcccgagtggttgtgcttacctcggtgccggcggggacgtcgtagccagcgagcttggtgtcctcgtggacgaacctcggaggtatgagcgggacaggggagtggcggcgcagcgtctcgtggaagacggcgttgaggtacggcagccgtgggaggtgctcctcggtgaccgtctcgtcgccgcacacctcccggatctcttggtaaagccgttcctggcatgacaacaagaagaaggccaaaaataaaaagctttggttgataatgccaagaatgccaacaatgagctggaacagagtaacaatatttcttgcctgtttgtcagggttcttggcaagctcatacatggcccattctgtggtgaccaaggtagtatctgcagcctctatgagtgcctcccacactagcatcatcagttgctcatctgtcagtgtgttctctgccagcaagaagtccagatagcatgtctttgcctgcacatatatctcagtttcatggagttaaaagatgatctctgcaagtttttttttttttttggcatagaagcaaatatgaaagatgtcatttgtcaaagtatgcctttcctcacctctccacgcacaatcctttccttctgctgcttgatcaaggcgcgcatcaccgcagttcgtctagtttctgtagtaaacactcttgtttcgaagctcttgtttggaacccagctgaggtaggggaagaaatctctccagtcgacctcaattgcgcacatcatcatgtcggtcacagtagcattgtagatttcttccttcgaaatgtccctcccaaattcatccacatagactgaactcacatcctctcctaagctctgaagtttgcgacattaattgttagtgccagaaataacaaatcga

SEQ ID NO: 22899 - DNA, 1197 bp, Oryza sativa
tttcgcggaatggttatacgagatcgacggtatatttcttctaataaatttacattctgaatatttttgagaaaccaacgaatgaacagtgtatttttaaatttaattcttctctctgaccatctggtcttcattttagtaatgccgctaattaagcatatacttagcactccatgtagagcttgtttagatccctggcaaattttttcatcctgttacatcgaatgttggaaacatacatggagtattaaatataaacggaaaaaactaattacacagattgcatctaaattgcgagacgaatcttttaggcctaattgctccatgatttgatagtgtgttgctacagtaaatatttgctaataatagattaattaggcttaataaatttgtctagtaggttacggattaattaggcttaattcgtctcgcaatttaaccatttttaaattatttgagcccacggtttttattatttttccgagatataattgctacgtaagcgccacgtcaataccacgtgggacgaagacctagtcaaaccagccatgtagttggcacgtcagttaaaaccgccttctaaatcgtcaagggatcttgtttgtgccggttttgacagttcagggacctgttatatctagttttggggtttaaggacgaaaatcggattcggtgtaaagctaagggacctcaaatgaacttattccttatttcattgtcatgcagctgttcctggtttacccataatcggaaatctgcatcaattgaaagaaaagaagcctcatcagaccttcacaaaatgggctgaaatttatggcccaatctacactataaggaccggggcttcttccgtagttgtgctcaattcaactgaagtagccaaggaggtaacttagaagttgtctatcatttctatcgacttgcataactctaaaatgatggtctcacatttgatttgatcataaataacacaaaccaatactgtactctcttttgcaggcgatggttgcaaaattctcatccatatctacccgaaagctatccaaagcactaacagtgcttagtcatgataaatccatggttgctaccagcgacagtggtgatttccacaaaatggggaagcgttatatcatgttaagcatgctgggtacttctgcacaggtatacatctcaacaatttcatttttcatttttagt

SEQ ID NO: 22900 - DNA, 8014 bp, Oryza sativa
  unsure (1)..(8014): unsure at all n locations
tttagtagtttaaaaaacgtgctaacgaaaaaggaggaacagctaagctgaactagctcatttttccaacttaccactctccattttccacgtgcactctttttaagtactgaacagtgcattttttttaaaaaaaaattatatacaaaagttgctttaaaaaatatcatatgaatctattttttatgttatttttagctaatacttaattaattatacattaataaaccaccacagttttcgtgcggggagatgctgcgcgtaggtcgctgtccatggcgagaagattattttatttagttgtcttttttaccaatatcatgagcaatggttcgtaattacggactaaaaattgttggaatttcgggtctatcaaatccctgataaaaaaactgttttacccgaaagtttggatttatttggcaagaaatattcaaatttgacctaattttaattaaaaaataaattactttagaacaaaattgccgtaattttcgaaattttggtactgtcgatacccaaccgaaataatgaacactaaaacttcttatcatcagtagctgctccctccgttttaagtgataagacgttttgactttggttaaagtaaaactactctaagtttgactaattttatagaaaaagtatttttaacctaagaaaaatatattatgaaaatttaatcaattatagatttaatgaaactatgctggtgttataaatactagtaattttttctatataattagtcaaactgagagtaatttaactttgactaaagtcgaaacgtcactgaagttaaactgagagtagtttaactttgactaaatgaattggagctagtagttggttatactattaaccttgctctaacttttatataactgctgcacggtgaggagtccaaatggccggcatcacatattcatttattaattggtcatagccaccagtcctgctggtgtgttattattcaaaggtcaaaccatgtgttattgctctggacaaagttcagaagcatgtgcctgctaaagcttgaatcagttggaagtaatagttgaaattacatgtgtacgattaacatctatctattatattatataataaaagttcattaaacttcttacaaacgatcctaaactgccacctaacgcttcctacgaacattcctaaattgccatgtggtgctccttcaaacacttctaaaccgccacgtggcactttaaaactaaccatcgatttttacttggtgagtttgttatttatttaccattaaattagatccatttaaaaggtccccgcttcagcttattatcaggtatatacaagataatttttatgagaaaaattgggagggcgctacgcgtcgggcgtccgatctggggtgggaaaatcgaccacccacgacagctgacgtcagcatgtatacgtgcatgcaaaactactttaaactattttttctgttaaattatttattcaaatcatgatccgattgtaccattaaattcgttgcaattaaatgtttaaaacaagacaacacatggatatatttcgatgaaaattgttttagcttattattaaattatttttaaatgttgcacgctgttccactaagtatatcagaattgtttcactaagtaaatcgaaaatgtttcaatcgtttaaatcgggcgttgtttgaccgaagttgaccgtctacgtggcattccacgtaggcagctcatttgcaaatagccccttcgcgctacagtagagcactgggcaccacaaaaatccccaaatctctcggccgcctccgtcgtcaccttgcccgccgccgcctcatgtcatcctcgtcgccgcacatcgtcctcgtcgcgcaccacggctgtgtcgcctcgctcgtcaagttctccggcctcgccgtgtccctagacgtgcactccgccgcagcgatcgcgtccctcccggcgtcctccgtcgccgccgtcgcgctcccggaggtcaagctcgacgacaaccccaccggtgggctggcgccgtacagcccgccgtcgctaagtacctcaccatggacaccccgcaggacgccgcccgatggcgagatcctccacctgctccacctctactacctggttcttgccaccgaaggacaggacaagcgacagcggcggcggcggcgtgggcagcaaggaggaggaggacgaggcgtgggacgagtggctggcgaagccgatccacgagcggatgccatggcagatgccgccggcgacggagctgcaggacgccggggtgatgttccgcgccaagaggccgccgtgcagccttgtcgacgtcacgttcagccggcgtacgtgacggcgtgctggagatccccaccgtggagaactacgccaactgcgccatacccgctaacctggtggcgtacgagcagaaccggggccggtgggagatgcagcgggtggcgagctacgtgctcctcatgtcgtcggccgcagctggaggccgtgaccaactgctacggcgagctgtacggcgacatgatggagtattgcggccggagctggaagcctggaaccggcaccgcgccatgctggtgcatgactgccatcccaccgttcaaccctactacctgttaggatttacgtgaaatattgtttcatacggtttggatagggttgttagctctagataaagtttgttgttatccctctgtattaggagatgagctcaacaaccctgccggctgtatatatgcatgtataacttgtgatcagcctgatttgaggcttctgaattaacacgaaaccacccaccgaggtgttctccacgcttgcacctctgttctttacatggtatcagagcaaaactccatctagattagtctcatggcgagttcctcctcctccaccgcttttgcaaaccctttgttcggcgtccaagtttctgagaaactcaccaagcaaaatcactccctctggtcggcgcaagttctcacagccctaagtggtgcgcgactggagggccatgtcctcggaacatccgttccgccagaagccgagcttgagcagaaggaaggagaaaaaggagagaagaccatcagagtcccaaacccggcgtatggcgaatggtttgccactgaccaacaggtcattggttttctgttcacctctctgaccagggagattctgtcgcaagtcgcagacgcaccgacggcagccgcggcatggaagacgatcgagaacgtgttctcgacacgatctcgcgcaggcgcgatcaacgtcagattggctctcaccaccactcagaagggccaatcgactgtcactgagtacgtcagcaagatgcgtgctctcggtgacgaaattgctgcaacagggaagccaatagatgatgaagaacttgttgcttacattattaatggtcttgattcagagtttgatccagtggtggaagccctcgtcgccaagaatgcatctgtcacagttgcagaggtctactcacagcttcttggctttgaaaacagggtgaagatccgaacggcgtgcgctgctatgagtggaaaccgtggcggtggaaatcagggacgtggtggcggcaacccccgtggccgcggcgctggacgcggcggcagtggccgaggtggcgggcgcggccgtggcaatggacgcggcggcgctgacaacagacccacctgccaagtctgtcacaagaaagggcatgtggcggcggactgctggcactgctacgacgagaactacgtccccgatgagaagctaggaggcgctgcgacgcatgcttacggtgttgacaccaattggtatgttgacaccggggcaaccgaccacatcaccgggcagctggacaagctgaccacacgggagaagtacaagggcaccgaccaaatccacacagctagtggtgaaggtatggatatacagcatattggtcattcctatgtgcctacatctagccgccccctccatcttaaaaatattttgcatgttcctaaggcgtcaaaaaatcttgtttcagttcatagacttgttgctgataattatgcattccttgagattcatcaaaagtattttttaattaaggacaaggtcacgaggaggacaattcttgaaggaccatgtcggcgcggtctctaccccttgcctgccggagatccaataaaacaagtctttgctgtgatgccatcgttcgagcgatggcatggtcgtctagggcatgcctcaaagcccattgttcttagggttattaatcaaaataaattgccttgtagcaatgagtctcctagtgagtctgtttgtgatgcttgtcaacagggaaagtctcaccagttgccatttcctaagtcttttagtgtctctagtaatcctttggaacttattcattcagatgtatggggtcctgcctctgactccgttggagccaagcgctattatgtgagtttaattgatgattatagtaagtttgtgtgtatctactttcttaaatttaagtctgaagtttttgagaaatttaaagagttccaaagcatggttgagagacaatttaatcgtaagattctaggcatgcaaatagattggggaggagagtatcaaaaattgaattccttctttaagaaaattggcatagcacatcaagtgtcgtgccctcatacccatcaacaaaatggtgccgttgaacggaaacaccgtcatattgttgagattgggctatctctccttgctcatgcatctatgcctttgaaattttgggacgaagcttttcttgcagccacttatctcattaatcgcttgcctagcaaagtaatcgactttgacacacatcttgcacgcctttttcaccaacaacctgattataaatctcttcgaacttttggttgtgcttgttggcctaatcttcgtccctacaatattcacaaattgcaattccggtccaaacaatgtgtctttcttggttttagcaatttacataaggggtttaagtgcttagaagtggcaaccggtcaagtctatatttcccgtgatgtcacctttgatgaacaggaatttcctttctccaagcttcagccaaatgctggagcgcgtctacgtgctgaaatttcccttcttcctgctgatcttacatcgcatgcatctgatcaagggggagtagcacatagcaatgatcatatgcataatatcttacctgttgttgctgattcctcttttgagaatgatgctgcagatgacactgaggcagatgctagcgacagcaatgcagagattaacgcagaacaacctgatggaactcatcctggtgcatcaaccggggtacacacagcagaaacagaagtggcggaagaatcgtcgtctcgtactgatcagtggcgcgccgtgcaggcccccgagcaacctgcgaccgccaccgaaccagcagccgccacgtcgtcggctgtacagagctcccgcgcgagttctcgctccatcgcaagccaccaccagcccggaggtgacacgtcgccagggcctcgtcatgatgcggcaggatcgtctgcggctccggaggttattgctgaaatagagcaaggtgagattaatggtagaccaaaaactagactccaaagtgggattagaaaagagaaaatttatactaatggtacagtcaaatatggttgttttacatcctctggggaaccacagaatctagctgaggctctaggagataggaacaggaaagagtctatggataaagaatatcatgcattaatgaaaaatgaaacatggcatttagttcctcctaaaaagggaattaatattatagactgtaagtgggtctataaaattaaaagaaaggctgatgggagtttagatagatacaaggctagattggttgcaaagggtttcaagcagaggtatggcatagattatgaagatacctttagcccagttgttaaagctgcaaccataagagctgttctatccttagcagtctctaaaggttggagtcttcgtcagttagatgttcaaaatgccttcttgcatggagttctagaagaagaggtgtatatgagacaaccaccaggatatgtaaaatctgaggcacttaactatgtgtgcaaattagataaggcattgtatggattgaaacaggcacctagggcctggtattcgaggctgagtacaaagttgaatgagttggggtttgtgtcatcaaaatcatatacatctctgtttttctatgataagaatggagttactatgtttatgcttgtatatgttgatgacatcattgtggctagttcttccgaaaatgccacctcagctcttctgcaggatttgaatcaggagtttgcactgaaggatttggaagatcttcacttcttcctaggaattgaggttaaaaaggtaaatgatgggctagtgctaacataggaaaagtatgcctcagatgtcctgagaagggtaggtatgagtgactgtaaaccagtgaatacacctctgtccatctctgaaaagttgtcaagtcaagggggagcgtcccttggtcccaatgatagcactcagtatcgcagcatagttggagcactgcagtatttgacattaacaagaccagatatatcattttcagtaaacaaggtatgtcagtatttacatgctccagctacagatcattgggcagcggtaaaaagaatattgaggtatataaaacatactgtgaaacttggtctacagattaacaagtctagttctttgcttgttagtgcatttactgatgcagattgggcaggctgtcttgatgacagaagatccactggaggatttgctgtttttgtaggacctaaccttgtatcttggagtgcacgaaaacaagctacagtctctagatcaagtattggagctgaatgcaaggcattggcgaagtgcagcagcagaagttatgtggatacagacattacttcaggaacttggtgtaaaagggcctagagccgctaaggtatggtgtgataatattggagctaaatacttaacagcaaatccagtttttcatgccagaacaaagcatatagaggtggattatcattttgttagagaacgagttgctcgcaagttacttgaggtagagtatgtctcatctaaagatcaagttgcagatggctttatcaagaccttgacagtaaggcagatggagatgtttagaaacaatctgaacctggtaggttgagattgagggggagtgttaggatttacgtgaaatgttgtttcatacggtttggatagggttgttagctctagataaagtttgttgttatccctctgtattaggagatgagctcaacaaccctgccggctgtatatatgcatgtacttgtgatcagcctgatttgaggcttctgaattaacacgaaaccacccaccgaggtgttctccacgcttgcacctctgttcttttcactaccatccccttcccagctaatcacacacgtactattacatgtatcgtatcgtcaccacgccgctgatgttggcgccggcggggacatcatcgagcttgacctctaagagcgtgacggcgtcgacgaaggacgtcgagagggacgcgatcgccgcggtagggtgcacgtccatggacgaggcaccacaccagctcgaccatcagtatgatgtggccggcgaaggggctggcgacgaggacgacgtgtggcggcggcggacgangtgacgacggaggcagccgagggatttggggatttttttttgtgcccagggctctactgtagcacgaaggggctatttgcaaatgagctgccttgtagacggttagcttcggtcaaacagggtatggaccggctacgattcattaaaagatctagatgtgcaatttataagattatggacctaagtgacacccgcactcaaatttaaggaccagcaatatattttactctaaataaaatattgatcacatataatagttatattgtagtgctgaatacatagggccgacataattatttttaaataacttagccaacatataataa

SEQ ID NO: 22901 - DNA, 1745 bp, Oryza sativa
ggaggggaaaaatcgggcgctgacatcagcatgacgcatgcgtgcaaaaccactttaaactattttttctcttaaattatttatccaaattaaatcatgattcgattgcaccattaaattcgttgcaattaaatctttaaaacaagaccatatatggatatattctgacaaaaaaaaatttagcttattattgaattatttttaaatgttgcacgatgttccaccaagtatatcagaattgtttcaataagtagatcgaaaatgtttcaatcgtttaaactagacgttgtttcactttatataaaaacaatgtttcaacaacgaaagaatgtttcagttcactgtaacatttgatctatacatagtgaaacattataaatacactagttgaaatatttttggtggaacaaaaaaagaaacgaattcccttaatagagggtttctaaatatgtgggtgatttgttgcaaaaaaatgtttcaatttattaaaacattagatttatacatagtgaaacattgtgaatatactaggtgaaacattttttgtggaaaaaaatgaaacgaattcccttaatagaggttactgggcctaacatgtagcggttgcaacatacgggtaaatttcatccaaacaattcaaagtgtggtccagtgattctcgaaacaatttggcccatcttttatttattcctttatttagaattcaatcctgtcagtgcaatgcctatgtttggtttgccaaaatactaaacatcccatcattctgttcgcagataatggaaatgctttacattttcggtctctaccatgatcaccacgaggtatatcgttctacttgaatagaaaaaaagaataacatgaagaaaaggaaaaaaaggcaatgtaaagcaaaggagaggatagattcttctgatcgtctctgcctaaaggcaggacaaaagcttctgtttccatcaaagggagatcaaaaaggaggggagaaaattcaagatgttcctacgcgagcagtggcatcaaccgctgtctccgtctccgcctccgtctccgagtgatatcaatggagagatcaagagacagagagtgagaagagacagtgacggagaacggtgcgaaaattgtggcgaatgcaaacttgattggctctcaaatcttcaaagggaatcaagagatcagagtttttgatttcaagcagcaacacacatctccaattcctcagaaactcaccggtgcgatgcgaatctcacctctctccaccaattcgccgatcgcgcgccactcaccgaggcggcattccatcaaacagtgacagcgggtgagtgagagagatgcagagattggtgggggggcggctgacctgggggcgcgttggagcgtttccttggcgcgatcacgccggccctctcggcgagcgcggccgcagcgacaaaccctccaactgccgccaccgctgctgccccgaccccgccgggagtacaaactaaagatcctaactttagtcccgattggtgttacgaaccggaatacaaaggtttctccacctgtgactcgtccaggaacagcagccagagctacgtgctgaccaagggatggagccgattcgtgagggagaagggcctctgcgccgacgagctgctcttcatcgactgctagaagaacaacacggcggcggccaccggcgacgagaagccaattacaagcagcgaagcagcacgtgtcgtgaggctgttcggcgtggacatcgccgg

SEQ ID NO: 22902 - DNA, 1411 bp, Oryza sativa
aagctagactgtttgagggagcttctgattctgggagaagctacagcagctagcagttctccccaaataggccctatgatagaaattgcaccatctgctcccaagcttattaagcaacccaagaagaaagtgtcgacgagtggtactcgtagaccggatgattagggtattgggaaacgttggaacgaggatctacgtaatacgacatcaagcaaataaaagacaaggattatactagttcaggccccttatcaggtaatatccctagtccagtttatatgagattgatgacggagaaccacagattacaatggaagttagcgaaagtgcgaaacagacgataccgacaagatcgtaatcgatgtattcgacgagatctcccagttagttagctccgcatactccatctttgtaaactatggcgggtgtgttgagatgagattcgatgccttgcacccctccatgggggtcccttttataccgtggatcatcttgattctcaagtaagactcagaaacattggatcttgtacgatataacacaaactctatcccttccgagtattactttggaaatcacttgtcttggggagatattttccataatttataacagattccaacagcgtatacgggaacgatccgtatacgtgaaggtataccttatctgtgtattccataagtcataggatagaaggtatgacttatccgtaaccctgacagtagcccccaacatcaacttaaatgaattcacgttgtcgcccgcgacttctccggccagcgccttgtcgtacttactttgtcgatctcggtgcagaaccgtggagatgcgaagttatcgacaacgctagagggagtccaatggttcaaatatgaatttaaattgaagtctgaacaaccgcccttaacaagcctcaggatttttcggcggcaatctctttccttccttggaatgcgaaccgtcaggtagtgcgcctatttaaaggggttttgggatccatttcaagttcgtttgccaaaaatcctccagcttcatagcagcctcggacccttcgtctccccaaaagccttaggtttcttcgtcttcctccggcgatccccttgcaatggcggacctcggcaaatcttcctccgatgcggcctccttgaagaatctctacacagacggggccatccctcccaagcaaaccatggcgagggaaaaaggaggtactaatccctctcctgctttaggccgtatggtagtggtagaggatttcatccgctgtggttttttgactcccccttcggaattacttttgctgactctcaacttctatggcatttcgcttttgcaccttaaccccaactccatcgccttcctgagcatctttgctcacctttgtgaggcctacattggggtagtgcccttc

SEQ ID NO: 22903 - DNA, 3183 bp, Oryza sativa
gtgagtggaatcctagatctctttttgttgttgtgttgacaggtcttctgaatgtctttctgatgtcggcaggacggcctcgacgatatctgcacagagcggggatgaggtcgcgaccagcgcgactcccgccgctgcttctcctcgtgcgggcaccacgcccagcgtcgccgaatccgccccatcccccgtcgtgcccatggctgccctgccacctcctactccaacgggaccatcaacctggtctcaaatgatggccgagagccagcgccttctcgagacggcttctcgagaggtggtcgccgagatgggccgtgtggccgcccgtgcaacagcgtcggatgggcgggtggcccagctgatgtcggagctcgatgtcgcccgcgacgaccttcagaagataagggagatcgtggccggcaatgagatgcagcgccaagggttggagctgcagatgaacgatatccaagatcacatcatctccatccgcgagtcactccggaagagcttcaccagtctgcactagctggccttggcgtgcggcgtgaagtctaccatcccggaacaccccgacgagacctctgtgacatcgtcgctgtccgagctggcaaagacgatggaagttatcccctccaagcacgctgccaaagtctcggaggagatctctaacgggatccacacgggggcttgtcacgtgctcgcgtgtgtgaagctcgctctccctgatgctgatctaaaagagatcttgtaagggggcagctgatgcaacacgcgaggacgtgatgtcagacatggcggatctcggggaaactgttcccctctatttgaggagtattttttttcttgtactttgtgtccattgtataaacactttgggtttgctctgtccttggtagaacagttgtccctttttatgccatggtaatttaatttgtagcttgtttttccttcatagatatcttgataccgaggacgtccagcaaggcggacgccttgataccgcgatgatcgctccggctttgccagccacggcacccgcttccgacgttgtcggggatatcatcgtgtttgagggcacgaatgtggtccctcgccgtcgggtttaggcgtggtttcgctccttcaagagaactcaggtgggatatcttaggactttcgctctctacccttctgggctcgcgaggcgaatttccttgaacccttgccttccgcagacctcaagagcatggtggctgagcgagatcatcgaatcctttactggaagacgaaatttgagggagtggagcttgagcggtccgttgtggttgtaaagaaggaccaggctatagaggcgctccgaggtcgtgaagtctggttgaactcgtacctcaatagctgctgcagtgctatgactgaggtttgtcgccagctaaagatcgatcgtgcggagcccgaggagactatgtgggctatttgtcttggatgaggggtgcgtgtgctcagctggaggacgtcgggcagcagattgacaactgcctaaaagaggagtgtcgtcgtgctagccgatacgctggaggtcacattctcgcctgcatcggagatcaccgctcacagatgaatctcgagttcctacgcaaagggtttcgccattcgtggctgtcagcgaacgagattgaccagctggcgtgttcctttgctcctttggctgagagggtcttctcgtccatgaactagcaatggccgtcgtggtagactccagcccctgtaaaagaaacgcctagagaaggatttgtaacatatggatatttgtgtcagaactttataattagaatggaaatccatctactaaatgtttgaacaagttgtgctgtgtgcgagtactactctttatacaggctgttatttgcctgttgtcgagttggatactctccctagcccccagccttgtccttggaggagcccgttcttggaggagaaggctcgacgacccgaaacctaccgagctgaaactgcgatttacctagcccccagccgtgaagttggaaaaatcaatttccgattacacggcttaattaattcgccaccgttgagcactcttacatgactaggttttacatggtcgtttggctcttagaatccgacaaaaccttatctgctctgggcatccccagccgaaattcccgtgggtttcttggaggcttgtcggaatggcgtaaagggtcaataggtccgattgcaacatttggtgttatcgtggtaagggatctctgggtgaaacactgttagagttgttttgttcataaagaactcaaatacctttgggtagcttttattgatcggatatttatgtagttgatcaatgtttcaagagttggatgattcacggccatcgcaatctgcaatcttgaatacacctggtcgtaagactggcaccacagtgtacggtccttcccacttacgcgagagtttgttccgccatgcctgggtttgaactcgtcggaggacgtaatcgccgatggcaagtgtacaagctctgatgcgcttctcgtgatatcggcgtagggcctgctgatatgcggctgctcgaacggcaactcgttcacgatgttcctcgagtagattcagatcgtcgctttgcctttcctcttgctcctcgtcataatatttccgcactcgtgtactctgatgcggctgctctgtggggagcatggcttctgttagttttagaaccggaaacatctttagttaccgattggtgttaccaactggtaaaaaatgcatctttagtaccggtttgtaacaccaactgagactaaagatatttttagtaccggttggtgctaccaaccaatactaaagatgccagttaccaaccgggactaaagatatttttagtactggttggtaaccggtactaaatatgcctctaggaatagttcgaaaagaaagcatatctatccaagtcagatgtgtgtagtaggtggaatggtaacgcgcgtgagggctgaggtgagagatcttgagtttgaatcccacatcccacatattattttttatttagtatacatatttattaccggttccttcaaccggtaataaaaatcgagatctttagtctcaataatttagctccgttgctataattggtaataaagggggttacaaaccggactgaaaatcgcttctccagtagcgaaggaaatg

SEQ ID NO: 22904 - DNA, 1722 bp, Oryza sativa
ttgcaacagtattatatataaaataccactcaacattgaaaatatcaggttggggcgcatgactgtatcaatcaatgcctactaatatgattcgtgttattgtccgtgttagtgttagtgttagtgttggatcccttcacgaggggtgtatttagaaatccggtatttgttcagggctaaactcgcaaaactacccacccctcccccccctctcaacgacacgacgacatccgcttgtatttctttcgtttaacttcgttctctcctctcctcttcctccccccacccgcctcgtcgccgatccgatccgcctccgcctccgcctcgcggcccggcctgcctgcctcgccgccggtggtcccgatccgaggtaaagcttcgtctcgtctccctctctcgcgcttccggtgccccgccgccggccaaaatcccgccgcgccgccgcctctcagcctgtttcccggcggattagggcgagtccgatccgtgtgcctgcgtccctgcgttgatctccgtcctcgcgagagcagcctcgccggcgccctgctgcttcccgccgcatcctcgccgttggtgccacccgtgctttcccccatccctcgcgtcgcgcctctctctctctctctctctctgtgccttatcgtgagcttctcttctagatctgggggcttctctctttgccttaaccgaattggtgaggtctgccccctgattcaggggggcgcagggcggagagattggctgagaggctttttcgttgttgtcggtggattaggatgatagagcgatcgatctcgttaggctaataatttgtttgatccgatcaggttgattgatggtgttttacctgcgtgcaggttgctcttgctgggcatcaaacatgggtctggtgaaggatggcgccgccgatttggaggaggggaccctggagatcggcatgggtgagtaacgagatcggatccattgcgttgtgcttttgcgtgatcagtggcctgtgagttttgtgttttgcttccgggcttctggcggcgtactggtgccattgcagctgaacagtgcctgcattggcactggcatgccagattttttgttatgaaaaaaaggagcctggttaaacttttcagaagttcagcaaattgtttgtgagggtccaatcttaatgtttgatcattggatgctgtgatagcttagttacccgctgaatgaagggtggaaatattggtgtacagatacttaaaattgctggttatcctatttataatgctatgctcacagtcaggttttgttcaagtacttaacctaatgtgccaatcatgatcggccctattcattgtcggcgttacattgcagttttaaccgtgcaacactatgtcatgtccttatgtcttaagtttaccatattcttttgtttgcttactatgttgatttgctgtgatttatagcacatctaaaagtgcaaatttcacaaaagcaccattcattgtggtatagacactgttccagctttccagtcttagtcataatgttgtgataacagcaacctttgtcaaacggcctaataaagatgttgcatactttcttttttcaatttgcagagtacaggactgtttctggtgtggcaggacctctggttatcttggataaagtaaaggtacgtgctactgttcctctacaaattttcaacagactaatctggtagcaagttatactgagcatttcttt

SEQ ID NO: 22905 - DNA, 1373 bp, Oryza sativa
gtagccaagcatttctctcacataaagataatctgactatttgatgacccagtgagatttgggctcacatatatagcttaataactttagttgtacatggaatcctacataagttcttgatttgaacatcctgttcttttgacaatgattggatgttggcattatagtttttgaatttttatggagaaaaatccatatggtatgctgtagagcaatttacctgttcatttttttccatggagacatttttgcatcgctgaatcactgcttatttgctgattacttttaatctccagggtggtgaagatgacaactttgctatcgtgtttgctgctatgggagtgaatatggaaacagcccaattcttcaaacgtgattttgaagagaacgggtcaatggagcgggtcacctttttctgaatctggtacatatagcagacttttgaagttctgattcataccaatttgttatgcatggaaactaattctgctagtgtatatgtgcttattttctgtatggttatatatgcatcatttttaacagaagttgacctgattgttaaaggtagaacatattttctaacaccaggctactctgtttacaggcaaatgatcccaccattgaacgtatcatcacccctcgaattgcactgacaactgcagaatatttggcatatgaatgtgggaagcacgtgcttgtcatcttgacagatatgagttcatatgcagatgcgctccgtgaggtattttgctttttatcttttatgatgttgtatactttgtttctttctgttttattacctattcttagaccttaattttaaggaatcatatactaatttgatgtcgttacttaactaaaatgtcatctgtcatccgtttggttgcaaattttcatgtttgaatgaattaaaatcatgaaaaggcacattttcgattacttcgcagcatgcatggcacttgtacaaacatatgtggcatctagactgatcactttatcagaaatgacactagcttggttatgacagtgaaaagttcgtgcattttcatttgatgatgtcaccgttgaccaaaatggctaaatgtggatgttaaagtattcatgtttctatttgcttctaacagtgtgttgtggttttctctatctaaaatggtagtattgcattttccatgttatacatctccttttatgttcgactgcaataaatgataaattgctgaaattttatttattgtgattggcactaatacaacacggtaattgtgcttatatgtaggtatcagcagcccgagaagaagtgccaggtaggcgtgggtatcctggatatatgtatactgatctggcaaccatatatgagcgagctgggcgtattg

SEQ ID NO: 22906 - DNA, 599 bp, Oryza sativa
agctcgtagtcccgccagtacaaggtcaggtcaacctccgctaacacggcgtcacgccagctcgacttttgttcccgtcgtgccagccggcctcaagctcaagctcgatagatgtccgctagcgttgtccctggcttgatctcgacttccgcccacactcacacgccattccctagcttaatttcgatctctgccgctgtcgtcccctggctcgacctcgacttccacctgctctcacacgcacgcatttccctgtctcgatttcaatctccgatgtcgtcatgccccgtcttgaccacgaactcccccatgcccgcacgccacccccggccttgacctccgccgtgtctccccccactcaacgtcgacctccaggctccagcaacacccacacgctgtccttgagctcgagctcctctccaccacccggcttcggcttgacctacgcggctctgtcgtgcctacgtgctgtcctcgagctcgagctcttctccacggccgtcgctgctctctagctcgactacgtccatacctacgcccgcacgtcgtctccgagctagagctcctctccctgtcgtcgcaccccgctcgacctcgat

SEQ ID NO: 22907 - DNA, 677 bp, Oryza sativa
atctagacaaaaaaaaatgtgttatgcagattctaggtgtaaagcaattaacttttgagcaagatgattttgtttatttaaaagtttacctttgcgagggataaaaaggttcaagtaaaaggaaaattagcccctcgctatattggaccgtttcgaataaatgctaaacgtggagaaatagcctatccactagctttaccagattatttgttagaggtacaccctacattccatgtctcacatctaaagaaaatttttctattgacatttttctattttattttgtacaactcttattttaggttcaaaatatagacattacggatcatgtatttttggtttgattatttaatagagcaacaattaaattaaaaattagatttatagctttcaatattattgatagtttgtgttttagtttgagagcttaaagtagaaagggggaagtagtggagagcggagagtgtgagccaagggggaatggggcgatgcattggggactttatttttctaaacaatttaattaaaatcaatgatgatatgttttgcttttttcttatagtttctaagagtttttctacttttgaagacatgacacatagcggcttaagatttttctaaaggtagacctaatggttaaaaataataaatccactaatttaagtgaaaacccattg

SEQ ID NO: 22908 - DNA, 829 bp, Oryza sativa
tgccatagcacccgttacaatgcaaggacattttttctaatatattaattaagaaaacagagatggtatgatcattatttagccttcatcatggaaccgctagcttcttctggctcacatcgatcgatcctagcttcctctgggcttgaggtgcacgtgcagcgggtgaagcttcaaggcagtgtactgcatggtatcctccttatcaccgtcgccctccctcagcgtccactggagctcctgcacgaagcgcgcgatggcgacgcacgcgatgctcaccgcctgctggctccccgcgcaggtcctcctcccggcgccgaacgccagcgtcttgtacctgtcggccaacttgaacccctcgccgaggaatctctccggcgaccactctccgggcgactcccaggcctcctcgtccatgtggcacccgaacacgttgatcatcacctgggtgcccgcggggacgtcgtagccggcgagcgtggtgtcgtcgtggacgaacctcgtggggagcaccggcaccggggagtgcagccgcagcgtctcgtggagcacggcgtcgaggtacggcagccttggtaggtcctcctcggtcaccgccttgccgccgcacacctctcgaatctcccggtaaagccattcctggacaaatttttaccagttttaattggttggcaaaatataatgctcaaattaattaattaatgcatctgacagacattaagaatataaatatatatatacaagatcattcttttttcttgcctgtttgtcagggttcttggcaagctcatacatggcccattcagtggttaccaggacagtatccaca

SEQ ID NO: 22909 - DNA, 2511 bp, Oryza sativa
aagccagctgaggtaggggaagtagtccctccaatcaggctccacgacacacgacaatatctcatgcacaaggacatggaagatctcttccttggatatctccctcccaaactcttccacataaactgaacacacatcctcacctaaattctgaaattgcaacaatcatgatcagtacaagtaacctgaaatcgcaacaattctataagtccataacaatgttcgttcaaaaaaaaaaaaagagaagttcataacaatcatgaccagtacgttcgactaactatgaaatcgcagcaatcatgaccagtactagaagtaacaaacggaccattggggtaatacaattatacaaacctggatcaaggacaatccgaatagctcagtagtgtaaacttctctgaagttcagaggggaatgtgggtcaacagcaaccaatttatgcaaactgcttaacacgttactgaccatcctttctcttgtatcgcagaagtgtttctgaaatttacgcaagcattgcattgtgagagcttaattaactgagtgtgacttgtatccagaaaccacaagtaccaaatttaaaacagttgagatttgtacctgcgcattaaaacctaaaattgcgagcataatattacgcttcgccatcttatagaagtcaccatagtcgctgatggaaaccatgtttttacggcttatcacagacaatgcttttggtagctttttagttgatattgatgagaatttttcaatcatcgcctgcaaaaagtagtacagaatatatatatgtgtttttattatttacagttcaatatgagattatcagttataggtaactattccagaacacgaaaaagaagtaaaacatttttttttgaagacttagatatattgaggaagcagagagttcaaagtctgagggatgatatcccttaggttgccttcatttttccaaacaaagtattgaagccaagaacaagaaggaagagaaacatcaaacatcatagcacccacatcatgaactagaagccagcatcatagcacaattgcatggaccaaaacgtttacagttttacccccatgttagaagagacagagaaataatataatatcagctctatagttcatgttgtagtaggattttccttttttctgtatcaagataaattggaaatattatattgccattttattaagaaaaagaaaatccagtttagaatcctaaacttctgcaagaatccaaaaatcaaccctgaactataagaaactggatatgatcgcacctcaaattgtcaaaaaccatggaatctacacacacacccctcaaactaaaagcacctccgttctgcatatatgtaggcttgatagtactattgaaaagtacaaggcttgtcgctaagggctatactcagaaagaagacaaatatttctttgacacactactacaaaacatcaaataggtgtcgccactataggtgccggaagtactaaaaccggcacctatatgccttttcccacttcccccagcttgaaatcgctaaaaaccaacacctttaagcaattataggtgcctgttctaaataagaaccgacacctattctataggtgccggtttttatagaaaaaccggcacctttaatatattataggtatattaaaggtgccggttaattaaaaaccgacacctataatatattatagttgccttttttaaaaaaaaatccgacacccacagaatcgagccgagccaggcgggtagatattcttccaacggtggggcccacacccacgggagataatgacgagacgtcgagccctcgagctacatccgtccagttcttctcagcttcttctctccctctttccacttcccttctctccatccttcttctcctctctctctctccgtgtggcggcgggaggggcgtggacaggaggtgcggcggtggcggcggtggacggcgtggaggcggcgggctaggcctcgcctccgccagatccggtggcgtggaggcggctgtggcccggcgggggcgggaggggcggccggccgggcgcggcgccctcccgttcgctagatccggtggcggaggggaggcggcacggcccgacggcgggatgagaggcggcggcgccctccctccgtcggatctggaggggggcatgcggcggcggtccggcggcaggaggtggtggtggcccgacggcggcggtgttgaccggcagtggtggcgccctccctccgtcgaatctggagggggtgcatgcggcggtggtccggcagcaggaggtggtggtggcccggcggcggcagtggtgaccagcagtggtggcgccctcctttgattttttctgatttttgttgttagtgaaagattgaagctgccgcattgagccatcttgtatgttgtttgggaatgatttttgtgaaagattcaatgttagtgaaagatttttagttatgtttttcatgtttgtttttctgtgatgttgtttgattggggattgggattg

SEQ ID NO: 22910 - DNA, 872 bp, Oryza sativa
ataaatttgatagaacattaacatctgcaggcttcacagtcaataaggcagataaatgtgtataatatcgctatggtgggggtgagggagttattttgtgcttgtatgttgatgacatactattatttgggacaaaccttgaggtgataaatgaggttaaatcattattgtatcaaagttcgatatgaagcatttgggagtagctgatgttattctaaacattaagataattattggtgaggatgggattacattcttgcagtcccattatgtagagaagatcctgaatcgctttggctacattgatagtaagccttctccaacaccttatgattttagcttgttgtttcacaagaacaagataattgctaggaatcaattggaatactcccaaatcattggcacacttatgtacctagctagtgcaactaggcctgacatctcctttgatgtgagcaagttgagccggtttacctttaacctgggagatgatcattggcgtgcgcttgagcgagtgatgcgctatctaaaagatactatgaaattggggcttcactatactaggtatcctgtggtactagagggataaagtattttaattggatctctaatgtggatgagatcaaagccactagtggatatgttttcacactatatgatggtgctatttcatggaggtcctgtaaacagaccatttgacgaggtcaactatggaagcaaagctgaatggcttgcaaacagaccattttgacacaaccattctgctactgttgagatagaatggctgcgtaatcttttgatggatctgcatgtggttgaaaaaccggtgctgggtattcttatggactgtgacaatcaaacggtgattgtca

SEQ ID NO: 22911 - DNA, 575 bp, Oryza sativa
aagtttagccaccatccgtactgataaaagaacatgcacttaactatgaatttccatagcagtgcacctgaattgagcaaaaacttaccagagatatccaagtaggcctctggcaaaataggtgggccattatcaatgggttttccagatccattaaaaatgcgcccaagcatatcaagtgagacaggagttttcaggacctatagaaagaattaccacacatattaagcaatgccgctacttcagtgctacatgcaaacaaggaaaagatataaactacaaaaacttatagattattcaagtcatgcaatactcgacaatcacaatgacatgtgctttgtcgatactcctttgttttatcaattacaaccaaaagtgaaatcattctccaaattaacactgttcagctcaaagtgattaacctattagaacacttaaatcactatggataccaggaagtgaagataaaaggaggaagagatgaataagaggaaattacctctcctgtgaactgcacagtggtatatttgttgtctattcctgaagtgccttcaaagacctgaaaatcaagtaag

SEQ ID NO: 22912 - DNA, 621 bp, Oryza sativa
tgaagtgcatcaattctgtcttcaaaggaccgtgtggtattggcgacaagcaatgtttcatcaaggtcaaacacaataccaaggcaacgaagattcaacatgctcaagcaagaattatacaagcccgatggcaccttatagccccaaaaacaagcaagattcggcaagtttctcttggaagtcattgccactaaatggatctcttctgctcctagaggaaaaacagcagtctgcaagcaggagagaatgaaggaaatgaaaaggattaagaaaaaggagaaatgttcgtcactaatacaaaatgcaatcatgtaaaaggcatggcatctagtacatttgttcacatacctgcatatcagagtaacatccacaaagtagtacagaaaataaaaggtacaacagaaatgcaaaaaaggggatacttgttaaaaaaaaggcatgtgtggattaaaaactctatatccatccaaatcttaaaatagcgaaatcaataccaggaatatttatagcactgtcctgaccacagttaaatgctatttaatccaactatgtaaaggaaatattaggccgaaaatagtgtgtttcttaatatagatgtaattatcaaataattcaagtgga

SEQ ID NO: 22913 - DNA, 1624 bp, Oryza sativa
aaaccatggttaaaaaacatggaccaatatgcaatttactcgaaaagagtaaggaaagctgcacaaagaaaagaaaaacaacaacaaaagttctgttttccctaagtggtgaaaaaaacaccatagatccaaacggaaaaaaaatccgattcctataaaaggacaaaaaaaaagtggtgaaaaaaaatactagattcgattccttgaaaaacaggaaaaaaaagtctgattcctataaaggcaaaaaaaccgaaaaaacaccttaaaaaagttcatccgattccctaagaaagtggcgaaaaaatggttcgtaaaaaaataaaaagctggttcgtataaaataaataatgcacacgagaaaaaaaatagaaagggcgaaacaaagtctgatttctaatcaatatatatctcttctttatctctaatataatctaactatttaaaaagagaaaatacacgagaaaataaaaaaacatgctaaaaaggctttccatcttccataaaaaaatttaaaaaacatgcgacgaaaaaaatgtcagaaaaaacgcgcctttttaaaaaatggttttaaaaaaccatgcatgaaaaaaacatcgtctattaaaaaaatcgctctgagtcggataggatccatcgattttttgccacctattacacggcttttatttcgtcatatattctcctgtattgacaaaaagcaaaaaaaaaggaacatttgaaaaaaaaacaagcaaaaaaacgcgcgagataataattgtcaaaaaaggcaaaaaaacacacgagaaaagaaaagaaaagaaaaaaagggagaaaaatatggttttcattgtaaataaaaagcaaaaaaaaacatgctagaaaaaaacttttagaaagaaatgagccattgctgaatggtttgagaaaatcgcgcaagaaaaaaactgtttataaaaaaaaggttctcattaaagtacaaacattgtcattgacatgattattcatgaaaaacgcatattatcattagaatgttttcacccgttgcaacgcacggacatttttgctattcttaactaattaaaatattcgtaattttcctttcgtcacagtaatttttcgtccgtcaatctgagaagcggcatcctccatacacacgcgcaattacatccatacgacggccaaagcccaaaaaaaagaaaaaaaagagttcgatacaaaatcaaatatggattaacaaaccaatcgaacatcatagttagtattagaactacaccgagagataatcctaccaataatctaatctcatggaagcactttccaaaaccagactttcatagttcgacacaaccaaatcggatgcacaaacaccataagacaaacacaataaccaaagattcacccaaataaaatcaacaaagggatccatgggagaactccaatccaccccaacaaaattagcattgcagcctaaagcaatcgacaaatcccttcttacatatccatcttgacctccttcttcagcttcttcagtagtcgcgccgccggtggggaggcacacggaggggcaccgacgtggggaggggcagctcgtggtgggaggagggccgtcgctggtgggaggagccaatcctgagccactgcgccg

SEQ ID NO: 22914 - DNA, 4044 bp, Oryza sativa
ggaggggcaactcgcggtgggaggagggccgtcgccagtgggggagagatgagcggcacggcatggattattggtgagaacgtgcgcccatcgcacctttccgcaccaccaccgacgacgatctcctcggcgctgcccctacacccatctcaccaatctgcgctgccagggcagttagccgctgctagagtcgccgtctccgaccccgatctacacctggacgcccccccttccgcgcccccattggccggcttggagagtaatgggggagagagagaacgagggacggcttggagagtaatgagggagaaagagagagagtgggagagagagaacgagagagtgagagtgagaggataaggatctccaaatttctctcctcggtaatgtacagcaacaatctttcttttcttttcttgaaaaaacaagagctttagattggactaaattgcagtcaaatgtcaatgtgtgtttttacattgtgctaatccaaggggattcaattccgccaaaaatattttattttattgagatcgttaacattatataaatatttcactttaatatttatttgagataaaaaataacaattgcaaaaaaaatccacgagacttaactccaccccaagctttgttgtcgataccgccacccacgcctcgagccgacaccgaatccgccacccacgacccgagtcgccaccagattcaccacccatggcccacaaccgagctccacctcttgtggcttgacctcaccgccttgaacttcgtcaccagtaccatcgcccattactcgagctccgttgccgccggtttccactcctcccgttgaatcgagaggggaagaagatgccgagggagaggacaattggatctacgggtggcggatctgacgggagctcgggcggtagggtcaagccatcttccttcctctaaaaaattttgaaatatcgttcggcgaaagttatttttaattttatggtgttatttctatgattatatttccttcagtcgaattgcgatatatggtttacgattttaatttaatcatatttctttcggtccaattgtgatatgtggtttataattttaatttatatcgatcaattttatttagaatccgttgcaacacacgggcattatgctagtctactattataaaatgtaaaaatgtttcatccaaaattttggtacgtcatccgtgttcgaatcggttttaattttatgtttcagtcaaatccttttcttttattttatgccaaagtgtccgtcttatccgagacgcgcgtaaattaattgggcacgcacttttcatacgtcccttgccgcacgcaacacccttgtgtgtgtgattttctgcatgccagattgggcccgcgacaccctcgcgtgcgcgatttgcctttgtcgcatgtttgattgggactgtatcgtcctcacccgtgatttaaaaattgaagatgttttttgtcgaaactatggaatgtcgaccgtatctgacggagcgcggggctcctcaccgggagaccgcacaggcccccctttgccggttcggccgggggctcagggtgagatcccaagctctctctgtatgtggaaagatcgcgacctatcgaaagagcatgaaacataagcgatgtatacaggttcgggccgctgagaagcgtaataccctactcctgtgtttttgtggatctgagtatcaaggagctacaaagtgtgagccaacctcccccttcttctcctttgttctcggtccccaatctggaaaagatccttcttttatacttcaaggggataccacatgcacccctctctttccaaactggacttttcttctcttcataaatggacggagatttgcacggttgtcctccgaacatcttcctgacgggacggcacacacctacctccacttctgccggaggcaggcgcgtcgtgggaatgtggctgtgtgctgacgacatgagcagtgtcagaccggtcacaaatcagtcattcttgtctaccacgcgtcagcttagcaacgtgcatgtttgcccttcttcacacaacatcttgcctgtaatggttaggatgaagcctggcatatatcgactggggctaacgtgccatctctgggatgtaacacgctagctccagctggggacgagtgcctagaagctctcgtcttgacgggatggggcgaagcgtgcgtcagaccgcctgtcgccacctaacccgcgatctgaccggtctgtgaccggtcacagaccggataaacgagtgcactgcactgcacttcgtgcggtgtgacacgtttagccgaggcgcaataaatgcggttaggtgagccccgctgggctcacccaacccatacacgcggaggagaaaccgcgaggggtcggggcgcctcggcccgtctggggcgaggcaggagtggtccgagcccccccctcggggagaccaagaggtgggcgcacacatcaccctcgggcccgacgtctcccgagggtgccaggccacgtgggtgattgtgtctgcctcaagcctctagtcatgatactcccggtcccatgtcaccgacagtatccgattcccgtcacgcgtaacattcattgcaaagtcattactcgcaaacgaactgcgaaagagagtccgtgtgatgtagataccaagtgaatgaaattcgcagactccgtatggatatcatgtacatcgttgcttagatcatccgattctattcgcattacacaacacgattcctaggacatgttagcataatttcaagtcagtctccacacatgctcgtatgtactattagggataccattacaataatacataagaatcaattttactttcgaaaagagcatgccaactaaaataaaaagatgatcgaagttgttgattccgtccgtcatcaattcttgcctgacttgagataaagctggatgacaaattgggctcgtgtttgaatgcctcattgtttggcttatgcttattcctataagccgaatttaaattttagaacttattgacacacaaatagccttttatttggtaataagtgattcaggtatgcacatgaatagacgaaataatgaactttgattatttatctactgacatatgttcaaattaaattggctctacccgttgcaacgcacgggcatcttttctggtaaagaataagtaaagggacctgagttagacttttgggatggatggactccacagggaggagggggagtactgggccggttgtagtgctgggcctgccatgtgctggaagaggaaaagatggcccaagtgtaataggatccttttggataattgctaggaatttttgtattttgccaatgagtttggattagaattttgaaaggaatttgtattagaatttgctctggagattgtaaatggattgtatagttggacatttatcttgcctttgtaattggactgttaaataggatgagatttgattcggctgcttagtcgatcaaggactaaacttaggatttctttgcaattgcctgaacgaacggatgacgatatcgaagaggggtttagaatcggcgcatggcatacaaattcattggatatttcaaaggtagggacaatttcaacgatatttggatcaacacacgacggtcgacttcgccgaacgattttagggttttaaatgaaaggcgaactcaaggattttgagtaaaaggaaacagggaaaaagaatctgaggaaggctgagtggagtgtttttcgattcaactctagtgttccaaagtttcgggaaaagatacgatatagcaacaattgaaaagggtttcgggacttctattagctttgcaccaaagtgcttaacgaaacagacggagaggggagaggacaaggaaggacatcgaacggaggacatcctttagaaggaacgatttaatcatagtagtcaaagattcaagggaatgacgcaatattgtgataatagggttctcgggatatgattatggaattgcaattacggaataatggtgggttgagaggtcaatgaagggagattaccttg

SEQ ID NO: 22915 - DNA, 5009 bp, Oryza sativa
cggaatttgaatcccaagggatttaatgtatggcgagagttgggatttacaaggattgatttaatcaagatctttggcacaaaatcctaaatgcactcaaagaaaacacatgttctattgtgcgagctgggctaggcccttcagggaggaaaactagacgttttcatgaattatgttgaaataagatctttttatatttaggtttgtaaatagagttttgatggcaaattctcactagcctttatttatagaacaaatataaaagattatttcttaaaaaggattttcaaatattaattaatcaatattgataaaataacttcctccgggaattgtccctaaagcggttttctttaaagatttaatgattatagacattcgtaaatcaaacacccaaagggggttctaaattataaaaacaaggggaggaaaatgatttatctttacaaatactttcttatttcataatcatagttcttttaataatatttgaatccaaaatagattttattccagattcccatccttgtggtccaagcacaacagaaaaggtaaaataagatccaataaactccagcacgaaggaatttggaaaaagatttttgattattccgaattttgtttttgtatttcaaattcgaaattttcaaggtgttacagaggcgccaaagtggtggctgcgcattgaaggttttcgaacggtggtggcagcagagtgtgacgggaacctttcgtgggaggggcgaaataattatgggcgaaagctatgccttcgggccggcaacgacgacgcctgtgggtgccgtcttcctcttggggcattgctgcataatctcgtctctcctagttactttcttctcggcgtcgttttgaagattgctagttcttgttttcgctctcatagcaggtgttgtggtagacgtgcggtgtggctgttttttcttttctgactatagtcttacaggactatagacttgtatttttctcctcctttatcaatacatgaaactcgcgctgtcttgtgcggttcgtttaaaaaaaaattctttatgtagaagcaagtatgctgctagagtacaagcttacatgtgtttaatttatctgttcgaagtaacaattaaccgtactttagagaaagtaagtacatatagagaaatagaagtaactgtgctaatattttgtaacgaacaattggctttacaaatgattgtttcagtgaaattgggttgaaatatacttggatgttggagtgaatgtgacttactaacgtcggtcagttgtgatatcttgaaatagttgttttgtctaattgtgacgctcttttgaggtttacttcaagaaagattcaccattaacattgtaagtttctttgtctacaatcttttagaaggctacagtggtacactgatattttctgctactattgaatagttgacataaataaataccatatatttgaataagtaagaaggaagtcgttttgacattagtcaaaatcaaaatgttttaggtttgaccaagtttatagaaaaatgtagttacatttttaacccaagacaaatatattatgaaaatatatttaagcatagatttaatgaaactaattttggttgtaaatattactatatttgtctacaaatttcttcaaattaagtttaactttagccaaaatcagaatgtgttataatctgaaacggaaggaacggaaggagtaacaagttatactaccatatttgataaaaaaaatattccacgatatattataatatgttttctcctatccagaacaaagcatggagattttgctaatagtaaatacatctcaaagataactatatatcattattcaacgagcaacagcttccaatgaatataatggttcacatccttcctctgggcgtgaggtggacatgaagcgggtggagcttgtaggcggtgagctgcacggtgtccaccttctcctcgtcaccctccctcagcctccacccaaactcctgcacgaagcgcgcgatggcggcgcacgcgatgtgagtcgcctgcaggctccctgcgcagaccctcctcccggcgccgaacgccatcgtcttgtacatgtccgccaccttgaacctcccaccggcgaacctctccggcgcccactcctccggcgactcccactccttcttgttcatgttgcacccatacaggttgatcaccatctgaaacagatgaccatcacttgttagattttcaggggattttgatcactgctcggcgggccgaccagtgattgaaatttcggactcccccagcaagcaattatatcccgcccgagaaaactttaggagaagtcaataacaacaagtttgtccggtacgattaaaatataagaatctaggaccagataggatatttcttaatactacgaatcagaacagaggaaatatcccatccagttataggctcttatattttggaacgggggagcgtatcctatgcacacaggccttcgcgtgtacacaccgtgtacaccaactaaaaattatcacaaaaaattctaggaaaatttatacatgtactttcaatagtattacatctacgtgcaaagtcgcatcttcaaattcattctacatagagaataacaaaaaagataaaattctgacaaaatagcaaccttaaaactgtcagattttttctttgttacggctaaaatataatgaatttgacgttaagattttaaccctaggtgtaatacaattgaaagtatgtgtatgattttttctagattttttggtgacattttttagttggtgtgcatgtgtatacacttgagggcctgtgtgaataggatatgttgccttggaacggagggagtattgaatttaacgggatgtgccaaggcaggtttgaaaaaaggatatagaagaaaagtggagcttagtcttctttttttttcttagactagaaaaaatacccgggtgaagtctattttaatcttcttattgttatatggtttagttaagatgaaattcactgtgagagttcgcttggataaatatatttttagaaaatcatgagctgtagttaggaatccgatcatcccaagttagcatgcgagtttttttaaatagatttcttatatgattccttccgtattacgaaaagtgaacgatcttaaaaaccgactcaaacatggatatgtatttccaaaagcaaacgaacttaaaaaccgactcatacacgatgacgcaccaaaataccggcaaaaacatcttcaatttttataataactagaaaaaatacccatgcgttgcaacgtgtgaagtctattttaatcttattattgttatatggtttagttaagataaaattcactgtgggagatcacttgtatatatatatatgtatatatatatatatatatataatcatgagctacagttaggagttcgatcgtctcaagttaacatgcgagtttttttaaacatatttcttatataattccttctgtattaccaaaagtaaacaatcttgaaaaccgactcaaatacggatatatatttttaaaagcaaacgaatttaaaaaccgactcatacacgcatgacgtaccaaaataccagcaaaaacatcttcaatttttataatagtagagatagagatagagaagatatatagattaaaatcagaacataaaattaaaaccgactcaaacacggatgacggatcgcagaaacatcttcaatttttataatagttgagatttcttgttttcttatggtccagtgtagatatagaggttgtatttttaaccattatctttaaaaaagcctttcattatcttgcaaagtttttatgaatttagtcaaaattttattcaaattcaattaaaatttcaaataatttcgtgcaaaaagaagtaccaaaaacaccaaagtttgtgaaatttttggccgaaaccgaaagtgcaaaccctgccggcccgccattgtcacatggttgtgcttacctcggtgccggcggggacatcgtagccggcgagcatggtgtcctcgttgacgaacctcggaggtatgagcgggacaggggagtggcggcgcagcgtctcctggaagacggcattgaggtacggcagccacggcaggtgctcctcggtgaccgcctcgtcgccgcacacctcccggatctcttggtaaagccgttcctgtcataaatgccaagaatgccaagaaaaagaccaaaaaaaaaagtattggttgataaagccaagaatgccaaaaatgagctggaacagagtaacaatatttcttgcctgtttgtcagggttcttggcaagctcatacatggcccattctgtggtgaccaaggtagtatctgcagcctctatgagtgcctcccacactagcatcattagttgctcatctgtcagtgtgttctctgccagcaagaagtccagatagcatgtccttgcctgcacatatatctcagtttcatggagtcaaaagaagatgatctcttcaattgaatcattttcctgatggctttagattgaattaccatcaaaatggtgtgttttcagtaaggccaatgtatttagccttaatcaataatagttatattgagagaaataagatcatttgaaaacttaagatgccgctcaagattaaaatcttcatgtggtacttgctcgaaggggttgttttaaccaaagataatttagcaagacgaaattggaatggaagcttaagatgttacttctgcatgaaaaatgagactatccaacatctgtttatggattgtcattttgcgaaatttgtttggagggcggtacagtttgcttttggtttatacctccctaataccatatcccatatgtttgatggttggcttttggggttgacaagaagaagagcaaactaatacttgtaggagcatctactatatgttgggctcagtggttgagtagtaatgatttgattattgacaaattaccatctttctcatatatgcaggcaatttgggctgcaggaat

SEQ ID NO: 22916 - DNA, 678 bp, Oryza sativa
cccacccatcaatgtcttgccatctctctctcgattgatgaaggtgagattactcatcaatataaatttcacataaactggtttcataacagttacatgctacaataatttccatttgcgttctaagaactgtctaataattcttgcagagtgctattggtgagggtatgacccgtcgagaccattcagatgtgtctaaccaggtaaacatttggactccatacatttgatttcatttaagctatggcaaatacttacagtggagctcatttatgctgtttcatgttacagctttatgccaactatgcaattgggaaggatgtccaggccatgaaagccgttgtgggagaggaggcgctctcttctgaggatctggtttgtcactaataactattgaaataatcccatgctgatgtctcttttagaagtaaatttaatattctatctttatctgcagctttatttggaattccttgacaaatttgagaggaaatttgttacacaaggagcatatgatacaagaaacatctttcagtcacttgacctagcatggacattgcttcgcatattccctcgtgagcttctccatcgtatccctgcgaagacattggatcagtactacagcagagatgctacccactgatctatgttcagaaaaatcaaatgttttctctcaag

SEQ ID NO: 22917 - DNA, 2161 bp, Oryza sativa
attttaaaagccaaggggggccccgggaccagccacacatttccactgacacgcgctaccatttgctactatttgcatgcaaaccacaaactctacaaacaaagccgcctcatttctccaacattaaaacctctacttcccccacaaaaaaaattaagaaaaatcgattttttttcctcctcctccacttttcttcgcttcctcactaccaccttctcgttgatcctcctccccgttcttggctcccctcgcattcgtcctcacttcccttcttccatgggggttcgccgccgtgagtgaggaggaggaggagtagtactaggaggaggtgaggccatggagagggtggaggatccggacctggaggacccgaacccggacgtgggggagctgttcagccactacgacgggctctacttccgcggcgcgctcgccggcgccggcttctccgtccagtggagctcgccgccgtcgcggatggccgggtagggtcccttgctcagctcactggccctctcaatctcttgctgagggtttcttggaggagctgcattcttttctggtctttttttcttcttttttaatatatccagaaaatttgcagttcatgggaggagttagtagcatctcggtgtgatgctgtgggagaaatctttgtagcacacttggggtgttttgctttctctgtgattctctgcacttgctgctgctgctgctgctgctgctttgattttttttgttcgaatccctagcaagagacggattgatcatctcttctttttccgggcgatttcagagggagggagggtttggttttcttggtttgttagttctccatccttcaatcgacaagcttcagggtgttggtgatctttcacgaaaggtttcgtctttttagaaaaaaacgcgaatattagggaagtagctaatatcaaatactaattattagaaggggtggcttcgaacccaggtcccactaccttgtcgagctaatatcaaatgctaattattagaaggggtggggcttcgaaccaaggtcgtctagcccagtaccttctcgagctaccggaagacctcaatttcgtctttttagcatttggcacttgaagtgacataaatggcgccgcttttgtgcacttcttgctgagaagagcttcttgtctacaagtagatcatgcatattgtagtttgcatcgatatagattctttttttttagattggcactttggggggttagtactcaacggaaaccagtaatcgccggtagaaaaaaaatgttttgggatgaaagagaagtacataatctgtgaccaagttcattcataactgtctcttgttagtgtgcgggtttgcttaatgagatttgtgcatgatttctagtagtacctacttttggatcacttagacggatagtaaagactaaaaacctttaaaaattaaatcattagcagttcattatactcggtgaagtaggctgcattcattgggtagacaataagaagtttggtgatgcttctagcattctgcttaatctgatggttggccgggttgggtaatgggttatgcatgtacagtacagaataggttggggagatcatcagccagtgacgtggatgaaacagcatgtatctaaaagtttgtgtcagatagcatttccccatgattgatggcttcagttaagcaaatcctcctatcttcttgagaatacagaacatgcttcactatcacatcagataaactttagcaagagaggaaaaaaaatgttgattttgggattaaagatgcttgttagtatataactattttgttcaataaatagctgccctctgtaaagatttataggtacatcttggggaaataactagtttgtttgtctatgcagttcttttggatcgtgtaccttcggaaaaccggataataccataacattgtctgaaactgtgctgaaatatcgctcaagtattgatatgaagaatgcattgctgcatcagatgatccatgcaatcttatttgtaaagcatcataggaaggactgccggtaaatgtttgcttgtgttagctaataaatcttgttactctctgcttaatttcagtgaattcatgcaggggtcatggtcctatttttcgtgcttggatgactgctattaacacctgttctat

SEQ ID NO: 22918 - DNA, 708 bp, Oryza sativa
catcacagtacaccatgaaatccttgcgagtatccggcaagattaacaccggcgaggaaaccagcttttctttgagagtctggaacgccttctcgcattgcgggctccacacaaatttctcttctttcttcaacaactgtgtcatgggtcgagcgattttggagaagttctcgatgaacctccggtagtatcctgccaaacctaagaaactgcgaatttgagtgactgtcttgggttgcttccaatcggtgacggcggtcactgtttcggggtccacagcaactcctttagcagatatcacgtgccctaagaatttgacttcggacaaccagaactcacacttgctaagtttggcgtacaattgatgttcccgcaattttcccaacaccagacggagattgtcacgcccggaaattcactagtaatttccgaacttatttgtgcataaaatcctcgtccaggaatcagccgacgtacacaaactgacaattcaatatacagattcatcaataactaaagcgaataaatacttacttatgaggcacttagtcctcaccatgaagaaaactgcagcggaaaataaaatctagcgaagctccggctccactcccacaggcagctcaactggggtataagccaaacgtcttctccttctggatcctttttcttcaactgaggttgattgattattgcaaggtgagcatatga

SEQ ID NO: 22919 - DNA, 1687 bp, Oryza sativa
aataccctactcctgtttggggatttgaatccgccgggtgtgtattgatctgacgatcaggttgtgtcatctgccccctagagggcctcctgcccaccttatataggatggggggcaggattacaagatagaaaccttaaccaatacggtatcggtttcctaaatctactttacaatattatcaaaccaggactttaggccgttccgtaatatacaaggaaacgtaacacccaagtcatgatctgttacatattacataaatataagttatcccctataactagtcggataaccatgccgtgtgggtatgggatacccataatctccacagtagcccctgagaccttcacagtcggaaagataatcttctctcgaactagattactccaaagccgagtgcttcaatcatcttcgccatgatctcccgagtactttttccaaatcagaagactgtggagggctgaaaaaataaagtcagatgcatcgaatagatgcacctgataggtgtaacccccgactatgtggttagctgaacaaaccaaacatatagtcaaggaataagttatccaattaaccgggtggtttttgataattatagtcaaccaagtgacttgataccaatatatagtatatgcggtgtgaatccccgaataatatgatccaagtgatataccgactgcttggcaaaatatgatgcgtacaacctaaagttgacaacatctttgaaagttcacatagcaaaacaactataaagaagcttgaatgctgtgaataaagaaatttccaaagtattgggcatacgccatgcgcacaatgctttaacagatgtgcttaagtccctaaaagacacatggtttcaccacacctggaaatatatggcatatgtggtgtaaaatccgagtaagtaaactcataaaggatttaccaaccgcctgaaaaatgaccataatatataatcagcctaagccataatattggtcaataaaaatgcacacttacgtggcaaaaagcaatgatattgtatccaatcaattgcttgataaacccaaacagcaccttgactatataaaaaagtcagcggggcagctatataaagctttactgtttgacaccttttaagatgcattgtaccaactcctaaaaagtcgagtaactgcggtataaaaggattttaaggtattgggcacttgatcacgcgcactttggcctaagcgaaaagtgcctaagtccctaaaagaacgtgacaggccacacctgaaaatataggctgcagacatattaggcctaggccaaaaaatacgccttcgacaccctttaaaggatgacgcatgtaacatgctcccgagtaataaatcttctgggtaatatagaccaagtgtagctcatatgaatagcttctgatctgaatgattatcccttatgggatactccaaaataaatataataattgaatcccgactggcgcaagtattcggttgatagcccttacggggaataataattggtccagtctttaagcatagaaaatagactcatgactatgaatccatgtggaatgtatccggaacaagtccaaattgaaggtatgatacttgtgtttgagctagtaagcccctgagcatatagcttgtccttctgtcgtagtcaccattgtccattgatggtagcaatcaaaagtgatgaagtt

SEQ ID NO: 22920 - DNA, 1342 bp, Oryza sativa
cctgcaccccgtggtagctgtataaaccagatgtagaggcgagggcactagtcagcagtagacgagacgaccggcgatgaagatggtaaggccaatcaacactggcagaatcatgcagccatggaagtgaagaaaccagtcggcagccatggcaaacgtaggcagcttgtgttgaagataccgatgcctattagtagtgacggtgatgtagccagccgtgaagaagatagcatcagttggcgttataacaggccagccgtgcaggcggtgacaccagtcagcggcggatgcggcggccggtcggtgaagacgtagacgcccaacaacggcagcataataagtcagccgtgcaggcggaagcaccagtcggcggcggacgaggcggccggtcggtgaagacgtagacgcccaacaacggcagcataataggccagccgtgcaggcggaaacaccagtcggcggcggtcgaggcagccggtcggtgaagacgtagacgcccaacaacggcggcataataagtcagccgtgcaggcggaaacaccagtcggcggcggcgaaggcaagccggtcggtgaagacgtagacgcccaacaacggcggcataataggccagccgtgcaggcggaaacaccagttggcggcggcgaaggcaagccggtcggtgaagacgtagacgcccaacaacggcggcataataggccagccgtgcaggcggaaacaccagtcggcggcggtcgaggcgagccggtggtggtgttctgactgatccattcctggagcgtaagagataagcttaaagccatgaatcccttttatgcatatctggatctggatcctgcagaacaaacatataggatgagtagtatctgatataaatataatactcgagaaaaatcaagtattttaaaatatttataaatatgtatttctcctcttgtcaattttgatttccccgagcagatgactctgtacgtttaaacactctgtctgactagtcatagcccccaagcatcgggagtcggcctaggcatttcccaaacatggatatgagtgacatgagttcgtcattaatggaacaaagtttcacggatcagaatttactactcaggtacttttgcaattattaagagcaaaaataaattatattatctctatgcttttgatttcttccgagtaatattagcaccttgcgttactcggtccatccaacgagcccccgggtgctaggaatcggcccaaaggcaaccatccattggcaaaccaaacggaaagcataggaagatagaactccataactcgataggtacttttgtactcagattatgtcgcaagcaatcaagat

SEQ ID NO: 22921 - DNA, 2451 bp, Oryza sativa
gtagacgcccaacagcggcggcataataggccaaccgtgtaggcggaggcaccactcggcggcgacggaggcaggccggcggtgaagtcgtagacgcccaacagcggcggtataataggccagccgtgtagacggaggtaccactcggcgacgacggaggcaagccggcggtgaagtcgtagatgcccaacagcggcggcataataggccagccgtgtaggcggaggcaccagtcggcggcagacgaggcggccggcggtgaagtcgttgttgttatcagcaatggcagtggcgaagacaagccggcagagtggactcgtggccgatcgaccggaaagcttcatggtccaaaattgattggttgcatgcatgtgtgccaagtgttcggtccgcagtgcatgctatctcttgtcttgactgagcctgcaggatccaaatctggacttccacaaccccgatatgaaatttatatgtacgcaagatgttaatggcttataacacattgtccggttggcaataggtacgcgaatgagcatgaacgacgtttcgaggggtgttgtcaaagaaaaacaaaggtaagaaccactttggcaacaaattcgacaaggtcatcagcgattcttatacgagtctacgcaacggtcactaaagttccaatagcatgtgaagctataaacatatcattcaggttcctaggcatcaaacttcgccaatgttacttagggtgtgtttgtgaggaggggaaaagagaatatacgcaaaaaagggtgagtcatcagcgtatgattagttgagtgttaattattttataccttaaaaatggattagtaggattttttaaccaacttttgtgttgaattgtcttgcgaaaaacacaccgtttagcagttcgagaagcgtgcgcgcggcgaatgtcgcgaccgggaaaattgccttttcccgaacgctagtgtattaatccccgtcccaggaaaagccggggtacaccatacaaacatgatataaaagacacatctttattatatcgataatatttacattattacaaaggcgcttcaggcctgacaatcaaaaataaacagcagcggactagcgggcctacggctccatcttcacaggcgctcaactggggtataagccaggactccacctaagacttcttctccaaagcttctcttactgaagaggggaaggattgagcaagaatgagtacaaccacagtactcagcaagccacaccggcagatgcatgattaatgcaagggggtacaaggagtaataatataggggttaagttttgcagaaaagcagcatttaaaagtcacttagttgcccaaagccattttataaagacgatcctagagctacacagtattattaaacaaggccgtgaaccctcacgaacctgccttaacccaaggcctatgatgattcagaccgaactggcaacccgaccctgggtcccagctcgtcctaagccaacccaggccaaccattccacattttagttgttgagcaaaattttaagaattataacactgacttgggtacattgctcggcttgcccataaccgagggctcggctattcgaatagattatactctgatcagaggtgtacatctttacccacaagacacgtcttcctcacgtgtaaccacgtgccacataccaccacggtatacagacggaagacgtgacatagtttctaacccatcctagccttagacaagagtaccgacccaattccgcctacggccggaacccccgggacaggcagacggaactgagcccctcgcagcagggcaccaaccctgtgctttttgacatctcgactaccgggccgcagctcgtgtagccttcatttgccctggagaatgtccatcgacccccgacttcatccatctccaatccgtgtacttttgtttatgactagactgagccacaaactaagccttacccactagacatgtggaagtacggtagtgctttgcaacagaggcccgagcttaatccttatagtggccggggtgctacttcccacaactggcatgcacccaaaccccaccgaaaacaggttttaggggttttgaaaggggaagagaggtgtatgtccaattccaccataaaccaacaattccagagtgtccaggtgatatgaaaatttcccaaagtctatagttgtaaaaccacctaaggttacctaattagattgcgaagcatctacctaaaattaaactagtggtgtcatgagtagagagtccactagttgaggttttgtttgcctagagtgaacaaggtagtaataataacaataacaataataatatggtcataacaaaggtaaataggcatggctaagtaaaacagtgataacgcgggaatttaaataaagcgataatgcaataatttaaatcaacataagtttataaaatgggattcaatatgatcaag

SEQ ID NO: 22922 - DNA, 1199 bp, Oryza sativa
ttcattcggtaccgtgtttccttctgctatcatcacatcaaaaagccccaagcactcacgccaatccctcagctttgcatacaacgcaagaatgacattccaagacacaatgctcctctttggcatgccatcgaacaccaacctcgccatctctacgtccccagcctgggcatatccatccagcattgagttccatgacacgacatccctctccggcatcgcatcaaacatcttcctggcgttctccatgtccccgtgccgagaataccccgagatcatcgagttccacgtgaccacgtctctccgcgccattccatcgaacagattcctcgcaccggccaagtcgccctcagccacatacccagccaccatggagttgtacgagacgacatcccgctccggcatttcgtcgaacaggcggcgggcggcagggaggaggccaagccggaggcaggcacggaggagcgtgttccaggtgacagcgtccgggcgggggatgtcggcgaggaggcggcgagcggacgccggggagccgagggagaggtagagcgagaggagggagttggcgatgcggaggtcggacgggaggtggccggaggagacggcgagggcgtggagcgcggaggcggcgggcagggagtgcgagtggtgcttcgaggagacgaggaggagaagcgtgaggtggtctccggggaggaggcggaggagcgcggggaggaggcggcgcggggcgtgggggaggagggagttgaggaggcgggatgagagcgcgcggccgcggtgggagtgggaggccgaggcggagaggccggaggtgacgacgagggccagggactggaggaggacgcgccatggcgaactctggccagcggcgaggcgaaggcgcggcagcaggtcggcgtccaccggcggcgagcggcggcgcgggaagcctgtggtcgagggaggcatacggtgtacggcccgggcggtttgagaagagaagcactttacaaaagccaattcacaagagttgttgtacgcaaacaattttctccacgttttcgtttggcatcgactaggcaaatcgccggtggatcattcacaagatctatcgaatcgagagactataggcctgtttcaaagagcttctacagaattagaatctagaaaataaagtataaaccaaagctgacaaacctagttttttccatttctta

SEQ ID NO: 22923 - DNA, 1082 bp, Oryza sativa
actgatacaaactcagtggcatattgttgattatctcattaagagagtgttcgctatttttttgaaaaaatgaattaatatgattttaaaaataactttcctctagatttttctgtaaaaaacacgtcatttagcagtgtgagaaaacacgcacgtcaaaaacgagagtaaaattgggaacatgcaccaaagaacacacccttaatcaccaaccaaacaacctcttaaaaatacatccccgacatagcattttgctgtcaattcattaaattttattgcaagtgtcctcaacttcactaaaacctcattaaaagtatacctaagtatactttgtgtgcataatatttccattgctgtcaaagaaaccagttcttttctacagtaccacttaaagcaattctccctccactcgtcgcacagaacaggcctcccattgcacggaacaccccttgtacattttcacccttccatggataaataagggaaaatacttggaaaccgaagtgtcttctgctttaaacaaccggtcaatcaaagctctgggaaataaaatgcccatgaattttatattttactgctgctagctcctatagtccctccggtgtgataatctaacagttcaaacacagcattctcaccctgtgcttttcaattaactgtatggaacaagggtaaaggaacaaccatagttctctaaaaaaaaaagctccagacatgacgattagcttctaatgataaaatctgagagaagcaacaaaagaaaggtcggtatgcaaggtgctacatgatgatcaccaatcatcactcattcgtgctgctcgtatatttgcatgtaggcttctgaaagagctaccatctgaggaagagtctcggtaacatgaagatcttgcatttcatacctaaaataaggaatggaaaatgatttacaaggccctctcaactgcaggcacaaaataaatacccatgctaggaataagctgaggagcataccaagcctcttctgatttccgctgtacaaatactctgtaacatccctcgcctggcttgccatcatggacaacgttggctatgagatcatactt

SEQ ID NO: 22924 - DNA, 1201 bp, Oryza sativa
tgacgctggtggcgaaagtggcgtgggatggtcgggagatggagctgcacgttgtctcgtggggaggaagaggcagctcgtcgtcttgccagaagcccctcgcggattttctttttcttgtttttttggtttactaaaggatgtggaaggacctcgttgtaaaagaagctttaggaaggatctagaagatatttcgccattttgagcgatccgacggcttccatcatttgaacgaagaatcggacggctgatgttttcttaacgatgtggcgcagtcatatctaaaaaaaatctaactgtataggggtaaatatggaaaaggcagcaccggtgcccgaaataaaaatcggagaaaaactcacgcccccattccctcccctctcccctctccgccctagagctcgacggcggcggcaacaagggctgggggatgaagatatccgtgaagacactcaagggatccaccttccagatcgaggtggactccgcgcagaaggtatgctctggtctccgcgctctcgatctgtcggtcgcgagcgccgatttcgtttctttctttttctttttcttttgtggggggcgatctaggaggtggtgaccggattggggttaggtttgtttctacggctacgcaaggctatagctgtggatccaatctgattgtgtgattcgtgttactatatgtgattgatttctttgatggttggataactggattggttattataggtagtagtagtagtagtagaacagattaagttaaccagattgagtcatagttgtttcattctacgtgctatttataactgatctaatttcttaaagcaggttgctgatgtgaaaaggataatcgagactactcaaggacagcacatttacccagctgagcaacagatgctcattcatcaggggaaggtgctcaaggatgacaccacattggatgaaaacaaagttcttgaaaacagcttccttgttataatgcttagacaggtgggtacagcacctgtttgatgttatatggctattacctggcgcaaaatcatgaatatcatacttatcgtacaataatccatggaatgtcaaggtattcaactgcatgatcactatgcattttaagcatttgttcagggtatctgcagctctcagaatgtagtgagctatgttatgtattggaattgctttaaaagatgtagggcttcat

SEQ ID NO: 22925 - DNA, 12735 bp, Oryza sativa
tagcgagtaacgtggcatattcaccatagatgtcctcgacatttacttctcctttgctctatgtcacgcccggaaattcactagtaatttccgaacttatttgtgcataaaatcctcgtccaggaatcagccgaggtacacaaactgacaatttaatatacaaatccatcataataactaaaccgatatatacttacttaagaggcacttagtcctcaccatgaagaaaactgcagcggaaaataaaatctagcgaagctccggctccactcccacaggcagctcaactggggtataagccaaacgtcttctccttctggatcctttttcttcaactgaggttgattgattattgcaagaatgagcatatgacatactcaacaagccacacagcaaatatgcaagtgcacaaggattccaaaggatggcataatataggctcatttgcaaaagcagcatttagcaaagatttaagataagtaaaacagtagagtaattaatcatcaatcttaatcaacactgaacagcacacccatgctgctcaggcccaaccatcctgaacaaccattcccggctgtacagatctaactccaaaccaggagctaagcaaatcattaccagttataaccatcaataattattgtgagaggtgtgagactaatcatgaaaaacattgctcaactcgcccataaccgcgggcacggctattcgaatagattaaactctggccagaggtgtaccactgtacccacaagacacaaccccacatcatgtcaccatgtgcctcagtaccaccacggtacctcggaaaggagttgtgacaataccccttgcacaacataacccattacagcgcacctttcctggatcataatcactcccttataaaacaaggcatggactccccagcgacccccgtggacttctcgccagttctcagtctggcgcactataatgaatcacgctatacaaaagataaagccgttgcccatgctggcttgtggttggcacggtaaatgtttcacaacagtagctcgcgaaccggtccttaattgccatgagcacgaccttcaaaaccatatgctcacaacccaccattaatcatattttaattaccaattaattatcataacacgattaaccatcgtgagctaccattaaatataaccatgaataataatgtagtatatatgattcatcccattagtgagctaatgtttctaagcattgctaagcaattatatatataacatttagctgaaccaaaccaatacataaggttcaagctaatcaatttattacccaaggtatcaaggaatagggcattcaatgcaaattggccttaacaaaggaataggttcacaccacccggtgacattcgaaaataaatgcacagttgaaataaatagagaatttaaatataggatcaacatgctcaaaggattgtgtttaggatctgtgtgacttgccttgcaataatcggtcttcaattaatcttcttgatcacttccgacgcactcgcgaaccttcgcaacgacggaaacaacaagctaacacgcaaaacgaagtaaaagactaataaaaaccaaataaacaatacatataaagtaaacaaacacgtagatcataattttagatgaattatgagacttgaacagcctcattctgacttcaaatgaatttattatgagttttacaagattaaatctaattaaagcccatttaaaaagaattaaataaatttaattcaatttatggacaattttaatatgtatatctttattttatacaacttttgcaacttgaaccacattaaactgagttacgatgatttagttatgattttcagaagatttaatctattaggaaaaaaaaaaagaaaggatgatgacgtcagcatgacgtcacccaaggcagccacaggtcggccgactcggacggcgacctcgccggagctagggaccttggccgggtgattggaggacacctacgcgtagaggacgacgaggcgaacccaacggtactcaccacaacgtctaccgatgaccgacgacggccggcgacgaagaggacggtggcggcggttcgggttgacggcgacggcggagctccggtggtcggcggcgaagagggacaggcggccgaggttctcctcaccacggtgcacctaacggcggcggcggcaagcggcggcgacggcgcaaacggcggcgcgacgcggctgaagacggccggcggcggcggcgggctaaaaggcggcggcgcggcggctaggaggcacgggagaccacgggagagggggcaaacgaaagagggcgacgaggtggtcctatatatagcattggattgaagagatcggactccaaacgagagaaatcgatccaagaaaatcaaaactcggttttggagataaactcgaaaacgagtttgattcggataggatactcaacggattgctccgtttcttgaggggaaagatagaggagaacgagaggatcaaaacccctcaatcaatcggacacgaggagaccggattggggtggatttggaggcggaaggcggctcggtcgggctcggcatggcagccggccggaggttgaagagaggtccgacatgtgggccccacatgtcggcggctggaggaggagagggcgggcggctcggctgggccggcttgggccgcgcgggagagagagagagttgggccgaattcggcccaacggcttaggaaggggttttttgaactttcttcaattaaaataatttgtgaaatgttgtttcatttattaaaaatacttcccttgctcaaataattcccagaaaattctagaaaatagaggaacaagcaaagtatttaataaaattttatctagctcaattttatattgagatttagcaaattaaaattagatcttctcttttaagcttttaaaattatttctaataattccttttaaacaacaatttataatttaaggattttaaacaagaaaaactcttaacaattataattagatcattattgatcaaataattactgaaatgttctttgtatcatttaggaattgagctccgaaaaatccgagaaaattccagagagtataattaatcatggagaatttaataaaaattaaatccatccatgctttaaatttaggaaattttatttcccacaattaacttcacttgcaaattattgaacatttcatataaattctattaataatttattaaataatttataaatcctaagacgaaaatcagggtgtgacactctatacgctctaaggctgcctttttggcatccggagaaaaaaatccctcgttcgccgcgcgcacgcttctcgaactgctaaacggtgtgtttttcgcaagacaattcgatacaaaagttggttaaaaaatcctactaatccatttttaaggtataaaataattaacactcaactaatcatacgctgatgactcacccttttttgcgtatattctcttttcccctcctcacaaacacaccgtaagtaacattggcgaagtttgatgcctaggaacctgaatgatatgtttatagcttcacatgctattggaactttagtgaccgttgcgtagactcgtataagaatcgctgatgaccttgtcgaatttgttgccaaagtggttcttacctttgtttttctttgacaacacccctcgacacgtcgttcatgctcattcgcgtacctattgccaaccggacaatgtgttataagccattaacatcttgcgtacatataaatttcatatcggggttgtggaagtccagatttggatcctgcaggctcagtcaggacaagagatagcatgcactgcggaccgaacacttggcacacatgcatgcaaccaatcaattttggaccatgaagctctcttggcctttggttatcatggtacatgtttccctatttaaagccccgatgatccctacaaactcacacagcaaatccgcacgctgtagcaacatcttccaacattgaaagatccctgtccagttcattagcaatggccaaagccgtcgccctactccttgcagccatcgcggcatcggccgtgttagtgcaagtggaatgcgacgcccccgtcgagaagagcttcaacaaggccctcctcgcccctgtcgataagcgcttggatgaggcagctcaggccatcaacgaggccgccgactccgttgtggctgctgccccaccagcaaaaaaggatgaagttgaagctgccacgtggaagcggagaatcttcgccataactgctctcgggatggcccaaggagatgagaagaaagttgctgcaacttcacttgcctacaagaaagcagctaaagctgtcctcgatgccgccccagctgacaagtttaagttgatggatgaatccttcaaagtggctgttatgcaggtaatcgcatcatgagccacacgccaaccatcaataaaggtctactactacatcgccgacattggtagacgaccggacacgtaccgagtatcaacggttatttatgtaataaatgtcgtgcaatcactcattccattctctccatttgtaagagcacaaggtggaaaaaaaataatccggtgccatctaacatttctagttcaaaatgtcgatccttggcacttggcggaactttttttttccatgaaatcctttgaatgattctttaaataaaagtatggagtaaaaatatcttttgtaagaaataacataaaccggaccagcttgcgtgcatcaacgcttcgatatatgcacacatataagactgttgttgggcgactgttatttgccgagattccatgtaaaataaccataggacttgtgacgagatctttcggtttgcccaaaacctccatgttaaatatcccgcttcctaggcatcttgcatttagataggttgcaaagcgccttgaatcaatagcacaactgcgctagcctccttgtttcagccgctggacctattcaaagagttagccaaaaaaatatttatgtacgtagctccctattcggcgtgcccttcagtaaaacgggcatgaatttttcatccgaattctttttaggacttacgacaacccgccatgtctttttttccgccataagtaccatatgagcggctaaaactagaacaagagcatcatacccggcgccgtccaattgcaaagcacttcctatctccaatacgactgcttcatcgtaacccttagcgagtaacgtggcatattcaccatagatgtccacgacatttacttctcgtttgctctatacgctctaaggctgcctttttggcatccggagaaaaaaatccctcgttcgctgtcacgtcctgataaattcatcccaaaataaaaatcatcttctaaaaggaataatagaattaattaaaattcgaaaagaaattggcaaaccttaaaatacgtacaagaaaaattcaaatgtgacccggagaatttttgttaaattctccttggtctaaaaggagccctcaaattttagtggaattttcagagcacaaataataattgaaaagaaataaacaaagttgaaaaggtttataaaaagaaaaaccctaaaagaagtcttctttcccccccttcctctcttgggccggctcggcccaactctccctccctctctctcctctcctccgcggcccatcggcctcccccgcgcgcgcgcgccgctgacaggcgggcccgcccgccactctcgctgacgggtgggacccacctgtcatcgccttcctcccgccgcgcccgccgccgcgcccgtgccctagcgccgccgccgccgcggattccgccgcatcccgccttccccgcgcgccttaatgagaggggaatcattccccgcgattccctctcccgatcccccctcttttccctctctctctccctcggattcgttcgaaatcgcgcccgcaatcgtcgccggcgtcttcaatggagccgagatccccgcggccgtttcctccctctccggccgcgttctccccctctcggtgctatataattgctccccgagctccgctcttccgtttccgccgctcgccgctcgctctcgccgtcggattcgtgctcgcgccgtgctcctctctctccttcgtcgccgccgagctccgattccgccgccgccgtcgctccgcacttcctccttactcggcgtcaccaccatcggcttcgccgcgttgtcgccgaccccgtccgccccttcgcttcgcccgccgaccgccggagcaccgtcgccctcgccgtcccgaaccgcgccgccgcgtttctccactccggccgtcgtttccgccgtcctcgttgtcccggggtgagccgtggaccgtcccttccgttccccctcctctccgctctctcgggcgctgctccgccgcgccgatggtcgccggcggtgaccatcggggcgcgggcgcgccgctcccgtcggccgtgccggcgaggccgccttcgggcgcgccctcgcggctgccaggtggggcccggccgtcagccgcccgcgcccgcgggtgcggctgacgcgtgggacccacggcgccgaccgccgccagccgcgtgctcccggtccaccgtggaccgagaggctgacgcgtgggccccactcccgtggacccggtccgcgcgccctctctcccggctgacgcaataaatgagttttttttaattaaaatttaaatgaagaaattcgcaaatatccatttaaagagcatataaacttcaaatggccataacttggccatttgaactcggaattggaccgttcaagtctctaatttttccttaagaagtcaagaacccatttttgtgctttgtttctgctgttatatggagtttattagagtgaaagccttttcttttccgttggtcgtgtagacgctgcagcttcggaagatccgctcttcgtggaagttgaagccgacgtttgggaaatcgagcaaggcaagtcacatcatctttgaacatattgaatcccagtttgtaaaattatgttgatttaaattattgcattatcgctttatttaaattcccgcgttatcactgttttatttagccatgcctatttacccttgttatgaccttattattattgttattgttattattaccttgttcaccctagaataaacaaaacctcaactagtggacactctactcatggcaccactagtttaattttaggtagatgcttcgcaatttaattaggtaacattaggtggtttttcaactttagactttgggaaatattcatatcacctggatactttggaatggtctggttattgtggaaatgggattcacaccgctccttctattcaaaatccccaaaatggttttaggctgggctcggggtgcatggttttgatagtagcacctcggccatataaggaccggtcttcgggcctctgttgcaaagcactaccgtacttccacatgtctagtgggtaaggcttagtttgtggctcagtctggttataaacaaaagtacacggattggagatggatgaagtcgggggtcgatggacattctccagggcaaatgaaggctacacgagctgcggcccggtagtcgagatgtcatggcacagggccggtgtcctgctgctgggggctcagtcctgcctgcctgtcccgggggttccggccgtaggtgggattgggtcggtactcttgtctatggctaggatggattggaaactatgtcacgtcttccgtctgtataccgtggtggtatgtggcacgtggctacacgtgaggaagatgtgtcttgtgggtaaagatgtacacctctgatcagagtataatctattcgaatagccgcgccctcggttatgggcaagccgagcaatgtacccaagttagtgttttaattctttaaacctgcttatcaactaaaatgtggaatggttggcctgggttggcttgggacgagctgggacccagggtcgggttgccagttcggtctgaatcatcataggccttgggttaaggcaggttcgtgtgggttcacggccttgattaataacattgtatagttctagaatcgtctttacaaaatagctttgagcaactaaatatctttaaatgctgtttactgcaaccctaaccctttatagtataactccttgtactcccttgcatttattctgcacttgtgggtgtgtcttgttgagtacggtggttgtactcagtcttgctcaatttttcccaaccccagaagaggagttccttgaagatgaaggcttcggtgtctagctcgtgcctgccgtcaagcgcctgtggtcgtcgccctagtcttccgctgtttctcgtttgtctctgtgtgtgctgggccttcgttgcccatgtaataagttaactatatacgcttccgcttgttaaactctgaattgtatcaacttttggtgtaccttgcctcctgggacaaggattaatgcacgcacgtcaggaacgcccgttgggttatttccggtcatgacaagttggtatcagagccacccttgaccctaggacgagccgtagatcccaagccttagctatattttcaaaaataaaaatcctttgttatttgtgaaaactgtctagtctctccctgtcttgctgcttcatttatcgccaaaatctgacctttaaaatgttgtttttctttttgtttttgtttgtagatggccggcagcgtcacccgtcgtggtttggacatgactggcttcgtcttggagctgcggggcatgtgcgtggtcttggggtatccacatggagtggactaccaggcccggccgcttccggagcaggagggtgacgatgcagagccccacgctggttgggaggtcactgcagtgatcctctctggctctcccgagcggacttcgctggcagtcaccgcgggtggagattctttccccgccgcttgccagaacgccgctctcctcgccatcggcactcttcaccagcgctacccggacgagttgcagcactcgccctaccgctaccaccctcgtcgcggaggagcccgcgactacgccaccttccgggatgctagctcggaggatgacgctaccatcgtgcacctggcgcgcatggtggaggcatacgacgcggctcgtatcgacttccatcagatggtgcgccgtgggatggtcgagaacaacttgaagatcctggagctgcgtcaggagaacctgcagctcaagaaggacctagacgcggtggaggcgcagctgcatcagctcaagatcgcccagggagaggactgccgccccaagcgtcgctgcgtctgccgcagccagaagatcaccgcccgcaagagcacctccaggcccgagcttgttcgtcagtccctggcgtggacctgcttcgtggagacccctcgtgccgagcccgcgcccgtggttccccaggagggggaagcctccggcgttggtagcacggaggatgcgctgttgctcaccttccgccctggcccgtcgcagcggtagacgagcagttagtaggcttgcgcgtgtgttctttctcgtttgtcttcttgttggagtcgtgtggggcatggttatgccggtttgtggtataactatgtcggagcctgtctttattttgtttgcctaagcaacttgaactttaatgaaccaatttaatcgcagtaataaattcaagaattatggtagtcgtgggtggttagctttaattgttagctctctctgtttgctggttctgtgtggggttttcagatggtgacgaccaggagaaatgctaataccggtgatggcaaccaacctgaaggcagcaaccacaaccaccaaggcaacccacctccacctcctcctccgcctccacctccaccaccagataccaacgccattctcacccaaatcctcgcccagcaagccaacatgatgactgctttcctccaccacctccaaaatccgccacaacataatgctcccccaccacctccccaacactctaaactcgccgagttcctccgcatccgtccacccaccttctctagctccaacaaccctgtggatgcgttggattggttgcatgccgtggggaagaagctagacacggtgcggtgcagtgatgaggagaaagtcgtcttcgccgcccaccagctgcagggacccgcatctctatggtgggaccacttccaggctacgcagcccgaggggcaaccgattacttgggcccgcttcaccgccgctttccggagaacccatgtgcccgctggagtcgtggctcttaagaaaagagaattccgagagttgaagcaaggcaaccgctccgtgatggagtatttgcacgagttcaacaacttggcccgttatgctccggaggatgtgcgggaagatgaggagaagcaagagaagttcttggcaggaatggaccccgaactgtctgttcgtctagtctctggggactatcctgatttccaacgtctggtggacaagagcatccgcttggaggccaagcacaaggagctggagtcgcacaagcgccgcttggcgaacttccgcaatcagcagggtgctaaccagagggtccgctacaccaatccctacccagggggaacctcctcgcagcagcagcagcagcagcaacctcgcccagcgccccgacctcaattcgtggtgcgcgtcccacagccgcagcagcagcagaatcagcaagggactcgtgcgccccgtcctcctacgccaactgtgcagcccgttcaaggccgcagggacgctcaaggtccgcagcggctgtgcttcaactgcttcgagcccggacactttgcggataaatgtccaaagccaaggcgtcagcaaggccaagcgcctccccgctccaacaacggcgggaaggatgtcattcggggtcgtgtgaatcacgtgacggccgaggacgtgctgacaactccagacgtcatcgttggtacgttcctcgttcattccatccccgctacaattttgttcgactctggagcttcccactcgtttatatctgtgccattcgtggggagaaatcagttgggggtagaaaggcttagaaaccctctgctcatcaccacccctggaggggttatgacagcaaagtattatagccctgccgtccctatagaaattcaggggattccttttccctcggatctgattctgctagacaccaagaacttggatgtgattcttgggatgaattggttggctcaattccaaggagtagtggattgcgcgcggcgcactgtcactctgtaccgagggccagaacaaccggttgttttctttgcacctccaacctctgtcagaagttcagaactgcatcagataggtctgtcagaaatccccatagtcagagagttcggagacgtgtttccggaagaactacccggaatgccgcccaagcgagagattgagttccggatagatcttgctccaggaaccactcctctgtacaagcgaccctaccgtatggcagcaaatgaactggccgaagttaagaaacagttggaagagttgaaagaaaaggggtatatacgtccgagtacttccccctggggtgctcctgtgatttttgtggagaagaaagacaagacgaagaggatgtgcgttgactacagagctctcaatgaagtcaccatcaaaaacaagtatcctcttccccggatcgatgacctgttcgatcagcttaaaggtgccactgtattctccaagatcgatcttcgttccggatatcaccaattacgtattcgtgaagaagatattccgaagaccgcattcaccacgcgatacggactgtatgaattcacggtgatgtcgttcggtttaaccaatgcacctgccttcttcatgaacttaatgaacaaagtgttcatggaatacttggacaagtttgttgtggttttcattgatgacattctgatatactcacaatcagaggaagaccatcagcaccatctctgtcacatcctgatttttgtttcaggatttataaattatttaataaattaataatagaatttatattaagtgttctttaatttacaagtgaagtaaaatgtgggaaataaaatttcctaaatataaagcatggatggatttaatttttattaaattctccacgattaagtcaactctctgaaatattctcggatttttcagagctcaattcttaaatgatacaaagaacagttcagtaattatttgatcattaataatctaattatttttgttaagagcttttcttgtttaaaaatccttaaattataaattgttgtttaaaagtaattattagaaatgattttaaaagtctagaagagaagatctaattttaatttgttaaatctcaacataaaattgggctagataaaattttgttaaatactttgcttaattctataattcctagatttttctgggatttatttgagctaaggaagtatttttaataaatggaattgcatttaagaaataatttaaattgaaaaaggttttaaaagttctcttctggctttgggccgaaagtcggcccaaaacctctcttctctctcttcccggcccaagtcagcccagtccgccgcgcgcgcgcgccttcgctcgctgacaggtggggcccgtctgtcagacccgtcgtcctcctcgcgccgccgccgccgcccaaaccctagcgcaagccgccgccgtctccttccaaatccggccgcgcctttccttctccggccaaatcgattgag

SEQ ID NO: 22926 - DNA, 846 bp, Oryza sativa
gaccatttccaggctacgcagccagcggggcaacctattacttgggctcgcttcaccgccgctttccggagaacccatgtgcccgccggagtcgtggctcttaagaagagggagttccgagagttgaagcaaggcaaccgctccgtgatggagtatttgcatgagttcaacaaccttgcccgttacgccccggaggatgtgcgggaagatgaggagaagcaagagaagttcttggcgggaatggaccctgagctgtccgtttgtctagtctccagggactacccggacttccaacgtctggtggacaagagcatccgcttggaagccaagcacaaggagctggagtcgcacaagcgccgcttggcgaatttccgcaatcaacagggtgctaaccaaagggtccgctacaccaatccctatccagggggatcctcctcgcagcagcaacaacagcagcagcaacctcgctccgcgcctcgacctcaattcgtggtgcgcgtcccacagccgcagcagcagcagaatcaacaagggactcgtgcgccccgtcctcctacgccaactgtgcagcctggtcaaggccgcagggacacacaaggtcagcagcgttgtcacgtcctgataaattcatcccgaaataaaagtcattctctaaaaggaataatagaattaattaaaattcgaaaagaaattggcaaacactaaaatacgtacaagaaaaattcaaatgtggcccggagaatttttgttaaattctccttggtctaaaaagagccctcaaattttagtggaattttcagagcacaaataataattgagaagaaataaacaaagttgaaaaggttt

SEQ ID NO: 22927 - DNA, 2614 bp, Oryza sativa
aagtatctattcctgtcttccacaaattaagctcagtcttatacagtcctttgtcttacaaatacctcactatgtcacacatgtttttctgaagctatatgtaccagtatttccatgctcttccagaaactaattgcaactctgaaagttaataccgtggtagtggctggttgcagcaaactagaaccttaacttgctttaaaagattttcttttttccttttaggagagtattggagtacttccttgtcatgatcaactgatgcaaagtatgttgttatctaacaatgtatgcactgtagtcttgtcatgctctgattgcctggaggacctcctcatatttgaatatgccattgaagtgtgcatattttccaagtttagtatgttatgccccatatttctcttttttgtcatgctgcatagatagaatatcgcacacccatcttatgtggaaataatggacttattggtggcataaacttcatttgatcaatttttcttactttatgtaattgttttcaactttagagggcgtaaggatgcgaaagggagacgacccggaaaccccaactatgatcctagaactctttccttgccttcccagttcttgaatagcttgacaggcggacaggtattagttccttgttaattatacatctcacttctactctggacttgcatctcttgctaactcttagaatggatttaatagaggcaatggtgggaatttaaatcacagcacatggataaagttctgttcttcaaggtacaactatattttgtaacagttgtggaatactaaagttaaggctaccttgtttagtaaatattctatgaatttgaaatagatgggcaaattctatgaattatttgaaatggatgcacatgttggggcaaaggagcttgatcttcagtatatgaaggtagtaaattctcttctgcttattcagtatactgctgtcactgcacaatccagcttttgttttaattcttatggcataacggttagtatttactcattttggatcatatcatgttagggtgacaagcctcactgtggattcccggagaagaattttgaattgaatttggagaaattagctaagaaggtcagatcatgtttgatatgattttattcttccatggaaaataattacatttttaataagctaacagagttggttgcatcacagggttatcgagttctggttatcgagcagactgaaacaccggagcagcttgacctccgccgtaaagaaactggtgtaaaagacaaggtttattttaagtctcatggtctcaccagtgctacctctttttgttccaatatgcaaatacattgtcattacagaactatgacatcgatttaaatctggaactttttagttatattcagtttacatatgattattcttttcgggaaacatgagtaatgttgttcttgtggttggtgtgctttactttgaaggttgtgaggcgtgaaatatgtgcaatggtcacaaaaggaacattgacagaaggggagtctctgctggcaaatccagatccatcatatctattttctgtggctgaaagttatcagtgtggttcagagaaggatcaagatggtcatacaattggtgtttgcatagttgatgtttcaacaagcaaatttattgtagtacaggttagtgactctaggagactagggttcattttcatttgcattaagtggataaatttcttgaaatcgatgctattgattgggtacccttgtgtcaatgtacacttgttgctttcagttccaagatgatgctgaacgccatgggctatgttctattttatctgagattaggcctgcagaaatcataaaaccagctaaaatgttgagtccagaaactgagaaagcactgaagagcaatacgagagaccctttaataaacaatttgcttccatccatggagttctgggatgcagagaaaactattcatgaaataaagcaatactattgctcattggacacacctggtgccggtgcacaaatcagttctgcctatctgcctgagctattgagtgagctaattgaagcgggagacaaaacatatgcactttctgctcttggtggttctttgttttatttaaggcaatcccttctggatgagaaattgcttccatgtgctgagtttgagcgccttacatgctcagggctcaccaaccctatccgcaagcatatgatacttgatgcggcagcattggaaaatctggaaattttagaaaatgcaagaaatggtggtctctcagggtatttcctgctttgctctgttagttttctctagaaactatattcttatctcattatctcaagatactcttgctttcttgcaggacattgtatgcgcagttaaatcattgtgttactggatttggaaaaaggttgcttaaaaggtggattgcaaggccattgtatgaacgccaggcaatactacagcgtcaaagtgccatcgctactttcaaggtttctgtttgtggaaagaaatttcctacaaataaaattttcttttgttatttggaaaggagtctttaaaatgccttttgcaaaattgcacaaataaatcaaaaatcagacctgtacatga

SEQ ID NO: 22928 - DNA, 2002 bp, Oryza sativa
tctgtgaatatctacatggacgggaacttcacgaaatatcttcatctggttattttattttaatgaaatgcttctataatatggaagtaataaagcactgcttctgtcaaaataaaataaagcattatattttgcttgtgttccttcaatgtgatcacaatgacttctttttctttcttttgtgcgattaaattgtttccacaattttggattttgtcaagcatgatattatctgatatctttcagtatgttatattagtttgaattttactcttggcatttacttgttatggtcaaggcatcaagtgctattttacacatacctccatgtacttggcagtggttctttatcttattgcttaggaaacgtcacatgatgatgctaagtaacttgaatgaaacactcccatcacaacgtgaatcttattttttagccttggggacaatcactgtttaatgacctttgtgaagtacaatgtgtctattcacagttggataatatcaattaaactgtaaaatcattcatgttgaaaacagaatttatgaaattactcgctgtatatacaaagtatcagtcttctgtacataacgtttattttgtgtaccccatgtttatcatgcaactgctcgtttttatttatagggatctgggcatgaatgtgctatccaattccgtaaggatctgtctcggcttccagacatggagcgcctacttgcacgccttttttctagctggtaatttagtattatatgatatgcttaataattagttgaaatatctcaatgtaataagctggatttatgtgccttttggtttgatcattcattgcaatcttactttttctactctctctctcggtgtcttactttttctactctccgtgtcattctagcaattttcaaacaaaatatgtagctatggttaattaccaagctacccctattaattacagcagtactaatactcctttgagttgaaggtgtggattacaatgagtggtgtagatgcattgatgaggggtagagagggaagatttagccaaaaaatgctttggaatgtgagattgacagtattttgacataaagaaaaaaactagaaagacaagtaatttgaaacagagggagcacttaaactctgcaatctgctagctcattgtttaatctgaatgcttaaggctacaacttatttgcagtgataagaatggaagaagttcaaagtcagttgttctttatgaagatgcatcaaagagactgcttcatcagtttactgctgctcttcgtggttgccagcagatgttccaagcatgctcttctattagtatgttgacaagcacagatggatcttctctattaaatgatttgttatcactaggtatgagctgagtaactgaattctctcactagtttctcagtgcacccatatgtgactcttttgatcttcaatatcatttccgttggtctggttgcttattacattgtttcaattacatttattgtgtaatgtgaggttgcatgtgttaactgtttacaggcaaagggctaccacatgtttcttctattctggaccacttcagagatgcatttgattggtcagaagcagacaggaatggtcggatcatacctcatgaaggttgtgatcctcaatatgatgctgcttgcattgcaattgaggagattgaatccagtcttcaaaaatacctgaaggaacaaagaaagctattgagtgattcatcggtagtgcatgtcatgcttttcaaagtttccatagtttaatactcattggcaatttttaataactagtgagcaacggtgcaggtaaaatatgtagatgttggaaaggatacgtacctccttgaagtgtctgagaacctgcgaggttctgttccccataactatgagttgcagtctacaaaaaaggtaatgaaaaggtgttttcctgtacttgtgcctagcctttcagcctgtccattttttttggttatttattttctttagttggatg

SEQ ID NO: 22929 - DNA, 657 bp, Oryza sativa
gcaagggatcatattatggctgggcaaagtacgttcttagtggagctcatggaaactgcttctgtgcttgtaagtttctcctccctgatatgaatggcaaacattaattttcatgttcactgatctaatattttgtgtgccactttttcttcagtcatcagcaaccaagaattctcttgtggctttagatgagcttgggcgcggtacatcaacctctgatggacaagctattgcgtatgttgatttaaaagatcatagcattgagttattatgtactaagatatctcattagtcttgttgctgtgttttatgctccctatgagaatattaattgagtttattaatttgctcagggcatctgttctagaatatctagttcatcatgtgcagtgcctaggcttattttcaacacactaccataggttagcagcagaaaataaggatagcaaggtaattgattcatatcttgtaccctgaatagacattatttatgcactgaattgtggaactgaatatcgcacatctcaggtatcactctgccatatggcatgtgagataagcaagggagaaggaggtttggaagaagttactttcctctacaagttaacgcctggttcatgccccaaaagctatggtgtaaatgttgctcgattggca

SEQ ID NO: 22930 - DNA, 715 bp, Oryza sativa
gtttgtagatggccggcagcgttacccgtcgtggtttggacatgactggcttcgtcttggagctgcgaggcatgtgcgtggtcttggggtatccacatggagtggattaccaggccaggccgctcccggagcaggagggtgaggatgcagagcctcacgctggttgggaggtcactgcagtgatcctctctggctctcccgagcggacttcgctggcagtcaccgcgggtggagattccttccccgccgcttgccagaacgccgctctcctcgccatcggcaccctccaccagcgctacccggacgagttgcagcactcgccctaccgctaccacccccgtcgcggaggagccagcgaccacgccaccttccgagacgccagctcggaggatgacgctaccgtcgtgcatctggcacgcatggtggaggcgtacgacgcggctcgtatcgacttccaccagatggtgcgtcgtggcatggtggagaacaacctgaagatcctggagctgcgtcaggagaacctgcagctcaagaaggacctcgacgcagtggaggcgcagctgcaccagctcaagatcgcccagggagagatctgccgccccaagcgtcgccgcgtctgccgcagccagaagatcaccgccgtaagagcacctccaggcctgagcttgttcgtcagtccctggcgtggacttgcttcgtcgagacccctcgtgcc

SEQ ID NO: 22931 - DNA, 2792 bp, Oryza sativa
agccctgccgtccctatagaaattcaggggataccttttccctcggatctgattctgctagacaccaagaacttggatgtgatccttgggatgaattggttggctcaattccaaggggtagtggattgcgcgaggcgcactgtcactctgtaccgagggccggaacaaccggttgttttctttgcacccccaacctctgtcagaagttcagaactgcatcagatagggctgtcagaaatccccatagtcagagagttcggagacgtgtttccggaagaactacctggtatgccgcccaagcgagagattgagttccggatagatcttgctccaggaaccactcctctgcacaagcgaccctaccgtatggcagcaaatgaactagccgaagtaaagaaacagttggaagagttgaaagaaaaggggtacatacgtccgagtacttccccatggggtgctcctgtgatttttgtagagaagaaagacaagacgaagaggatgtgcgttgactacagagctctcaatgaagtcaccatcaaaaacaagtaccctcttccccggatcgatgatctgttcgatcagcttaaaggtgccactgtattctccaagattgatctccgttccggatatcaccaattacgtattcgtgaagaagatattccgaagaccgcattcactacgcgatatggactgtatgaattcacggtgatgtcgttcggcttgaccaatgctcctgccttcttcatgaacttgatgaacaaagtgttcatggaatacttggacaagtttgttgtggttttcatcgatgacattctgatatactcacaatcagaggaagaccatcagcaccatctccgtctggtgttgggaaagttgcgggaacatcaattgtatgccaagcttagcaagtgtgagttctggttgtccgaagtcaaattcttagggcacgtgatatctgctaaaggagttgctgtggatcccgaaacagtgaccgccgtcaccgattggaagcaacccaagacggtcactcagattcgcagtttcttgggtttggcaggatactaccggaggttcatcgagaacttctccaaaatcgctcgacccatgacacagttgttgaagaaagaagagaagtttgtgtggagcccgcaatgcgagaaggcgtttcaaactctcaaggaaaagctggtttcctcgccagtgttaatcttgccgaatactcgcaaggacttcatggtgtattgtgacgcttcgcgccaaggattggggtgcgtgctcatgcaggacggtcatgtggtagcctatgcttcacgtcagctacgacctcatgaaggcaactaccctacgcatgacttggagttagcagcggtggttcatgctctaaaaatctggcggcactatctcattgggaatcgctgtgaaatctataccgaccataagagcttgaaatacatcttcacccagtcggatctgaatcttcggcaaaggagatggttagaactcatcaaggattatgatgtgggaatacactatcatcctggtaaggccaacgtggttgccgacgctctaagtcggaagagccactgcaacactctcaacgtccgaggcattccacccgagcttaatcaacagatggaagccctgaacctaagcatagttggtcgcggattcttggctgcgttggaagccaagcctaccttgctcgatcaaatccgcgaggctcagaagaatgatccggacatgcatggactcctcaagaatatgaaacagggtaaagccgcaggtttcacagaggatgaacacggaaccttatggaacggaaagcgggtatgcgttccagatagcagagaacttaaacagctgatacttcaggaagctcacgaaagcccttattccattcacccgggcagtacaaagatgtatttagacttgaaggagaaatactggtgggttagcatgaagcgggaaattgcagagtttgtggccctatgtgatgtgtgccagcgtgtcaaggcagagcaccaacgaccggccggacttctccaatctctccaagtaccagaatggaaatgggatgaaattgggatggatttctcaccggacttccaaaaacccaaggcagatatgattctatatgggtagttgtggatcgattaaccaaggtagctcgatttattcctgtgaagaccacctatggagggaacaaactagccgagctctacttcgccaggatcgtgagtctccatggcgttcccaagaaaatcgtatctgataggggaagccaattcacctctcatttctggaagaaactccaagaagagttgggaacccgattaaatttcagcaccgcgtatcacccgcagacagatgggcagaccgagcgtctaaatcagatcctagaagatatgcttcgcgcatgtgtcctagatttcgggaagacctgggataagagtctcccctatgccgagttctcctacaataacagttatcaagccagcatacaaatggcaccttataaagcgttgtacgggcgcaaatgccggacaccactattgtgggaccaagttggagaaagccaagtgttcgggactgatatcctgagagaagctgaagctaaagtcagaaccattcgggataatctaaaggggcacagtctcggcagaaaagttatgcagataaccgacgccggatctggaattcgcagtggatgactttgtgtatcttcgggtcacgccattgcgaggtgtgcacaggtttcagacaaaagggaagctcgcacctcggtatgtggg

SEQ ID NO: 22932 - DNA, 1280 bp, Oryza sativa
taaatgttacagtaacagaaatcttgagaagattgtccaaataattcttacgactcatgctgcagagttaagcctttactgctatcaaagttctgagcaaactgtaataatcatttagttggttttcacattatcatcaaaagaacctcaccgaacatcatcatactagtatcacttatacatgcaaaacgtgtgctgcgaaattttaaccagaagatactaatatatatatttgggatataacaaacctgtggaatgatatttttctccatggcgtccttgaaaagaggtggaggtggtaggtcaaggccaagcatcaaaaatgggaccctagatgtttcagtaacaatatctgaacctgcatcaccattctgttcatcgccgtcctctttcttttccacaatatgcttcttgtgaaattccttaactacttcaagttctccctaacaaaaacaatgctgtaagaagttgcacgcaattttattaatcaaattgttggtatagacaaaaactatacctgaaagcaatcatgtatgatgcttctgtttctcttcctactttttagtttcgagtgcattgtgttcaagagccatgacataaattccactggatcagactgaacaccaatctggaacctcttatcactggccttcataactgcttgcagaaactcatgtggactaacctgcacaaaaagcaacatgttaacttttgagtatttgtggaggtagaggaacagcacaaatatgctggcatgcagctatctcactaaaaaaccaacctggcccttgaagttccttgcatgccagattttgcgagttagttctccaaatcgatgaaccaatggggatttgctatgccgataattttcagggatgagaaagaaatttcttaaaggagtaattctcattaatgactgtattgtgacattcacaaaatctgtctccttgatgttgtttagaccaacctgcaaatttaagcatagagaagtgactactgccataggataataatggtcaaagcagagagaattgcaaatattgaggtgcaataggaaatctgcaatgtttttaagttgtgacatggtgatggtcatataacaccattataataataacttaatatagaatgaaataacctggctaaaaaaagctcatgaccaagttggctgcttctattcaagtccacaattttttaggctttcactgtcattgtgatttttttccagaagatgctttttcatttttgtaatttctccagatagaccaactaaacaaaac

SEQ ID NO: 22933 - DNA, 678 bp, Oryza sativa
cggtgaagtcgtagacgcccaacagcggcggcataataggccagccgtgtaggcggaggcaccactcggcggcgacggaggcaggccggcggtgaagtcgtagacgcccaacagcggcggcataataggccagccgtgtaggcggaggcaccactcggcggcgacggaggcacgccggcggtgaagtcgtagacgcccaacagcggcggcataataggccagccgtgtaggcggaggcaccaatcggcggtgacggaggcaggccggcggtgaagtcgtagacgcccaacagcggcggcataataggccagccgtgtaggcggaggcaccactcggcggcgacggaggcaggccggcggtgaagtcgtagacgcccaacagcggcggcataataggccagccgtgtaggcggaggcaccaatcggcggcgacggaggcaggccggcgtgaagtcgtagacgcccaacagcggcggcataataggccagccgtgtaggcggaggcaccactcggcggcgacggaggcaggccggcggtgaagtcgtagacgcccaacagcggcggcataataggccagccgtgtaggcggaggcaccaatcggcggcgacggaggcaggccggcggtgaagtcgtagacgcccaacagcggcggcataataggccagccgcgtaggcgg

SEQ ID NO: 22934 - DNA, 3384 bp, Oryza sativa
attcctgcagcccctctttgccacatgaatcaaatgctgaaaatattagtatgcgaatttcatatagcagtagaacataaaagaaatatgacaaaatacattgaaaactaaaaaaattaactgtgctgagggaggcaaaactaaatgtcatttaatgtaaaccatcgttagggttgtactatacacagctttagtttcaggaggtaactgtttttactgtggcaaagggctctatagctatatgcagaacatatgtaaactttagcaaggactctgggtcaatgcatgtgactttaatcttcactggtccacgtagtagttcataacagaattaagaaaatcgatatttttttagtacaccacagtttttttcccctcatatctctgcctcatactaatccacaagttaaataaaacctggttatgctatgcctgaaggcttcccccccatagtcaagactcaaaaccacaaaccttatttactggtggattgtagaaggccaaagattatgtagaactaacatctaaacatttcttaatctgtttaacctgaactataaagaagacatcatgcaaagttgcatattcattgcatataaagccagaaatgggtggacatatttagaaaaaaggcaataacatacctactgttctgcggccttttcaccaaccacagaagaagatggtctccattttctatcaaaaggcccatagcttctctccacaatagtttgccgctcggttagtttcttatctattagctccagtaactcttgcaatcctgtccctgtcactgcagaagttttcacatgacaagtggacattggttgtgttgaactgcagctatctgtactaatagtttctggaccacaaagctctccaaaacaatcttttgatgatgatgatactgagttcattgctctcatctcactaggctcaagtgaggatgatatttcaccattgttgccttccaaattttcctctgataaatattcggagtctgttccatcatccaaggactcaaatgatgattcttctgcaggcacatcgttttcagaaaataattcttcctccttatcctcctcaccttcggtcaggaaaatctcatcttcaatatcatcagttacatcattatcattgttgtccacaatatcaatctgaagaaacaccataaaaaagtcaagttacatgaaaacccatgctaccaacaattcaccatgcaagtgtgacagtcacagccaaattaaatttcactactaaccttattccaaacttcgatcatactgttgattttatcctgtgaaacaccaatctgttgcaatacttgcagaacagtagaacgatgttcctcgatattaggagcactagaatctaatacatgctgcaccaatgcaaataaagagacatacaatcaactctatttctcttttttttattaagtaatttatcttaaaacaatttctgaaaagaaaatgtacatggctgaagaactatttgttattaaactagcaatggaaagattttagaagctgtcggagatatgggccgggggtatgcaaagtgaggggaagttaccttcccatccagccacgtggctctacagtctggccctaccccgcacctcgcgagtcgcagaagcggccggggcgcctcggggcgccacgtcatgcccctcgggctctcgcgttgccttgccccgaggccctcccccggctgccatgtggcgggggagcgagaggggaggaaacccaggctgaacagccatcaatgcgcggcgccccaactgtccctcactgcgtttaatgtggtaaggacggacgtgcggtgccgcaccactgacccacgtcaatcgggtctgaccagtctgtgatcggcctgtcgccggtcacgttcgactgaatgggcggccgtgcccccacgtcgcctctgtatccggcggagtggaggtaggtatgtcccgtcccatcgaaaagtcattcggagttccctccgtgagaggaggaccgccacaagtcttcactcatttatgagggaatgacagggctgtcccccgtgtcaggctggggggggacgttgggtcccgctcaaggacggactgctgcttagcttccgggcgaaggtacgggtcgcagtccggtcaaggtagtgggtccccctcccgtagaagagtaggcagaggcggtgcatgcggtatccccttaaactatacaaggatgaccttgcccaccgagaaaagggacgactctcagtaagcctgaactctaggagaagagaagtgggagcgctctccggagtttaggaacccttgtaacactccataatctcacacacaggagtagggtattacgctccatagcggcccgaacctatataatcttagtgcccacacgcgttttagtagcattgagggcggattcacgatctccccacgcgagccttttcccccggccgaactcactaaagggggatctcacgatctcccgctagagaggatcactcctcgacagctggcgcgccaggtagaaggaattcgcgcgcttcaaagggaagtcgtttccttccgccccaagttctcctctaccttcgacgatcatggtcgaggtcttggaggaagaggtggtggtgcacacccccattccctccgggagtgaggatgctagcgggagtcgcggcccccgtcaccgtcgccgcaactggcgaactccgccccgtcgcgaccccccgcggagggaggatcccacccggtcgggtggctcggccctctccccgcctcccggcggggggaggccacggcgcgtcggagcacgtcgccgcctgacatacggcgacggtgactcgccccgaggcgcgcttcaggcggcgggagcccttctacggcatcctccggtgaacgcggagcatcctcaggttggtgacgtcgccaacctggtcaccactgcccagcgacagctgaccgcgggtggccgttccaccgccactggtacgtcacgtacccccaccaccctctcctcatcagcaaggaggagggcccgtcggtcggccacggccttgaggcgatccacggccccaacgtcgtcgggggcctcgggaagtcggaggcatcacgatgacctctacgaggagcaggacgctcgaatcaacatcgagcaacaccgggacgagcgccgcgctgcccgcatgggagaaggcgcctcctcgtctggagtgccgcgttcctcctcgcgaggcggcccgccccccacgttcacccctggagggactgcttgtagggccttcgttgtgagtctccggaatgtccggtgacccccgaagttttgccccaacctcacggagaagtatgatggcagcatcaatccctccgagttcctccagatctataccacg

SEQ ID NO: 22935 - DNA, 9446 bp, Oryza sativa
gggaggggggggacgaccgggtcatggcgaattatttccccatggctcttaagggtcaggcgcgcgactggctcatgacccagccccccgactccatccactcctaggaggacctgtgccagcagttcattacgaacttctagggcacgtacccccgcccaggagaggagacggacctgcatgctctgcagcgaaaggacgatgagcccctccgctcgtatatacagcgcttctgccaggtccgcaacactattccgtgcattccggctcacgcgatcgtttatacgtttcggaacggcgtgcggcacaatcgcatgctagagaagatcgcctccaaggagcccaagaccaccgccgagctcttcaagctggcggacaaggtggctcggaaggaggaggcgtgggcctggaactcccctagcaccggcgcggcagctgcggctgcccccgaatccgttacccgctctaagcggcgagatacgaggggcaaaaggaagccagcccgctccgacgacgagggccacgtccttgcggccgatgggccctcacgggccccgcgcaaggaaaaagccaccggcgataagccgagctccaccgctccctccggagagggtcggtcggcagacaagtggtgctcggtgcacaacacttatcagcacagcctcgccgactgccgctcggtcaagaacttggtcgagcggtttcggaaagccgatgagaagcggcagaatcgacgggagggcaaagcccccgcgacccccgccaatgactggcgaggggaggccaagaagaaggcccccgccgatgacggcgatgatagcgaggatctggaattccagatacctcagggaaccgtcgccactctcgacagggaggcttgcgctcacacctcccgccgcggtttcaaggtcacgaggtgtgagcttctggccgccgtcccaactcacaaggcggcacggaaggcgcgctggtcggaggtgaagctcaccttcgaccagagcgaccatccaacaatgctcgctcggggagggaagttggccctcgtggtctccccaaccatccacaacgtcaagatgaagcgtgtcctggttgacggggaggctagcctgagcatcatctccccggctgcttttgacgcgctcaaagccccggggatgaagctccagccgtcactgccgatcatcggcgtgacctcgggacacgtggcctctgggtcacgtttagctcccggtgaccttcggcgactccaccaacttctgtaccgagcggattgacttcgatgtggcggacctcaatctgccctacaacgtggtcctgggcaggcccgcgttggtgaagttcatggccgccacccactacgcctacctccagatgaagatgccgggccccagcggccccatcaccgtctttggcgatgtcaaggtcgccctcgcctgcgcagagtagcgtgccgacaacctggcggcagccacggagccgcaggtcccgaaggcctccacgtcccgcgcctccaagaagcgcctcgcctcggccgacgaggtgcccgtcaaggagattccccttggcgatgatccatccaagaccgccaagattaacggtaccttggacgccaaataggaaagcgcgctcgtctccttcctgcgggcgaactccgacgtctttgcgtggaagccgtcggatatgcccggggtccctagggaggtgatcgagcaccgcctcgccgtgcggccggatgcgcgacccatccggcagaaagtacggcgccaagccccggagcggcaagccttcatccgagaggaggtgacgtggctcctggaggccggcttcatccgagaagtcatccacccagagtggttggcaaatccagtggtcgtcccgaaggccaacggcaagctccggatgtgcatcgactgcacggacctcaacaaggcatgccctaaggatcccttccctttaccgcgcatagatcagatagtcgactccactgcggggtgcgaccttttgtcgttcttagatgcctactccgggtatcaccagatccgcatggctagggaagatgaggaaaaaactgctttcaatactcctgtagaaacctttattatacaactatgccttttggtctcaagaacgcaggtcctacttttcagcgcatgactcgcattactttgagtaatcaaatagggcgcaataggcgcaatgtagaggcgtatgtcgatgacctggtggtaaagacacgccaccaggacacgttgttgcaggatggctgagactttcgacagtcttaggtccacgcgcatgaaactgaaccccgaaaagtgtgttcagtgtgccggcgggcaaactcggttttctagtctcctcccgaggcataacccccgcacatccttcggcttgtgcaggcttggccgagggctaccactgttaattatgttgtatcttttcccttccccagcaataaatttttccgctcaagcggaggctattgcgcgccctttcttactccttcctatggctcgtcctgcttcaaaggatgattcgcgcttatcccggaccctaagtggcgttgggcgacctgaaaaccgccgaaagggagcctaaacgcgggccgcgccccgggctgcggcgaaccctgggggctcggaagggcctacacacggccatccccgacccccggtcgtcgtagcctcggtctggccagacctgctaggcagctccctcggggcgacggcattgcccctcgccacctaggtgccacgggccgagcgtgagtttcccttttcaccggaacaagcccgaggagggacataaagagggtaagaacggcaacttaatcataagaaagtcaattgaatacgttcgctttggtttcttcttctttctttgccgcagacattcaaaggagaaagcaagaatgtaaaggcgcgaaggagaagctttgtttacaaacagtatggcacgatgacctaaagtttgaagcgttcaccgcgagcacataacaaaataaaagaagaaaagcggggatagtcacggagtgcccgggaccccgagtccggcgccgctgaccacctcgtcccagtcctcgccgccgtcatcgccaccactgtcctcgctcccctcccctcgtctgaagcaagcgcaaggttgaaccgaggggccgacccctcgaagctggagacgatcgcgtcggccgcctcctggacttgctcccgagccctcgcctcggtccccggggggaagtcctcgagcgcgcgccacaggacgaagtcggggtcgcgagcttgatgacttgcgaggaccagttccaccgcagcccgcgccaaagaagccgacaacgacttcacgacctcgccgacctcctcctccagcctctccaaatccgcagccatcccgtccagccggagcgcgagtgccggctgtgtgggcgggagcttcctgtcccgacgcacggagatgcctacccggcgccccgcgcactccagccgttcgacggcgtcggagagttggccaggtccgatctcgttggtgaggcggagggccgcaatctctccagcttggtcctgcaccaggagccgcaggtcggcgagggtgctttgaaccgcggtgagttggctcatcaactccgcgccgccgggctgcccgcctgccgccagctccttctcccaggcctccagctcggaagccctcgccgccatcgccgcgcgctcagcgcgggcaccttctaaatgccgggcctcgcgcccggcaacggcctcctcgcgtttcgcgagttgctcgcccagccgacgcgccgccacctcgcggcgattcacctcggcctcgcgtgcggcaagcgcggtgtcccgttctcggcacgcctcctcccgaagccgcaaccccttcgcgcgatgagccaccgaagcctctgcggcaagggtggtctggttgcgctcggctgcggcctcctggcggaggcgaagggaggactccgcctcggccgccgttctctcgggcggccaaagtggtctcgcgctggtctagcatgcgcgcccgctcctccagcacccgagcatgctcctccagctcccgggctcactgcgcctgttcccgactgcgcccgtcctgttcgcactggttacggtcgaggacctcaatccgtcgatggatcgtggcctcgaactcctgcgcggagcgggcgcactcgtctaaggccttgcgattggcctcgagcgccgccaaccgagcccgcagcgaggcgtcgacctccgacgcccgccgctcttaggcagcagccgcgtcgaggactccgcgggcgtcttcgaccctcttcgccagatcctcggcgtgggcctcgtactgcaagcgaatgtcgcccagcgcctcatccagtacgctcgaagagataagcaccgcctgccgctcctcctccgtctcccgcataaccgagtccagcgtctcttcgcgcgcctagttctccgccagttgggcttggcgcattttgcgccccacctccaccatgtcgtccacggcgcggcgcccctcatcgactcgcgcgcggtccgccgcgagctgcgcccactccacctccagggccgcctgctcgtccgctagggcttgaacttgggcattgagcccctccaggacggtggagtcggcagcggcgagcacctgcaggagtggctccatgctcacgggagtcggagaagaaaaagacggtccgcccccgagatgacggagtgctgctggaccccccgcgagactgggggctgctctcggcccctcttccgcgcggccagccccgaggacgccccaaatgcagaggggaacggttgcccccgtcaccccccgcctcggcccctcgggcagactcggcctcggcctcgagttcgggcccgcccccggcctcagcctccaggccgtgccccgcctcggcccccggagcgtgttccacctcggactccgagccacgacctgctttggcctccgcccccgagtggcgctcctcgtaggtcgcgccctcgggatcgcccccggggggacgccgtcgccgttgctatcacccgcggatggttgcacctcggctgtggcgggctcggaaccagacccggcgtgtggcccgggggccccaccagggtactgcgaaggccccgtgacaccgggttggccgggtcccggtcgatcccaccgctcggattttgacccctacaagggatcggacgccgagaccccctgggaaggaatcccgctacaggagaaccccaatcacgttaaaaaaaaaagaagaggaaggaacaggaggccgagatggatagagagcaccgagtcggatgctggcgatcattcctgcgaggagggcgtttgaaggtccacttccggggctcgatgaagctcccccggcacggctccgtttgccctatcttccggagccgcttcttccgtccagcctcggacgcggcggggcgtttgtggcccgccggtggtcggtccgccgttcgctcggcgccccctccacgcgggggagaaggcagccgagattcgaacgccttccgcttccctttcgggtcgccggccgagtcccccccgggtccatggctcggaccgggcgcccaggagccgacgcccccgccggagccgccggcccggctgccgcctacggtcgcgccgctgctacccgcgccgtcgccgccaccaccggcgccgctccggcgggaccgacccctgccagcaccgactgccgacatcacagccaggatactctcccggtcgcggtcgctgcagagggggaggatcccgtccggaatcagcgtttgcttgatagtgtccaggcccagcactcgccggatcaccgtcttcgcgtcctcctcgccccagtcccagcgctcacccacgtgggtgcgcatgggatcgttgtgcccagtatactcccacgcgccgcgggaccgctcctggagaggcgcgatgcgacggcggtagtcgccgaacaccatcgcccccgttaagccttagcttcgcaggcccctgaggcgatcccgcacggcgtcgtactcctcgcccagttccgaaactgccaaccacgcggcggatcgttcaggagggccgacggggagccgaagtcgcggatgatccggtagcgcggtgtagaaccaatccttcttccaatcctcccacttcttgcagaggtggctctcgatgtactaccccgccattcccggccggggctggaggtagcatcctcccaccgccgcgccttgctgcagctgcgggatgaagaaggactggaacagccgcatcgtcggccgcaccccgacaaacatctcgcacaagtgcgcgaagatgaccagcgtcatcacggcgttgggtgcgagatgcaaggcttgaatctcgtagaaatccaaaacctcatggaagaacctggaaaatggcgggatcaaccccaccatggcgaaggacaggaggtgcacggatcgctctggataccacggccgcggccgtgactcccccaccctcacggcggcgtcctccggcatgatcttgcggacgaggctaagatgcatctctgccgtgatgcgcgacgccgggagcacagcgtcaccagcgtcatgggccatggtgaccggcggggaaacgacgaggagcttggtgtacagaatggcgtggagcgagagaagcgatggggcttgaagaacgagtgagcgggcgagcagtcggcgagaagaaggggacgaactcgcccccttatccttttatccccgcctcgcccgcgctcgtctcctcgtttcacgcccccgcggttgtctcctcgattcatgcgcctcatcgtttctcgcgtccactcatcacgtcgcccactgaatccgcgccccgcgttcagtgaacctgtcagcggcacactcagcgcggggcgtgcgatgttcgtgggcgcggattaggcgggcccgccgtcggtcccgtcgcgtgcctggcaggcgagggagtcgaggcggcgtggctgacgattctgggcgtggtctggtcgaccccccgattttcgcgccttaggcgcccccatcatcagcgcggttaatggcggtcaaatcgccattatggctaatgcgccagcctggccgcgcggcggcaaccgtcaggattccccgtcgggcccacaacctcggcacgggaagacgtgaggcgccacgtcagactgccctcacaaggccgatgtccgacgtggtgccgggggctactgtcggagatatgggcccgggggtatgcaaagtgaggggaagttaccttcccatccagccacatggctctacagcctggccctacccccgcacctcgtgagtcgcaggtcgcagaagcggctggggggcctcggggtgccacgtcatgcccctcgagctctcgcgttgccttgccccgaggccctcccccagctgctatgtggcggggggagcgaggggaggaagcccaggctgaacagccatcaatgcgcggcaccccaactatccctcaccgcgtttaatgcggtaaggacggacgtgcggtgccgcaccactgatccacgtcaatcgggtctgactagtctgtgaccggcctgtcgccggtcacgttcgactgaacgggcggcagtgcccccacgtcgcctctgtatccggcgaagtggaggtaggtatgtcccgtcccatcgaaacgtcattcggagttccctccgtgagaggaggatcgccacaagtcttcacccatttatgagggaatgacagggctgtcccccgtgtcaggcggggggggtgcgttgggtcccgctcaaggacggactgctgcttagcttccgggcgaaggcacaggtcgcagtccggtcaaggtagagtgggtccccctctcgtagaagagtaggtagaggcggtgcatgcggtatccccttgaactatagaaggaggaccttgcccaccgagaaaaggagcgactctcagtaagcctgaactctaggagaagagaagtgggagcgctctccggagtttaggaacccttgtaacactcagccataatctcacacacaggagtagggtatcgcgctccatagcagcccgaacctgtataatcttagtgcccacacgcgttttagtagcattgagggcggattcgcgatctccccacgcgagccttttcccccggccgaactcactaaaggggatctcacgatctcccgctagagaggatcactcctcgacagaagccatcttcaacctatgaatgccaataaaaaatgaattggagataagttaattatacataccactaacatatctgcttcaacaacttcttccaaagtagcatgaaatgcttccactagctgcacaagaaaggttactatattattactgtcaccacagtagttgaaaaaggctttcatgcatcattaaggttcccctggaggcctagaccaaagtggcatgatagtgctgtgattggcagcaacaccacaagggcagggagagatagagtaaggaatttcaggtcactcttgcttagcacttcatgagctaagacctcatgttaaaaagagcattcctaagataattcaatctaagagataagataatagagaaactaggaagtaatgaatatgtgaacttcaaaccacatacttgcaactaacttgcagtgccagctcttttctctcttttactatcaactctgcacagttctaacctagtagcacaatgtaatacaagcctctctgcagcattttcttaaaaaaatgtattaaccaaatctttatagtaaggtgaatgttggggtttagcagaggtcggcataacagatggtttcgctttaaatcgtgccagcagtgctgttggcagagtacaaaactatgcaaaataaactaataacttgtatgcaaaatggtagacgctaaatccacgattgtgtcaaaacaatctgcaaggtcaaaattaaatcaagaaagctacctgcacaggcaagtctgagatgaagccaacagtatcgctaagaagtgcttttctcctgaatagcatttgacaaaaaaaaaagattatatactgaacatgcactaatcacaaatcaaatctactgacatacaatagatgaatgaaaaatctattaaggtaccctgatgggaggatcacactgcgtaagcggggatccactgtagcaaatagcctgcatggaaacagtaaaatgatttggctacacagtgcacatttaaaatagtaagctatacagggaaaagttctcatcatacctgtcatcactgtatagatcagtttcagaaagtgcactcactagagtggattttccctgtaaaagatagcatcaaaggaaggagtttgtagaaagctcagatatatttcgctgtatttctggaagagcatagaaaatggttgtccaatattaagggagagaactgcaatggcagatcaacgtactgcattagtgtagccaacaacagcaacggggtgcaggaa

SEQ ID NO: 22936 - DNA, 10257 bp, Oryza sativa
  unsure (1)..(10257): unsure at all n locations
gccccatcgtcatctacttttctgagatttgtatcaaagttgcgactgtatcatcgccatctacttttgtgcgacctggggataaaaaggagagaaggaagaaatacatattgtacctcaacaggagagagaacatacttacgtacgtacatcagccagagttggaactgctaccacctgttgctatccaaaacagagaatcgttgctccaaatgcaaatgatttcatttttatgatgtcagtaatactaacaattaacagaggaacagactacagagcccacggccggcgccacagggcacatctgaacaagcgtggagcccatgtgctggacgatgcacacagccatttatttttgttcctgaaaaccatatgcacagccattaactgtaaagcacatataaatacccaaggaaacaaacaatgttgttacagatgtcattgtatagcatggacgtgttccactgttggatgaaaaagaagcagcgtaacatattactcggccgcaaaattggagcggcgcgagaagccctttcggcagcagcatgcacgagcacgacaccgagcatcggccaggccggccccagcaagagcaaagttaagctcgcccagccggcaagcaacacggaacgcacgatcccctgctcacgggtcgaattcgaagcagcagcagcagcagcagaaggagaagcttcttaattcgttcgcgtttaacaaccccatccccgtagacgacgacgaggaggagaacgatggcatggcatggcatccctgtcggcgtgcagtaacacctcactctgctgctgtcccgacgttaacctctcccctcactgacgctaagcacactggcagtcgcgtactacacgcggttagagcgagcttccattagcccccgagaaattaacaaaaagcaaaagcagaaggaaaaaaaagaaaaacgtcactcgcatcacatcacagcactagccgctctctctctctctctctctctctctctctctctctctcctcaccagattctatataagcagctcgtccaaccttgggaggcacccagcagcagccagctagctagctactcctactcagcagcagcagcagctcaggtctctccagtgttcttcgagctatacactagctctcacagatttttgctccgactcatcaagcggattgattcgatcggctgttagagagagaaaaaaggagagttggagatggtgagccaagtggtcgccgaggagaagccgcagctgctgtccaagaaggccgggtgcaacagccacggccaggactcgtcctacttcctggggtggcaggagtacgagaaaaacccgttcgaccccgtctccaacccttccggcatcatccagatgggcctcgccgagaaccaggtacgcacacgcgcgtgccacacctgcatgtacacacttgtacatgtgtgtacactgtctctgacgacatggttgctctgccttggctgttgcagctgtcgttcgacctgcttgaggagtggctggagaagaacccccacgcgctcggcctccggcgagagggcggcggcgcctccgtcttccgcgagctcgcgctgttccaggactaccacggcctcccggctttcaaaaatgtaattaattaaatcaactgtactctggttcgcgtacacggtcgtcaaaagttacagttggctaaccccccgagcatatgcgcacgtggattgcacaggcattggcgcggttcatgtcggagcagagagggtacaaggtggtgttcgaccccagcaacatcgtgctcaccgccggcgccacctcggctaacgaggcgctcatgttctgcctcgccgaccacggcgacgccttcctcatccccaccccatactacccagggtacgcactggcactgccgctgctgctacacctttttaccatacgcgacaacgtgcatggtggcgcatggctaacggtggatggatgggtggatgcaggttcgaccgcgacctcaagtggcgcaccggcgcggagatcgtacccgtgcactgcgcgagcgcgaacgggttccgggtgacgcgccccgcgctggacgacgcgtaccgccgcgcgcagaagcgccggctgcgcgtcaagggggtgctgatcaccaacccgtccaacccgctcggcaccgcgtcgccgcgcgccgacctcgagacgatcgtcgacttcgtcgccgccaagggcatccacctcatcagcgacgagatctacgccggcacggcgttcgccgagccgcccgcgggcttcgtcagcgcgctcgaggtcgtggccgggcgcgacggcggcggcgctgacgtgtccgaccgcgtgcacgtcgtgtacagcctgtccaaggacctcggcctcccggggttccgcgtcggcgccatctactccgccaacgccgccgtcgtgtccgcggcgaccaagatgtccagcttcggcctcgtgtcgtcccagacgcagtacctcctcgcggcgctgctcggcgacagggacttcacccggagctacgtcgcggagaacaagcggcggatcaaggagcggcacgaccagctcgtggacgggctcagggagatcggcattgggtgcctgcccagcaacgccggcctcttctgctgggtggacatgagccacctgatgcggagccggtcgttcgccggcgagatggagctctggaagaaggtggtgttcgaggtcggcctcaacatctcccccgggtcgtcgtgccactgccgcgagcccggctggttccgcgtctgcttcgccaacatgtcggccaagaccctcgacgtcgccatgcagcgcctcaggtcgttcgtcgactccgccaccggcggcggcgacaacgccgccctccgccgcgccgccgtccccgtcaggagcgtcagctgcccgctcgccatcaagtgggcgctccgcctcaccccgtccatcgccgaccggaaggccgagagataatcgccaagaacaaaaccacaccatgtccattactattaccagtagtagcacatactagtacattactacgtcacagtacactatactagtagcagcagtagcagattcctttcgtttcttgtaatcttttggcgccatttttttttcctcggatcgaggcgtgcatgcccgatggtctcggatgatcacatatcgatccattccatcagccggcatcggatcgatcccgtatttttcactgggaattttcagttttcccccgacactgaatttctcccagttgttgtaacctatggaaagtattattgctcgtcaataaaagctagtgcccaccacttgtagttcacgactaccactcccacatttgggctcggtcgcatccatccatcgcgtgttttcgccgccgctgtcatataaaagtcaaaaccgttgcagcgaaaccacttgggccaatggcgttttttaacccccatctgctccgtattgcatgcgaccgaggggattgagagaggaggagtatatagcacataaatactcgtagtaataacgcggaggtctccgggcttgacgtaacgtggtagttaatgctaagttgttaatgatgctgttgtgtttgccgtccgcggcgggcggcggcgtgcccacatgatggggatggatggcgagcgaattgacggcagtgatgaccactagtcgttgatcaaggaaatcgccgcggcgagtgtaggcgaattgactttggagttgggaggccgggacggccagttgcgccctgcacggtctggttgggagctcgatgactcgtcggctcgcggcgggatcacgtgccgggcgatctttagctcgttgatttagggcatttttatattgtagccaaaataaactttatcaattttagtattgctaaactttttacaagatgataatattgctaaaattttgacatgatttattatatatttactaaatttggcaacaaactaaacgtagatattttttagataattttaccaaaaaatgctatggtcgaaaatagcatcaaagtgaacaggtcattggatttcggctgttttctctttcatctaggctgtgtttagtttctgcaaaaagttagaagtttagagaaaagttggtagtttggaaaaaaaattagaagtttatttgtgtagtaaagttttgatgtgatggaaagttgtaagttaagggtagttagaggttaactaaacatggccctagggtggctggaattttggagtagtccccattggttaggagatataaaatctagcctttaatgctccgagaaatgcttccgaatgatagcggcacacacagttgattttgtaaggctactgcaatgtcaaacggagactttttggttaatgtgctcggtagtgatactccgtagtacattatttggttaataagtgtatgtgatgatgatattgaaagctgatctgcgtgagctgatgtagaacgcagcggagcacttgaagcaagtggcagagagtnnttttttttttttttttttttttagcaaagggtttcctaaactgtgatcgcggttaccgcggggtacgataaaagaaaaacctcagtaatctccttaaatttaaataaatttaaaaaatattttaaaattttatatggtttcgtacgatttattacggttactacgcgataaccacgcttaccgccaggacatgaaaaccccgggcctggtgatttgggaagccatgcagtggtactgctgctacttaccagctctggaagcctgtaacttgggactgtacattgtcattcggggttagcttactttgtgttcacactatcttggtaaaagaaaaaaaaagctgttcgtttggtatcagtgttcaggtgtgctggagattattaatcggactgtttagtgtcatggtttgttttatcgctatgttcttttgtggcatcaatatatgatgccagggcttatatatcaattgttaatttgtcccatagaactgtactaccagagtgtgtttagttcacgctaaaactgaaagtttggttgaaatcggaacgatgtgacgaaaaagttggaagtttgtgtgtgtaaaaagagcaattttacggtctttgaggaggtaccatgaggtaccattttttctattgtaaatttggtacctcttggtacctatgtgctatgaggtaccaaattttacactaaaattttggtacctcatggtacttcctcaaggaccgtagaattgctcgtgtaaaaaagttttgatgtgatggaaaagttggaaatttgaagaaaaagtttggaactaaactcgaccctagtcatcttgatgtattcatcacaatcttagccaggggctgattcgacgtggatcccccctacacccacaagattcatggatacccccgtgagcacctctttgattttttttcaccataaataataaactaaaggtccctaaatgattggaggttgaagaaactctataattgagcctctctaattttttttcctagatccacccctaatcttagcatatatgtgtacgtttcatttcaatacctagttcgcgaaatctttcgaaaatgttgactaataggacgaggataaagagaaaatcacccgacatacccatgtcaaccaccgatatgactcattcacttgataaggtgtacacgactcttccatcttattcaacgttttccattcgctcaaagtctagacagtaaggaagaattccacttatccaatgtttgacgcagtagctgaaaatttttcaaagcaaagctactcgtttctactttgggatacgacaactagtcaaaaatgtttgacatgaataaccacctgatagattgcgcgtttgcgcactacaactggaaagtaggaaaaccgttcttctttcaatttagcccttatttcatagatcttgtttagacaaaaatgagactgacaatctccttcgacatgagaaaaaaacgaagttaaattactcctaacccttccttagaatttagagcatgtactatggtgtccaataacggactctctttgttgtcatgcaagtaaattttatgacctggaagaataagagggaagaaaagagaaacatcgttgctacgcatgacaacagctcagaatcgattcttagtatttattaacggaaagtttgttgcatgaggttggagaaaaggaaagaagtataataaaaaaatatttagtgcaataatgatttagaaattttattgtttctaccattgtaaaaggatagtctctagtgatattaattaatatagatagctcatattagattctacctttatatatgtccttaggtatcaatccaaacaagatccatacatagatctaaaagcattctcatctccgacggaaaagacgaaacatgaacataaacgtggaaacactcgtaataattaagcaaactagattatcatccagagaccaactatcacattcccctcatttctttcaggggaacagaggtaaaaaaaaataaaaaaggagcaagacaccctgttgctacagtatttttttcaggtggtacaggaaaatcccttgggtagtgtacgtagatgaagccaagggggtttgccaccaacagccgcgacacatgaggggcagatggacaaacaaggagagactggaacgggacaattcgccgttttcgggagatgggagacgcagcagctaaccgcaccggcatgcaaacgaggagagacctggagatcagagtctcggagaggcaggtccgagcacggcacatgggggctcacccccggccgtaggccggcggggacgagatcgacgaccgaacgaatccacaccatttggatggaaaccggcctgcccccgggcatggcgtggacgcgggtgtctggacccagaagggaaattccttgactcgcccgggacacctctgcactgtccatgcatgtgatcgatcgagcaagctgcgattttattggttggttttgctggataaccccgatctcctgtcctcaacattttggtagtttgactgagcatgatcacactttgaccgttattacgttatnccaaancgaatagctatacttttcggttcaaaaaaagacactcacctcngncacaatatcacctctactaggacaataaatatgtactacctttttccagattcgttgctttaggagggatcacatccacttctagattgagttttttttgatggagtgagtagatattacgctttagcgaagtaattgctattgaattctaatgatataactattacattgcatgtttagagttctaaaattgttgttatgtagaaatatactcatctcgcttatgaagaaagaatgtgctagtgtaacaacggcataggtctgtctagccaattgcgttgtgtaataaaaactatttttcttctaatatattaatgtgtaaattttttgcgtgttcgaaaaaaaaaagtgtaactgtggatcgatgatcgatcactcccattactcatcttatcttctagaaccatatcatgtgtctccactgtgtcaattattttcatgtttcctccacgtacctcgatgtgttgtactaacatttcacggggtcctctgatcgctaccaggagtctagctattttgagttatgaaggtgagctaggtggctgaccaatgaaaacagagggagtatttgcctttacttgtagtggaaatattagggtataaatgattggagtgaatgaatatggctttgcacaaagagggacatctagataaggtgatatatacctttccttgtacgtgtagggttgccaatatgctggatgctgcccatataatgtctgcatgtttgtatgtgttgtgatatgattcgacaatgttactgtagtcagtaccatatatcttgccttggcactatgggggtaaaagtgattaagctgacacgcaacatcggtattcacggttgaagtgtgatctttatcatctgtttattagattatcaggtacaactaaaatttaaatttaaaacttaatttctagggttttatcgtggaatgtttttctgccttattttctaaaccacaaattaacatgcataaaacttttaccagtaaaatgttaaggtcacattgtttaccctttagcttacaagccgcagctaaaatttagattttaaaaccatattttagatttgattttagcctttttttttcctttacgtggtttatttttcagcatttgttctcaaattgataagagcgtgcatgtaagttttatttgtaaattatttctttgttgttaataagctattgtggtatgtaaccagtataaacaaaatgatgattgtgccatatcgcttcattcaatatatctacgggttattagtcatagccgactcataggttaaccaatcagagaatattgatcagcagcatgagtacttctacaccctccgaaaaaaataattcttaattctagatatgaatctggatatatatgtgtctagatttatagataggattggtttttttacatgaccaatagacttcgtgccaaaaatactttacatatttctgtattttctatgccgtgccgctgcctagtgcctatggcctaccatcacacaatatgcactaacctaaccaattgttaagtaataagaggcgtggctagtctaattaccatccaagcatgtcggctatattattgatactgacgatatatagggtgtacggtcgtcctctgtttgcaccttttcgcacattgttttttttcgaccgattttgcccttttcgatgtactatatcggcactgatgatatagtgatatgggcggccactaaccacgcaaactttccaagtgcagccatttttttcgaagcttcccaggcccagcttaattaattatctacgactagatgctaatatctacttaaaaaagttttgacaagacttgcaacgaggagcacggatggtcttccacgtagtctacgcgcttttctctggaaatgctacatccatattttaatatataacgttgttgacttttttacaacgtttgatcatttattttattaaaaaattatataattatcatttattttattgtgacttgatttatcatcaaatgttctttaagtttgatatgaatatttttatatttacacacaaaatttaaataaaacgaacgattaaacgttagtaaaaaagataacaatatcatatattaaaatataaagggagttctatataggaccacccactttataaacctaaacctgagtgatacgtagatacttgtaacttgctcctgctgtttgttttctattccgctagatgcctagatcccatttccttgtaaccggcaacgattgcggtttggtatcttacgttgtgaacaaaactcaatttcttctactacctccgttctaaaataaatataactataaatatctatattatatctaacgtttgaccgtccgttttatttaaaaaatttattaaaaagatttaaaaaattagtcacacataaagtactatttatgttttatcatttaataacaataaaaatattaatcataaaaacattaaataaaatgaacggttatacgttagacataaacaatgcaaactacacttactttgggatagatggagtaatataatatactgatgtgcaatcattttgcaagttcgtgaaaaaaaatcgatacttgctcctctcaaattgatagtacttcgcattttaaataaaattgttaacaaaatttagaaaatgtgatgataaataatctttaaaatatctatcttaaaaatatgaagaccatgcatatctacattttaatcttaaaatatacttcaataaattcatttgttgattgatatttatatatattataatagaatatagcgatcacaatttttttttaaagtgaagtattatctacttagagagagcatgtactccctccgtcccataatataagggaatttgagtttttgtttgcaatgtttgaccactcgtcttattcaaaaaattttgaaattattatttattttatttgtgacttactttattatctacagtactttaagcacaactttttgttttttatatttgcaaaaaaagtttgaataagacgagtggtcaaacgttgcaagcaaaaactcaaaatcctttgtatcgtggggcggagagagtagttagtaacttactatattttaatgcttcaatcattttgcgattggtgtggctctagctagacttctagtcatca

SEQ ID NO: 22937 - DNA, 5493 bp, Oryza sativa
tcaagttaatctagagagtttgttgttcagtgtttttgtttactaaaataattagttaccatgactggtatgcttaccgaccttacggatatgtcttgactaagtttataggcaaatatagtaatatttataatactaaattagtttcatcacatcaataattgaatatattttcataataaatttgtcttgggttgaaaatgttactactttcctcatcattgtagtacaacaaatacatttttaaacaacagtggatgagtgtacttggctttggaatagtgtcagaaattatttataaaactaactatatcttggaaatggatagagttaattaatgttttatttatatgggccttaatgcttgccatgtaaatgaggtctttcaactcacttccctctcaaacgccccctaatttgattaacttatatttatgttcatgcaggtactcatgtgctgcacgtgaggtagggctaattgcagccttgggtactgccctacttgctagacaacacgatcgtagcattgtcaaggcactaggcatgctatggatcttcgatgccgatttcctcgtgccgagaagtaggaggatctataaaactacacgtatttttcgtcttgaggattaggatgatatatgtactctacatctgattgtgttagcactatgtacacatctaccgtctcgtgctgaggaatgcatttcatattaagtttgatttccttacgctgcaaatgataatgcattttttatatgggacaatttgaaccatgccacacaaattttgcaaaatttgtgatatgccaccctgacccacatgtcattgactcgtgggtcctacatgtcattgagatgcgggtggcatatctcaaatttagcatggttccaacaaaccctttttatatttattagtgtaagtttattttcaggtgtgatatctgttaattcttattgtggatgattcgtttttgtcatcctgttatctattttctttcaagtgatatatgttagctcaaagtgttgtaattaaccaaaataaatggtaaattgattatctcatcctaaaattttaaatgtttgatcaatttattcaaatattgatgtttatttctataggtttcccctccactttagcttaagctccattggtgacgacgagcaacccacaaccatggagatcaactatttctataaggtaccctttgttttatgagcgtaggggggcatgtggggtattgcctgtcgtggacttcgctcttaggcactgttgcaacgacggtgcgggagagagtgagataaaggaggcgctactagctactgcggatggtcgcgtagtgctcatctaccaagaatcgtgtataggtggtatgcgtttaagttgacttatatatgacaaaatagatattagagaaaataagtatggtggttcaaattggcgatgacgagcaacccaaaaccatggagatcaagagggtgaagattgtagttcacgtggcgagcatcacatcgatgatccttgcctttaggttaatgtttatcatctatgtcccgatgtcttatgtcaagcctctgtcctacaggttaatgtttgttggagagtttgttcccacttttttatggttttattccgagttaatctggagagtttgttcaatgttgttgtttactaaaataattagttaccatgactgatatgcttatcgaacttacgtagatatgtctgggtggatacgtggtctgaggtgttttggggttgctggagttgctcctccaagaagcacactagttcttttatggcgtgggacatatatccactacgctgctcaccatcatgatcataatgatatgttcactggctcaaataatcttcttgaactttgtactctcctcagtgtcccatcgatatattgcaatcttcttgaactttgtactctcctcagtgtcccatcggtatattgcacaaagagacattatcagtagcaaatcgttgaactgagacaaactcagtagcatatagtagattctctcttcttttttacactaggtaggtgttcgtgcgttgccactgggagaaattgatgtgttccagcacacgaaaaacgaaaattggtaaaataaaaaacatccacattaaatatatattatgccaacatcattatttttgttgtggtttagaataattgtagtcatttggatcaaactccctctgtcccaaaaaatgacaaaccctgggtttccgtgtccaacgtttgactgtctgtcttatatgaatttttttataattagtattttcattgttgttagatgataaaacatgattaatactttatgcgtgacttgtctttttaatttttttcatatttttttcaaataagacggacggtcaaatgttggacacggaaacctagagtttgtctttttttttttacggagggagtatatttgaatggacaatatcattcacactttagaaataattatttatcataattatacctaactctagaagataactaaggtatcgaaataagactagaaaaggcttatacggaataatctttttgtacgcataaaggcaatagagaagcttacatttacataggatcattcacgaatgggcctaaagagtgtctaataagaatataacgcacaggacgcttgcaaaaaaaaggaggaacaaacatctatctatagatgggcttgtgctgacatcatctatacgtgctttgctccagtgcaagtcctaaaatatcaggtttgtacgtgtcagtcagtttgatactataactgacaagatagataaattgatgataaaagaaccgatcagccaataagccgatttgatatggtcttgaacaattggctatatgtccgaggtaaattctaacgctcagataaataatgatataaagacaatagaagaacttgaacaatcaatccaatcgaccgatgataatataatagagtagatatccaatgatatgtgccgaagttgtatttatcgagagatattaatacatgggtagatactagtctgtttgaaattcctggctcttgaggcgccgaagtgacctcttccaccgcgccgccgcctccggtaacgacgatggccgagacggtggacttcgcgagcggcgacgcggcggagtggcgagcggcgctggcggcgtacgaccgccggctcgcggccctgggcaagcccgacctcgtcgaggtcgactccttctaccgccgcgacctccccgatctcctgcgccgccgcgacccggagcccttcctcgccaagcccgagctggtgcgcctcctccaatggaagctctcccgcggcaagtggaggtcgtctcatcccgctcttagattttctttcctgttcctctttagagcacttgaacttctggttcccaggggcgtgtgatgttgtagtagtatttctcgctcaaatctccctagaaatcgtgccgaaatgtgtggatcaattggatgatgctagtatcttaagggtgcttggactgatttgatccattgatttagggactcgttttcttggcaaatcaatcattaccctagttggttagttgatgatactcctacactaccctgttattatcaaactcgttgggggaaaaaataatcatattgttgctctgttcttttgtgcaggccgagactgatggatttcgtcaagggcttggaggatgcagtggtagaatcagcatcgtgcaaggcgttcgcagcgctgcctgacctccgcaaggccatcaccgagctcaccgtgctgaagggcgttggccctgccacggcatccgctgttctcgctgcctacgcgcctgatgttgcaccgttcatgtctgatgaggtgagtttgtgaattttgttttggcagttctgcatttccaggtgagatgaatgcatctttgatgttgtaaacatggatggactgtgtttaggctatggtggcagccttaggcaatgcaaaggagtacactctgaagcagtatcttgcttttgctgaaaagttgcaaactaaatcgaaggtattgcttctgcatttgtgatgtgtgataaactgttgttaagatagcatttgtttttcctgattgtgctgatcgaagtgtctgtataataagccttcggtttgctaggcagctgcaagtctgaacctagttaatgctttaggattgttttgcggtgactatcacttgagttcagacaaaggggaaaaaaatacggtgtattcccttgtgtggagatttctagttgatacacttcaaatatgtggttgatttaatgcagataaactgaaagggacttcaaaaggtagctggttgtgtggagtcattttagaagaattgatcttagctgacatttgaaattgaaatagaacataccaccacatattttttgttatagtactgttcaagaactagtgcagaaagataacacctttttcttgtttgctgatgcttctctaaatcataacgtccaataggctcaaggatgccaggctcataaatttacagagtatgcattacaaaaatcgtatgccaaattttcagctgcttgcctttttattccagacagcagctgcaacaatagggtaatatactgataagctgattagtacttgaacgttatgcttttatatttgcaaaatgcaagcatgtaacgtccgcattgctagaataacaccgagtaaactgcaaattccatatcaaaattatagattgttgaacatttggactgttagctgaagtctgaagatgaacacatgcggtgcttgattgacatttatttcatattttttgtttctctggtaggaattgagctcaggagaagaagttttcactacttctgatgttgagagagcgctgtggagctcagcagttgcatccaagtctcttaaggcgccaccaggaaatgaccttgagaacaagtcaaagactcatggcaagagaaaacgatgactcttgctgccaatgttctagttgagctaggagttactgatggtaggtcttagaacttagattgttcattgtatgaagttaagcaatgcttctgcatctgcaaaaagaatgtggactgcgtgctcccgatgagcaggttaaaccctttggaaatgtcttccgctgtgagtctgtacatcagtacatggcactgaatgagctgggggtgatgggtgtgtttttctccacaaaatggcatggataccagatgttgccatgcgtgtgttgttctttgttagataattgcatctgatcctttcttctgtgttgccattcgatttaacagttcatgctgtgcaggtgaaattgcattgtgcgcttcgtatcgctgaaaataaagataagattgagcattcgttcatttttcacctgagattattactgagcgttgcatgtagaggatcgaaggatcccattaaagagtgggttttaacaatatgaggatcactgcaacaaatcaggtacattttccaaggggctgcaggaat

SEQ ID NO: 22938 - DNA, 6508 bp, Oryza sativa
cagctgaacaattatctgttcggttgtgtaatagatcactcatgaaacttcagtcccatagtagcagatcaggaacgtggagtgtcatagcactagcagtatggaaataggcacatcatatggtgacagaggcagcttttacatgtaaatatgttatggatgcaaaagggaaacattacaggcaaagaacaaactgcagatataagtatgttctactccttccgttttataatgtaagtcattctagcatttcccacgttcatattgatgttaatgaatctagatatatatctatctagattcattaacatcaatatgaatgtgggaaatgctagaatgtcttacattatgaaacggagagagtaattgtctatgttaattgctacacctcaatggctagaattgatcagtaaacagttattcaatatgcaagaatgaatagatcacacttgcttcacaattacacattcatttcagatctaaacagtaactgtcaactacatcgtaattgttcccatcatatgttggagactaataatgggtaatggttgcactggagattagccagatatgcactcggcattctggtttttgctgggagaggacataaatcagacttatgaagtgaagataaaatatatgacaagagcacctgatgaagttatttggtatgcaagaactttctcaataaacatgatcctacaaaattgttgcgagaaaactttaacataagcaaatgttgaggcaatccagattgatagtcagcaataaggcattaggcatggcatagtaaatttatgcagatacggccccaataccaactgcattcaagtacagttcctatacatatactgtatctagtaattaaaatgaattatcaattactgggcaatgcagaaaagtcattgctagacctgaaagattgagctattcgaacataatagaacattctgacagcagtaggaaatttcataaagagaactgaacttgctgaagagaagtaacagaaggacaaagatttctcttgagagatgaacataccatgaatcacgctaatcctcaagcgttgaaatgtactcatctatacgccgatgcctctcccgcagggctgaaagcgcctcttcagcagcctcattgatcatcctagggaggtacacattcatcctctgaaaccactccctcagtgtcatggtttccaagctgctgctcccagaactctccccctccacttccacagccgctccctctcctctaccgccgtctttctcctcaaccgcgttgtccgaagcagcatgagcattactacttgcagtagccttcccctttggagctcttcgtgcccgtcctctccgcgccactggcacctcctcctcctctgatgccttgtcattctgttcaacttctccatccatggcttccaccttatcatcttcctcctcaccgtcagtcaccgccattgccctcggttgatcctttatctgctcttctgccacagcagtagccccctcttgctgttccccatcatcgtcatcgtcctcaggaacggccatcctacacttccttgcattagaccttgtagcccttccccgtccctttccggccatctcgctctccctctcatccaggcttgtgtccactgccttgcctctcctagcagcagctctcgtcgaccttgccctcggcggcggtggcgcaacggctgcctccggcgccgccttcctcgacctgccgcggcgcgtcaccaccgggacctcctcctcctccttctcctcttgttcctcatccttccccttctcttgctcctcctcctcatccggtttagggggctctgcggccttcttccgcccacagcggcgcgtcaccaccgccgcgaccacctcctcctcgccctcctcgtgctcctccgctttggggggttgcgcggccttcttccgagcaccgcggcgagtcaccactggagcctcctccggctctggctcttccttctccgcaatgggcggctcaaccgccaccgccgccgctgcagcgttcttccgtccgccacggcgggtgaccgcagggggtttctcctgctcccccaccactgcggcggattggcgcgaggagcgcctagggccagggttgggatccgaatcgggcgcgatggagaccacgagcatgctggactccccgatcttgatgacatcgccgtcggagagcggggaggggacggtgggcacgaggggggagccgttgaggagggtgccgttggaggatcccacgtcggagacggcccaccgcgaggccggcggcgggaggaactcgatggagaggtggcgctgcgacgccccggcgtcgcgcacggcgatgtcgttgccggtggcgacgcggccgacgcggagcacggcgcccgcccgccactgccgggtctccccgccgcggcggcccttcttcacctgcagcgtcagcaccggcggcggagcgtcggccatcgccgcaccgccctgcagccgggagtggggaatcgcggagaggagagggatgcgaaaaggatttcaaatttttcggggggaatgcgaaattgccgaggagtggatatgggcacacttccacctatcgtagcagacccggttcggtcgatcggttggaccaaaaaagatcggaccctactattagaccgggccaatagaccgttgagcgacggggagaggagcccagcagccggtgctcgttagagcaagataataatacatccagctgcttagttatagtctatctatcagctcactcatatagtggttaactattcactataaatatatgatccacatgtctgtcttacagattttcttggttcctatgtctaagccggctgtaaactttgtcgaaacatgaattcggcaataataaaacggggtagcgcacgagacctaaaagtggatggatgcagagacaaaggatttagacaggttcaggccctctcaatgagaggtaataccctactcctgtttggggatttgaatccgccgggtgtagtatagatctgacgatcaagttgtctcatgccccctagagggcctcctgcccaccttatataggatgggggcaggattacaagatagaaaccttaaccaacacggtatcggtttcctaaatctactttacaatcttatcaaaccaggactttaggccgttccataatatacagggaaacgtaatacccaagtcataatctgttacatatttcatatatataagttatcccctataactagtcggataaccatgccgtgtgggtatggggtacccataatctccacagtagcccctgagaccttcacagtcgaaaagataatcttctctcgaactagattactccaaaaccgagtacttcaatcatctttgccatggtctcccgagtatttttaccaaatctgaagactgtggagggctgaaaaataaagtcaggtgcatcgactagatgcaccgagtggtttcgataattgtagtcaaccaagcgacttaatattaatatgtagcatatgcggtgtgaatccctgaataatatgatccaagtgatataccgactgctttgtaaaatatgatgagtgtaacctaaagttggctacatcattgaaaattcacatagcaaaatagctataaagaagcttgtatgttgtgaataaagaaattttcaaagtattgggcatacgccatgcgcacactgctttaacagatgtgcttaagtccctagaagacacatggttccaccacacctggaaatatatggcatatgtggtataaaatccgagtaaataaactcataaaggatttaccaaccgcctgaaaaatgaccacaatatataatcagcctaagccataatattggtcaataaaaatgcacacttacgtggcaaaaagcaatgatattgtatccaatcaattgcttaaaaacccaaacagcaccatgactatataaaaaagccagcggggcagctatataaagctttactgtttgacaccttttaagatgcattgtaccaactcctaaaaagttgagtaactgcggtataaaaggattttaaggtattgggcacttgatcacgcgcactttggcctaagcaaaaagtgcctaagtccctaaaagaacgtgacaggccacacctgaaaatatgggctgcagacatattaggcctaggccaaaaaatatgccttcgataccctttaaaggatgacacatgtaacatgctcccgggtgatatagaccatgtgatctgagtgattatcccttatgggatactccaaaatagatataacaattgaatcccgactggcgcaagtattcagttgataacccttacggggaataataaatagtccagtctttgagcatataaaatagacccatgatcatgaattcatgttgcatatatccggagcaagtccaaattgaagatataatacttgtatttgagctagtaagcccctgagcacgtagtcacaattgttcattgatggtagctgacgcagttggcatagagacaagacgaccaatatagagataatattgcccaacagaggtggcaaaaatattggtggtagtgaagatagtgataccaatcaaaagtgatgaagttgcacagccgtggaggcgaagaaaccagtcggcaacagtcaggtcagccatcaatgaagatgaaggcgcccagcgataaagttgtgtagccatggcagcgaaataatcagtcggtgacagacgaggcagatcaaaggcgatgacgaaatccaccaatcatgaagatgaggaaaatagtcggcgacgacaaacgtaaccgacagtaatgatgataagcatcaacagagatgtacgacatgagaagaatgttgcctatcaaaacaagtagagtaagctatgataaagaggtttgacaggatgttgatgaagatgacgatgtcggtgatccagtcaatagcggtgtaatagccgatgataatgacgaagacgctcatcagcgtttgcatagtaggtcaaccgtgaaggcggaatagcaagttggcaaagtcttagtcatccattagcaacggcggaatgtcagagctgatgaagcagatgtgctggtgatgatgtcagtgacaataatccatcaaactgttgtagatgcttcacttggaggaaagtatatgctgttgttcaactcattgaatctgatatgagttgattggttgatgactccaaactcccagacatgtaaatttaatcttgacctactgctctgaagcgaagacaaaattgatgactcccagagttgacttgttggctgattaattgattgcttcatcttgacataaagcttgtcaaattttgagccatgtatttgtgtagcccccgactctttgattagttgggaaacaactgaacatagagtcgagaattatagcttcttgttgtcgagtagtcatcacttgattgaagatatgtgttgaagatgtccaagtagaaatcctgaatattggagagccacttgttgtagtaaaataacatggcattgcatgccgagatgtcgaggttcacaaagacgtcgtgggtggtgaagtagtaaaacttgcgaagtagcaacaatagagtttgccggtgccgaagataataaagatgaagtcgctccaccatgatgacaaagttgtattgccgtaatgaagtgaacacaagtcggcggcaacagaagcaaaccggtagtgaagacgcgcagttgtgaagataaaagcaccagtcggcggcggcataatcagtcggcgacggaagatgatgatgtccatcagtagtggtagctgtataaaccagacgtagaggcgagggcactagtcagcagcagacgagacgaccagcgatgaagatggtaaggccaatcaacactggcagaatcatgcagccatggaagtgaagaaaccagtcggcagccatgacaaacgtaggcagcttgtgttgaagatactgatgcctattagtagtgacagcgatgtagccagccgtgaagaagatagcatcagttggcgttataacaggccagccgtgcaggcggtgacaccagtcagcggcggatgcggcggccggtcggtgaagacgtagacgcccaataacggcagcataataggccagccgtgcaggcggaaacaccagtcggcggcggtcgaggcggccggtcggtgaagacgtagacgcccaacaacggcggcataaaggccagccgtgcaggcggaaacaccagtcggcagcggacgaggcggccggtcggtgaagacgtagacgcccaacaacggcagcataaaggccagccgtgcaggcggaaacaccagtcggcagcggacgaggcggccggtcggtgaagacgtagacgcccaacaacggcagcataaaggccagccgtgcaggcggaaacaccagtcggcggcggtcgaggcggccggtcggtgaagacgtagacacccaacaacggcggcataaaggccagccgtgcaggcggaaacaccagtc

SEQ ID NO: 22939 - DNA, 1750 bp, Oryza sativa
cggccggtcggtgaagacgtagacgcccaacaacggcagcataaaggccagccgtgcaggcggaaacaccagtcggcagcggacgaggcggccggtcggtgaagacgtagacgcccaacaacggcagcataaaggccagccgtgcaggcggaaacaccagtcggcggcggtcgaggcggccggtcggtgaagacgtagacacccaacaacggcggcataaaggccagccgtgcaggcggaaacaccagtcggcagcggacgaggcggccggtcggtgaagacgtagacgcccaacaacggcagcataataggccagccgtgcaggcggaaacaccagtcggcggcggtcgaggcgagccggtggtgacgttctgactgatccattcctggagcgtaagagataagcttaaagccatgaatcccttttatgcatatctggatctggatcctgcagaacaaacatataggatgagtagtatctgatataaatataatactcgagaaaaaatcaagtattttaaaatatttataaatatgtatttctcctcttgtcaattttgatttccccgagcagatgactctgtacgtttaaacactctgtccgactagtcataaccatcaagcaccgggagtcggcctaggcacttcccaaacatgcatatgagtgacatgagttcgtcattaatggaacaaagtttcacggatcagaattttctactcgggtacttttgcaattattaagagcagaaaataaatttatctcatctctatgcttttgatttattccgaataatacttagcaccttgcgttactcggtccatccaacgagcccccgggtgctaggaatcggcccaaaggcaaccatccattggcaaaccaaacggaaagcataggaagatagaactccataactcgataggtacttttgtactcagattatgtcgcaagcaatcaagataaatattatgaaaaatatgatataacatctgtagcccccgactcactactcaatggaagaccaattggtgtagtgaggcagaggaaaaggaaaaatatcatataaagaataaaataaatgatgacttagctttataatattccccttggtgatggcagaagtggccaatgtgggaacaaagtcgtccatcaataacaatgaagacaccagtcggcggcgacgaaggcggtcgacggtgaaagcgaagacgtccaacaacggcggcataataggccagccgtgtaggcggaggcaccactcggcggcgacggaggcaggccggcggtgaggacgtagacgtccaacaacggcggcataataggccagccgtgtaggcggaggcaccactcggcggcgacggaggcaggccggcggtgaagtcgtagacgcccaacagcggcggcataataggccagccgtgtaggcggaggcaccactcggcggcgacggaggcaggccggcggtgaagtcgtagacgcccaacagcggcggcataataggccagccgtgtaggcggaggcaccactcggcggcgacggaggcacgccggcggtgaagtcgtagacgcccaacagcggcggcataataggccagccgtgtaggcggaggcaccaatcggcggtgacggaggcaggccggcggtgaagtcgtagacgcccaacagcggcggcataataggccagccgtgtaggcggaggcaccactcggcggcgacggaggcaggccggcggtgaagtcgtaaacgcccaaca

SEQ ID NO: 22940 - DNA, 1067 bp, Oryza sativa
  unsure (1)..(1067): unsure at all n locations
cccatgaacggtggtgtgaccaaccgaccgtataggcggggacaccagtcggcggcgacggaggcaggccggcggtgtagatgacgatgcccatcaacggtggtgtgaccaaccgaccgtataggcggggacaccagtcggcggcgacggaggtaggccggcggtgtagatgacgatgcccatcaacggtggtgtgaccaaccgaccgtataggcgaggacaccagtcggcggcgacggaggcaggccggcgccacannnnnnnnnnnnnnnngcaacggcagcggcgcacaccaaccgtggaggcgatgaaaccaatcggcagcgacgaaggcggccggcggtacatgtataaaataatagatcaaataataattagtgatctgtgaattaattctaatttatataagaaaatttagaacgataaacctggtttgtgatccaactttgattcgaggcctgtcaatggatgaaccgtagcatgcagccgtgtcatgcagccgtgtagacatgtaatcgtcggtagcacatgcacggattagtttggagaccactttgtgcatgtaatagctgatttgtgtatggattaatttccttgaccacagatttgaccaggtatatttaatttgtatcctggactttgtgtcttgccgtacgtatccgagtagtattgacttggtgatgtacaggctcaaccaacggtgatcttcgcatgattttggcggcggctgcttgctgattgcttcaaatcatgccctggtgacgaaaccgacggaccaacagatatggcagcattgtagcgacggatttgatctcactgacggaggtaaaattgacggtaacaagctggttgtagatcgattcgatcggtgataatctcctggttgattgaccagatccagatagaatttttggcgacgaagaccctgcccttttgttgagaggatcacggccaaagacaagagtagcaccgatgatgccggcacaaagttccatcgcacttctcgacggaaaactcgacgcagcccctacctggcgcgccaactgtcgaaacatgaattcggcaat

SEQ ID NO: 22941 - DNA, 1041 bp, Oryza sativa
agcggcggcataataggccagccgtgtaggcggaggcaccaatcggcggcgacggaggcaggccggcggtgaagtcgtagacgcccaacagcggcggcataataggccagccgtgtaggcggaggcaccactcggcggcgacggaggcaggccggcggtgaagtcgtagacgcccaacagcggcggcataataggccagccgtgtaggcggaggcaccaatcggcggcgacggaggcaggccggcggtgaagtcgtagacgcccaacagcggcggcataataggccagccgtgtaggcggaggcaccaatcggcggcgacggaggcaggccggcggtgaagtcgtagacgcccaacagcggcggcataataggccagccgtgtaggtggaggcaccaatcggcggcgacggaggcaggccggcggtgaagatgacgatgcccatcaacggtggtgtgaccaaccgaccgtataggcggggacaccagtcggcggcgacggaggcaggccggcggtgaagtcgtagacgcccaacagcggcggcataataggctagccgtgtaggcagaaacaccagtcggcggcggcgaaggccagccggtcggcgaagacgtggacgcccatgaacggtggtatgaccaaccaaccgtataggcgaggacaccagtcggcggcgacggaggcaggccggtggtgaagtcgtagacgcccaacagcggcggcataataggccagccgtgcaggcggaaacaccagtcggcgaaggccagccggtcggtgaagacgtggacgcccatgaacggtggtgtgaccaaccgaccgtataggcggggacaccagtcggcggcgacggaggcaggccggcggtgtagatgacgatgcccatcaacggtggtgtgaccaaccgaccgtataggcggggacaccagtcggcggcgacggaggtaggccggcggtgtagatgacgatgcccatcaacggtggtgtgaccaaccgaccgtataggcgaggacaccagtcggcggcgacggaggcaggccgg

SEQ ID NO: 22942 - DNA, 12868 bp, Oryza sativa
tgctaaggctataaataaacctctagggccatgtaatggggggatccccaaaaaatatttcacgaatcaatacaattgcttttacattccaactactgttgagagaaccacgcctttcgacatggcatagttgtacattcgacaacagctggcgccgtccgtggggaacccagaccgaaaaggcgaaatgggacccctttcaccacaccctttgccacagtacccgcgtggtacggcgacaagggctgggggcgaaagtgagttaagtccaagttggggggctacgaagccgcccaagcctctggacacctttcgccacatgccacgcccttcgccatagtaccaataaggcacggcgtcaagggctgctggcgaacaggtttcgccaacccacgcccttcgccatagtgccaatatagcacggcgtcaagggctgcgggcgaacaggtttcgccacacgccacacccttcgccatagtaccaataatgtatggcgtcaagggttgggggcgaatataagttgcttccaagctggggggctacgaggccaccctagcctctggagcctttcgccacacccacacccttcgccacagtacccgcgcggtacggcgacaagggctgggggcgaaagtgggttaagtccaagctggagggctacgaagccgcccaagcctctgtcgcgaccgagaaaaatacattttcccaaatgctagtgtattaatccccgtcccaggaaaagccgaggtacaccacacaaacatgatacaaaaggcacatctttattatatcgataatatttacattattacaaaggcacttaaggcctgacaatcaaaaataaacagcagcggactagcgggcctacggctccatcttcacaggtgctcaactggggtataatccaggactccacctaagacttcttctccaaagcttctcttactgaagggggggaaagattgagcaagaatgagtacaaccacagtactcagcaagccacaccggcggatgcatgattaatacaagggggtacaaggggtaataatataggggttaagttttgcagaaaacagcatttaaaagtcacttagttgcccaaagccattttataaagacgatcctagagttacacagtgttattaatcaaggccgtgaaccctcacgaacctgccttaacccaaggcctacgatgattcagaccgaactggcaacccgaccctgggtcccagctcgtcccaagccaacccaggccaaccattccacattttagttgttaagcaggttttaagaattaaaacactaacttgggtacattgctaggcttgcccataaccgagggcgcggctattcgaataggttttactctgatcagaggtgtacatctttacccacaagacacatcttcctcacgtgtaaccacgtgccacataccaccacggtatacggacggaagacgtgacatagttcccaacccatcctagccataaacaagagtaccgacccaaccccacctacggccggaacccccgggacaggcaggcaggattgaacccctagcagcaggacaccagccctgtgccatgacatctcgactaccgagccgcagctcgtgtagccttcatttgtcctagagatgtccatcgacccccgacttcgtccatctccatccgtgtacttttgtttataaccagactgagccacaaactaagccttacccactagacatgtggaagtacggtagtgctttgcaacagaggcctgagcttaatccttatagtacccgaggtacgactaacaaaacccaaccacgcacctcgagcccagcctaaaaccattttgggggttttgaatagagggggaggtgtgtgtccaattccatcataagccaaccattccatagtgtccaaatgatatgagaattcccaaagtctaaagttataaaaccacctaatgttgcctaattaatcagcgaagcatctacctaaattcatactagtggaaccatgaatagagtacccactagttggggttttgtttatcctagggtgaacaaggtaataataacaatagcaataataataaggtcataacaaagataaataggcatgactaaataaaacaatgataacgcgggaatttaaataaagcgataatgcattaatttaaatcaaaataattttataaactgggattcaatatgttcaaggatgatgtgacttgccttgctcagagagaacggccttccgaaccttcggcgacgaccacaaagcacgcttcgggaacctccggaacgacagaagctacgcgaagcacacaagcaaagctacaagcctataaagaagcaataacaatatataaaaagaaagcacacggttctttaggttataacaaacattaagagacttgaacgggtcgattcggagctcgtatgaccaagatatgatcatccgaagtttaatgctgttatatggagatttgcggattattataattaagctttgcaactataaaacatatggaagcgctagcctggaaaagacaggaaggctgcgctgttgacatgcggaccccacatgtcaacctaaaggaccgcggtagaccgagtacacagagacggtccacgggtcgacggaagcggaccccgtgtgtcaaccgaggcgagtggccgacaaacggactccactagacaccacacgggctgcacacatggaaaccacgcggctactgagcggacacactaacacggacactacacggtcaccacccgcacacgtgaacgactaccgacaccggtacacaggtaccggggtcgacaaccgcacaacgggtacggggcgacaccgaaaggacgaggacggggcagcgagaggagagatccttaccaccacgcgacaaggcgtgggaaagacaacgacgaacgggtgcggcggagacggacggcgagggaacgacttcggcggcgatccttgaacgaaggcgagacacggccggcacgaggcttgacgacgcggaggcgaggacgaagacgatgatggggctgcggcacttgacgaagcgaggacgacgaacgagaacggctggacggagggacgaacgccacgacgaccaggaacgacgagagggcgacgacgacgacgaccggggccggcgagaaagcgacgagggcagccggcagcggctgcacggagacgaggacggcgcggaacacgccgctgcgatgccgacgacggaggcggcgccgcgagacgacgagccggcgaggaggaacgatgacgacgacgacgaacaccggcggggttcggtcgaaggggagacgaggccgagggtgaccttgccgctgcgatgccggaggtggtggtggcgcagcgagccgatgagccggggaggagggaggggcggccgaagggacgccggcgacgaagaggatggagaggccggcgcgggcgacggcggtctccgaacgaatcagagggtaggccggggtggaggtcgacgcggcgacgccgagggaggagacggcgcggccggcccgcacttgagcggtgcggcaggggcggctggaggcagtgggtggcggcaatgccacccgttgccggtggggacgcgcctccggcggtcaccgcgcgaaacggagggcaggccggggagaggaggcggctgcgacgccggggaaggcggcggcacggccggccggcgcacgggtgaggagggagaggcggctggaggcggttgacgtgggggaaagagaagggcgacgacggggaggggtgatacgaccacggggaggctcgggatgaggctaaaacgagagaacggagcgagggggttccgttttataggcgtggggagggagctggccacgggaggagcggggaacggtggcagaaaaggcgcccggcggccatggaaggcggccatgaatggcgcagccgttccggtcaaaatagtgcacgattaaaggggagattagggggaaaagggagaggaaggaaaggggattaattccccccaattaattttggaatccaatgcttaaatcgtgcggtttcgagggaggaacgaactagggttttcacgggagagagaggaggccgtgcgggaggaggaagacgaccggcgcgtgggccccacgcggtcagcgcgcgcagtcagcgcacgcgcggcgcgcgtgcacgcggctggcttggctcggcctggcttgggccgggctgctgggccgaggcaggccgagaggaaggaggaggagggagtgagctgcccgggaggaaagagagaaaaacaaagagaggggagagggatttggactgtgggccgagggggagagagggagactttgggccagacttggcccaaagggaggagggggattatttttagctttttctttttaataaactttgttaattgttgttgtttaataaatattttcggtgctctgaaaattcaagtaaaatttgagggctccttttagaccaaggagaatttaacaaaaattctccggaccacattcgaatttttctagcaggtattttagtgtttgtcaatttctttttgaattttaattaattctattattccttttagaaaataatttttatttcgggatgaatttatcagggcgtgacagcctctgcacacctttcgccacacgccacgcccttccccatagtaccaataaggcacggcatcaagggctgcgggcgaacaggtttcgccaacccacgcccttcgccatagtgccaatatggcacggcgtcaagggctgcgggcgaagaggtttcgccacacgccatacccttcgccatagtaccaatgaggtacggcctcaagggttgcgggcgaggaggtttcgcccacccacgcccttcaccatcaaaccaatgaggtacagcgtcaagggttgcgggtaaagaggtttcgtccacccacgcccttcgccatagcgccaataaggcacggcgtcaagggctgcgggcgaacgggtatcaccaacccatgccctgcgccatagtaccaataaggtacggcgtcatgggcttgcgagcgaagaggtttcgtccacccacgcccttcgccatagtgccaataaggcacggcgtcaagggctgcgggcgaataggtttcgctaacccacgcccttcgccatagtgccaatgtggcacggcgtcaagggctacgggcgaagatgtttcgccacatgccatacccttcgccatagtaccaatgaggtacggcgtcaagggttgcaggcgaagaggtttcgtctacccacgccctttgccttagtgccaataaggcatggcgtcaagggctgcgggtgaacaggtttcgccaacccacgcccttcgccacagtgccaatatggcacggcgtcaagggctgcgggcgaagaggtttcaccacacgccatgcccttcgccatagtgccaatgaggtacggcgtcaagggttgcgggcgaacaggtttcgcccacccacgccctttgccatagtaccaataaggtatggcgtcaagtgctgggggcgaaaataagttgcttccaagctggggggctacgaggacaccctagcctctggagcctttcgccacacccacacccttcaccacagtacccgcaaggtacggcgataagagctgggaacgaaaatgagttgcttccaagcttgtcacgaccggaaataacccaacgggcgttccttacgtgcgtgtattattccttgtcctaggaggcaaggtacaccaaaagttgatacaatatagagtttaacaagcgggagcgtaactagataatttattacatgggcagcgaaggcccagcacacatgaagacaaacgaaaaacagcggaagactagggcgacgaccacaggcgcttgatggcaggcacgagctagacaccaaagccttcatcttccaggaactcctcttctgggtttgggaaaaattgagcaagactgagtacaactaccgtactcaacaagacacacccataagtgcagaataaatgcaagggagtacaagggagccataatatagggggttagggtttgcagtaaacagcattaaaagtcacttagttgctcaaagctactttgtaaacacgatcctagagctatgcaatattattaatcaaggccgtgaacccacacgaacctgccttaacccaaggcctacgatgattcagatcgaactggcaacccaaccctgggtcccagctcgtcccaagccaacccaggccaaccattccacatttagttgttaagcaggttttatgaattaaaacactaacttgggtacattgctcggcttgcccataaccgagggcgcggctattcgaatagattatactctgatcagaggtgtacatctttacccacaagacacatcttcctcacgtgtaaccacgtgccacataccaccacggtatacggacggaagacgtgacatagtttctaacccatcctagccatagacaagagtaccgacccaaccccacctacggccggaacctccgggacaggtaggcaggactgagcccctagcagcaggacaccagccctgtgccatgacatctcgactaccgggccgtagctcatgtagccttcatttgccctagagatgtccatcgacccccgacttcgtccatctccatccgtgtacttttgtttataaccagactgagccacaaactaagccttacccactagacatgtggaagtacggtagtgctttgcaacagaggcccgaagaccggtccttatatggccgaggtgctactatcaaaaccatgcaccccgagcccagcctaaaaccattttgaggattttgagaagaggaggaggtgtgaatccaattccacaataatccaaccattccatagtgtccaggtgataagaatattcccaaagtttagagttgtaaaaccacctaatgttgcctaattaagcagcgaagcatctacctaaattcatactagtggtaccatggatagagtatccactagttggggttttatttattctagggtgaacaaggtaataataacaataacaaaaataataaggtcataacaaaggtaaaaaggcatggctaaataaaacagtgataacgcgggaatataaataaagcgataatgcaataatttaaatcaaaataattttataaactgggattcaatatgttcaaggatgatgtgacttgccttgctcgctttcccaaacgtcggcttcaacctccacgtagagcggatcttccgaagctgtagcgtctgcacgatcaacggaaagaaaaaaggcttttactctaataaactccatataacaagcaggaacaaagcacaaaaatgggttcttaacttcttaaggaaaaattagagacttgaacggtccaattccgagttcaaatggccaagttatggccatttgaagttcatatgctctttaaatgaatatttacgaatttcttcatttaaattttaatttaaaaatggtttattgcgtcagccgaggggagagggcgcgcggaccgggtccatgggagtggggcccacgcggcagcctcacggtccacggtccacggtggcccactcggcgcgcccgagtgcggctaagccggcgcggtcggcgggaggcggcgcccccgtgccccgttggtcgccgccggcgaccaccagcgcggcggagcggcggccgagagaggggagggaagggggaaaggaggcgacggtccacggctcaccccggggcgacggcggcgatgagggaggcggccggagcggagggaggcggtggcgcggctcgggttgatggggtcggcggcgctccggcggtcggcgaccgaaacggagaggtggacgaggtcggcgaggatgcggcgaagccaaaggaggcggcgccgaggtgggaggcggtccggggcgacgatggcggcgtacaagagctcggcggcgacggcggagagagaaagcgacgtcgcgagctcgaatccggcgaggaggaagggcggcgagaggtggaaacggacggaggaggtgcggggagggtttaaatagggttggaagggggagagagtggccggggaggtaggaaaccggcgcgggaggtccggccgccatcaatggcgccggcgagatttgcgggggcaaatccgtccgtttgaaaccgagagagagagggaaaaatggggggaaaggaagagggaatcacggggagtatttccccccactttattgcacgcggggacggcgggatgcggtggattcgcggcggcggcggcgctagggcgcgggcgaagcggcggaagcggcgggagcggcgggaggtcagggatgacgggtgggccccacccgtcagcgagggtggcgggcaggctcgcccgtcagcggcgcgcgcgtggggagaggccgagtgggccgcggggagagaagagagagagagggggaaggagagatgggccgggccggcccaagggagggaagggggacttttagggtttttctttttataaaaccttttcaactttgtttatttcttaataattattatttgtgctctgaaaattccactaaaatttatttacacattttaggcttttagggaatatacaaaaatcctctaagccttatttgacttttaactttgcacattttaattgttggaggctttcacaaggattttaattattctagccataatttaaaggatatatttttgggtcattttgggacgtgacattgagcatcacttccagaaatgatcttttgggacttggttaggtcagcgacattcttgatagccgatttaagccttgctttttgctcttcgacagattttgggagatcggctagctttttgtgctccatatccaattcagcattgcattcttcaagctgtgccaagagatcgttcttgcgggcttcaagccaatcgatattggatttgattggaccttcggatagctgatcgagtttgactttgtcttcatgcacaagctgccgattgacttggattgtggcttcaatctctttgcgctcacggcgttcggctaatcttagcttggctttttctagtttaaattgatgctgctcaagataagcggctgcagttaggacatcggccagttcttcaggaattagagcttgtacttcgtgcaatcgtgtcctaatcgatccacagtcgaccactaagctatccagagaagaggcctctagctgacacgagatatcttcaagtgttttctttgcatcgtcagataagggagctagagctttgcttgaagtatcttcttctgcctcatcaagataatctttgatatcaaaagagaagagatcggctagaacctgcaggtataagtttagaaagtttgagagctaagtcaatatagtcgatctaaattcttgcatcaaaggaaaacttactgggatagcaggagcagccgattgttcttcttccacaatatgatgactccccacggccgatggagctcggtcactcgatgattgttgtacaggagaaaaagaaggagcaggctgtaaaaagacaagtgttagaaaaaatcggctgaaatcaactagtaaaattgagagtgtcttactggtagagctggtttgagaattggagctgccgatttcttttttatagcagttttcttcttctgtaactacaaaacctatgagtagttggttgaagaataatgattataaaagggtttgcaaggaaagatgttttactctgaagaagtgagtgggggcagaaggagttgaaggtatctgcttaggcgaagccgatggtgttttttcagtatcacttacttcggctgcagcctgatcaacatcatcctcaatatctttttcatccacagcttgttcaatggatggatccaaagcaggcatgtcgtcggttggcttggttttcttagacttggcctttttctttggagctagagtcaaggtgctcacaaccgatgatctagttttccttttcttggttacatcggttggttctctgatggcgccttggaggagggttgagaccttgggggcatgatagccgatgacagggggagacaattcgcctccattaggaatcagacctggggcatattcattgttcctaccaatattgctctgatgtggacgggaggactctgttgtctgcaaaacagggacaaaagattagtcaagtaatgaatcgactaaccgttatgaaatttagtgatgacaaagtttacctggggtatgatgtcagggaatagatctgtcatgtacattgtggccaattaataaaatagatgcaatttccattcaccccaccatctgtcaaagttcctgctcctgaatcttgctaactcaatattatagggtaatagaattcgtaggagacttggatatttcctccttggtgaataccgacaggtaggatgcatgggctgattgcagctgtaaagacttccctggacgtttgatatctttcatgattgatgtcttcaaatctgaagtctaataggagctcaaggtctgctgagtcttcataaagaaaccaaacctgggcatctttctggaagccttcaaaaaagctgcagaaccaatctttgagcagctcagccgatagttttgcaccagcatcggttggtgtggatgcatattctccatatgacatggatctgcgatgggtgcgttcttctccattgtcttctacaattgggtccaaccttgggaattcagcttctgttacagatggccgattgacaactttcatgactaccaagcttagccaggtctgcagtagcctccatggtccacctgctccaactattgagccgacggctatcttagccgatgcattgtttaacatttggtatagatagccgagaaggattttgcctaagggaaattgtttctttgatcctaaggcttcggctacaaattgccaattggttgtgggaccacagctggatccacagaagagaaacttttctagccacataagcaagaaagctacgtactcccgaggtgtgacaggccctttgcccatgtatgtcgctacataaccagaccaccctcctatgcttttggtcttgaagtcaaattggttcttggtgttcatactcgtagggttagctgatgaagttacatctaatccagtaatcatgataatgtctatcaaaattggagtcatcggcctttggttaaataagaaggcattgatggtgttggaccagaaataggtggcggtagccatcagaggttcatccttagcagaattggctatggtgagagcaagcgcttggcctatcccaatctcatcccagtgggctttcttactagccgatatgcgttggtaccaggtggtccagctcttatcaggggtaggcttttcgagagatggccaagacttccagtgacccaagttagggttggctagtctaaaggggattctgttggtttcaccaatgataaaatcagtggggtcaagattgccgattgggccaagaaaatagtagtttttgtgcgataggctgggaatcataactagattggaaagatgctgcaaatccaaaggaatcgggaagcagaaaacataataagaaaaggagaaatcgatttcatgcgaggaaaagagatctagccggtgagaacttacctcagcgtacttggccaatggcgcagtagatgggctagtagaagacgacatcgccgtaggcggagatctgatcaaaagcgaaatcgcctggggatcgcttttgtgtcggaggaatcgccggagagacaaaggacaaagtttcgcttgagcgggaaaacggaagtcacggcgtgagatttctcgagggcaatggttggcatttaaagcgatagaataacggtcgaaaaatggcagagtgcgaaacttgctcggagtcggtacaaggcaaatccggaacattatcaaatatcccggacttggggggcatgtgttaacgaccaaatttggtaatatcagcatcggaaaaggagattagatcaaggtggagtcgaaggcggagattaatccgagaacagagcaagaatcagctgaactccagatcggctacgattaggatcggctgggtctgaatcggactaggtgagccgatgcagccgattctgatagtataatttggtgtatgacattgggttgaattgaggtgcttcaagatgattgccgcacatggatagagtcctgagaaggcaattgtatctattaattaggatgttttatgtaacttccttagagatatgtttgggcaaaagtctgccgcaaagacttatggtatcttagagtttgttagagatagtggttgtgtccggtatggacatatcttgtaattcttgggtataaatagaccccgagccctatgtaattggtaacacacacgttcaatacaatttcggcgcatcgccacctttttgctttagttttgtttcgacgagttcttgcttttgggttgagctgcatcggtttcgatcttgaacaagaggtaaaacttgttatgacgacttgcgttctcgagattagtgcttccatctttatgacactctaatcttgtctatataattcgtcaagttatcatatatcctacataatctttggcaatatcatcatctaacctataatcggctaatatctgttaatagaaggcagccgattaggttaaatagcgacgttgtcctagattatataagatatctaccactttatgaaacacccaacggcttgattgtctagatattgttcttcttttcatacttaatgctgcatcagttgagtttgatctattaagtcgtgcttagaatatcaatctctagcctgtcctctggttgccgattagggtagcatcggagtttcagccg

SEQ ID NO: 22943 - DNA, 16583 bp, Oryza sativa
tatcggagtattagcggatacatgctagatctatctgattggctatgctataaacatatataatcatgttattaatatatatttcgatataagtgatttatactgtctcggcatggtgaccgatctatcccaatcacttgatttaagtatatattaatataagaactatatatcgttaatatctacagccgatcgaatagatttagttccttactatatatttataaccgccgatcgattcacatatgacatcggcttaaagataaatgatatgtcattggtacctagccgatcggctatcatttatagatttaaccacgaattctttgtctctatttcttgttgattacaggatcaaatcaactggcacgctcatacattcgaaggcgagttttggacctgcactggaattaagcagatctcccaggcctcgtgttttttgccaacagtattgtacctgtatataatttgcgcatagttttgaataaccgaagatgactggcgtcgcgaactagcagtttgctgaaatctctgacatatgcaaacaaagtcggaattatactggagcgagaagctccacgacaccattgaaccaaacgcactctgttcattgactcgatgagattgatctagcacttcaacctcttgtcagtgcctccaaaacctactctgatgaaatctagcaagatggtctttctccttttctgtttgaattgtcatcctcgtgtacttagacatgttgatctcattatgcaaagttaatctcgcgagttaaatgtttgcaagtccatagtccagttggagcagagttagtcattagttggagcagagttagtcattgataccctttcacttctttcaagaagtatcagggcctatgttcttggagaccatggggagttgcttcgacaaaattaaagtattagagagctaacgattcataaagaaacccaaacttatatacaaactttccggtcagttttagtcgacttacacccttgattttgactgtagggaatcaggtagataaatttgttgaaaagaaaattatggatatgtgatcttttactaatcatcattgggcatgttttcttgaattcgcaataaccgatgctcatttggtttgtctggaatgcatgttttgtttttcctcacggtcaaacccatgagctatcagagtcccagttccattgattatagagaaattaatgctagtagttctgatttcttataataaatagtacattgatgttagaacaaaatccaacattcatgacaagagcaagtccaacatgtatggcaagagcatccctccaatgagagggagcccaagtttgatcccgtgagaaccacgagagtggatcagagaggatgagaatggatggaatgggggagccagatctccctctcttgcccttgagggcttattttattcatatgtcacaggaaattatatttatgctcttgatttgctatatatgtacaatatcctcttgaaggtattttagtccttttatacaccagtttatacaacactttaagtgtggggttattccctaacaattgacacaatactcacgtaggtctctagtagaggtgtaaggtaaagatgtaccaacaaaaaaaacattcagtgattatcacagtgcactggtttgtatcaccccgcagtagcgagttcctgctgtcgtgagttgtcataccagaggaaacaattctgaagatgagtaacccatctttttagtgtatatggtgggccatttcttccagaggtttctcattcctaccattatttcctcatatattgccaatgcgattcttttgggaggagaagaaagcatagtgtatgatcaaatctatctatctattatatactaaaaatccattaaactttctacaaatactctcgagctgtcaggcacacttacaaacactccctacaaacactctcaagctgccacgtggcacacctacaaacactcatgggttgccacatggcactatctgatcttaccgtcgattttcaattaaattggtggccccgatattttcaaccattagattagatttcttattaaaaggaactgaagtatacgtacacatgatatatatccacacctacgtacgttaaaaacaaacaaagcttaccttctgttcccgaaaagaagaaaaatagtacacacgtacttacggaaagaaaaaaatataaagtaggaaatacatatgtgatatgtacctgtaacagcaatgaaaaaaaaatcaactacaaaataagattttctaccgtcaatcaaatatattactttacaaatttacgtaaatatatacagttaaactagatatataatataaatataaaatattcaatctacactgtttaaacgttcagattattttaaaattatatatccacatagcactatctattctcaccgttaatttttatctaaattagtggctctaatattatagaccattagatctattagttaaaaagtaatacatttaccatgtatccgtataaaaaatatatctgtatgtacgtatgattaaagaaaccaatatagcttacctactatttgaacaggaagaaaaaaaaaacagacgcgtacttacttaaaaaaacgatagagcaaaaaaaaattaggcacatctaatacgcgtggaaaaaatcgatggtctttaaactagaatttattttctacgattaataaaatatatttctcaaaaaatttagcaaatatacacagttaaactagatctataaatataaatataaaatatgcaatcaactctctttgcacgttgtcttagaaattattataaaattatgtatccacatagcattatatagtctatagtctcaccgttaattttcacttaaatattattaaaaaattaatattttcctcatatatacatgtacatgagaaatatatcctcataatttaattagcttacctgctgttcacgggaagaaaaaacatatgcgtacatctaacatataccagtggaaaataatcgacggtatttgaaattggattttctacaattgataaaatatattaatttacacatataaacaaatatacgtagttaaactagatctataatataaatatacaatatccaatcaacactctttaaacatcctatcttctaaattattttaaaattatctatccaaattacgatcctgttttattttttagttaaatatacatttgatgtttagggtcctaaatacgtcacaacacatgagaccaacatgtaataataataataatattatgagaagtatttaaataatttccatcatgttttagggtgtgaaatatatcatttcacaaatataaaacactaatttaaatctacatatgtaaaaccaatcaaaaaaacacaatttttttcatgtagatttgattttcaaagtttttttgttggattttttataacaatttgattgcatttgagaagtgagcaacatagacgtgtaaatattatcaaaatattttcaaccaatgaacttgctataatagagccccttaatccatcgtgagatttatggctatacatgtatgtattttctctttgccaaatagttttgataacaaataaacaatcacataacatgtgcaattaaatacttatcatgtatgtttttatagttgaggaagtcctccgtgtcagttattacccaaaacatgtctaaaatgaagtcaaagaatttttcaaaaattcaagcaaacattaaacaaggtgcccgcgtatattgcaggtccattaaacttcctacaaacgttctcaggccatcacgtggctcctacaaactctcctaagccgtcacgtggcactctgataaattagagaaatataagatattccaagaaaaaaaaacgaaaacatcctaccattgattttcacttaatatggtggacccatcattttacaccattagatctatatatgttaaacaaaaatgtcacgtacatccatacctctcccacctctcctcatacgtacgttcatccaaattaagtacgtctccccacccctctcttcttcctttccatttacagtagcaaaatttttatatataaaaacaacgtaactaaataattagaatatcttataatatattctattttaatgtgaactatatttacatatatttgcgcgtacatatataagaaatatatcatttgacataatctcctttatatcacaactaaatagtaataaaatatttaaaaaataacatatatcatgtctcctactcactttcttatccatatcttctatagccagcagctcaatacgtaaacaataaaaaatgctatatattaaaagtccattaaacttcctacaaacactctcaaactataacatggtgttctacaaatactcctaagatgccatatgacgctcaaataaactaaaaaatagaaattatgataaaaaaaatcgaaccattgattttcctttgaatagatgaacccaataattataactactacattgcacataaataaatctgttacccccacctccaccgctaccgtatgtgagcatgcacgtgtgaatgtactccctccaccgtccgactctcctataggatgcaactctcatctcctattttagctaacacataatatataaaaaataatagctaaatgatcatgactctcaagttacatgtacttttctcaatttatttgatctattgtgttatttataattaaatacataattcaagaaccataatgcctatatttactatataaaagttagacaatgctgttgttctgactacaaatatttgagcaaaatagcactttgaaaatgactaaggaattcaaatatgtgagtctaatgtccaagttcaatcactaccaagaaacttgaaactatgatgcatactctgggcctgaacccgatgaaggcggagctacaagacattattagcgaggtggacatcgacggcagcggcaacatagacttccacaagttcatgggcctaatagcacgctagatgattaggtgaagggcaaggactgagaggaggaccagagggagatgttccatgtcttcgacaagaactagaaaacagcttcatctctgccactgagcctcgccacataatgtccactacattaagagaggctcactcatgaggaggtcgacaatgatccgtgaagctaatggtgacaagcggatcactacaaagagttcgtaattaaattcagaaaaaaacaagtaattagattaaaatacatatacaaaaaaaatcattaaaaccatagaaaatataacaagattccatatagaatataaaatatgaagagtccatttatacatgcataagttataaatatttgaaatttggaataataaaataagtattaaaagaagaatccaaatacaacatgatacgagaataagtacattttaaaatccctaaaaaagacaatttataataagaatcactcaataactaaattcaaaatacaataaataattttaaaataatttttatatctttattgattcacatgtataaccaattgcatatatatgaagcaattaaagagagagctagcatgatggtaaaaaaaccagttattaccaatcaaagttggaataattaaatgtcccaatgaaagtttgttgagatttcttcacgaaaaagagatataatgaacactcaattaaaactagaaaaataccttaatttaatttcaatttgttttgttagaactatttttgaaacaaactaatgtgcatgcccgcgcgaatgcgcgggctactatcttcctagttaatataaaagagtgttggtaagagatgccgaaagaagtagtagaatatatattcaagtattcgatcgtataatcaggactctaggttaggtcaatccatcaatgctcagtggcttcccttattaaaagcaaatgactgaatgttcacttgtacttggtagttcactatactgcaaatttgtacatctattctcagtttatagattttacatatgttacatacaagacagccttacagtttataggatgtgtacaataggccagcatagacaaaaaaaaatgtgatgaatgaaataattcagggtaacatttttttttattcaccagatgtttaagtaattcagttattttcacaccgaacatcatactaactgtacagctgtattggatcttctctctgctatcataagcagaatctaggtacctttcaaattcagctctcgaccaatctgacatgtgacatctaactccccatccattttgaaacttgtttagtatttcgaatgtgtcaaaatgaacaaacaataatttgcatgactacatcttaactgaacaattaaattacacaaatatgtaagaaaaaaatatcattggcgcattgaactaatgcttgcagaggaactttatttttttttactaacggaatgtggataaccataaactaatttggggaaagatttttcattgttgtcacacattagttgcaatgccattattgatgtgaatataaaactccatataaaattcaagattcaagaacaagaagatctttcatgtgatggaatggtcacaggcaacaacaggagccgtacctcattcatctcaagagaattgcacagacgcaacaatactcagttgttcgatacaatgctcctttctttcaaatgccacacaaaagtatgttggaaacaatcttgtcatgtggatgagttgaattaatcatgtgcatttgttagtgtggttgattagccatgaatggtgtttttgtgtcattgtaaccagcttgtcaagttgcaaagataagcaacaaaattaaaatgcactagaaattgtgcgcggtgccaccaaaattatgtgtatcgggtgttctcgttccaaatgaatgtgaagctgtctccactatgttcgtgttaatccttatattcccaagaaagcaaagctagcacagcatccacaatcgcaacgcagtacaaagcaatatgtttttcaactaaagttttcaaacagagaagcaaattttccctggaattttactaattgagattcgagttccatcaaaagctgaatgcaaccgagtgtataaagatcgataatggaccaacatttttccttgaagaaatgttcttggcatgtgtgttgtgttggaacaatttctgctcaggaggaatggaggtcacaacctacagaactagggagatttaccatggcaatgatccatgattgacaccgttgactgcagcgagtcgcagctctagtgaactgctatagcagaggcatcaattccgatgaaatatagcccctcctttgtttatggtacgctatttcttccagaggcttctcattcctatcactatttcacttgatcaaagtacagagaattctactcatcacagtaaggtatactacatgcaaaagtgattcttttgggccgaagaagaaagcatagggggcatgtggggaatgatatattgatcaaagagtgtcgtgataagagagtaagagataccataagaagtataacgtatattgaactatttgatgggacaatatatcagaagtctagtcaatctattacactcaaatgcgacctccctcgttcaaaagtttggttgattcaatccatgccattataaaaaaaaggaaaaagtacgaaccatctgaacaatcttggccaaccgtattacccccctagactcaaatgccagatattttacacccctcaattattcttaccggacgaattacaccctaacactgttttgagttattttgaccggaagtttgcacgcgtggcgtcaacgtgtcaatccagtcaaaaaaaaataataacaataaatttgtagggctcacatgccatctatatcttctcttcctcaatctctcctctccccccttctctttcccactcttttcagctcgggatgggcggcggctagattgaggaagcgggaaaggtagggctcgggacggggccagcggccggtggtggaggcgggagaggcagtgctcaggacatgggtagcggccggtggcggaggcggctggaggcagggctcgggatgggggcggctgccagtggcggaggcagctggaggcaggactaggccccttctcttttcctcttcccgagtagttgggaatgggacaacgaacgcctgggagtggttgcgctcgggatgagagtggcagccggaggcgaggcaatgaacgggctcgtcggctggcggcggaggcgtctagaggttcggctcggcgccctctcttcagcggttgggaatggggccgacggccggtggcaaaggaggggctcgggatgagagcggcgtcaaggagaaggctaggaatgggggttgcggaggtggttcttcctctgaggcgaggctaggaataagtctattttgcctccgtcaactcatgctccatgttgaatcgcattcctcaacccctaaactgggtataacctgtccgccaactttcaaaaccattgcaaatcgatttcccggacggtttcagacatgaataagttcaccagccgtccctcaacttttcggcgagtttgtaggaaatgtctaatccccaatacgagacatatttacccctaaactatacgaaaccatgcaatttgggtcccgtaacaatatgtatcactggtttcgctgacgtagcatcctagtcagtaaaataaaaaaataaaaaattatgaggctcacatgcatgtaaatgaggtggctggcgggagatggggaagggaagaggcggccagcgagcctgggagaggaggcggcagcgacggcaaccacgagaatggtatatcgacagcagcatgcgaacgtcgaaagcagcgccatgggtaagcgcccgcggcagcggatcactagtcgtcaacaacgctgctccggtgggtgcaaacgcacgcacccaactacacccaggtcgtcgtcttcctcacgctcgctgtcttcggcgccgtcctcctgctcccgactgggctcccgctcgctgtctccatcatcgcgctctgcccatcgtgctgctcaccagccctatctaggtgcatgtagccatcccagtcacagacgaggcagcagcatccttccatggtcagaaaacaagcactgaaaacatcgttgccagggccatcatctgcttcaatgatcgatatgtaagcacatcactgacagttcgtattcaaacttgagcagtgattgaaacaatttcagccaaagaaaaaggaaaaaagagttccagcagaaaacggactctgtttatgatattctgcaatcttggatgcgtgcgttcttgcattggtggtcgggtgtagatctacagcggatgccaggggacagcacaggctggggtgggagggcgtgctgcgtgtgccgtcggaggcggaaggatctggcttcccgcccctcgggagtggcggtggctgaggggacgagcggcgccggcacgcggatccaataccaccgctagcagcaaccgcccgtatggcatcccgccgccatcgccacactagccccttctcccctcccccatctcccgctgcccgcctctcccatgacccaccctcttcagctggccgcgtcgggttgggacaaaaagagaagaagaggaggatagctatcatgtgggcccacacatacgttttgttattgttttgttgactaggaagccacgtcagcgagactagatatatatactgttataagaccaaaattgcacggttttatatagtttaggggtgaagatttttttatattggggattagagatgttgtacaaactagacgtaaagttgagggatgacatgtgaacttatttctctcagaggcgattccgtcctacgtgggaccaaacagcccaacaagggaagtagcggcccatgagggcacgacgggcccaaatagccccaaactcctcagacgggtgggctcacaatggttcatgggtattcaaatgaaaacccaaaattttttttaaaaaaatacacatgtgaagtatatattccatatgtatatgacatgtgaacttatttctctcggtaaaaagtacatcgaaggtccctcatgttgtcatcgggttacaaaatcatcctccaactacaaaaccaggtaaatcacatccctaatcttacaacaccgggtcactttaggtccctaggtggttttcactctggttttgtccgatgtggcagctgagtcagcgtgggatcccacgtgggtcctacacatcagcctcttcttcccctcctcctctctccacggctgacgcctgacggaggctagctgtgcgcggcatgccgatgcggcgggagcgggcgcgggcgaaggccggcagggtgcgggcgacggccggcgggcacgagcggcggcggcggcgtcaccgagctcggccaagcatcagcgcgcaaagagagagcggtggcaacaatcccgtgtctgtatcagccttcttcccgacggcggggagcagctaaactatgggatggttgacgtcacgcccgcagcctttttccaccagacgcaccaccatcaccccaacctcaccggcaacggcaatgatgaactccctccaccattccccttccttccgccatcgccctccttcgcctctccccacctcgccggcgacgacgacaacagcaacgacacgagcgcaaggtatgtgagcacctccttcctctccgccccaagtattgccaccatcgccaccacagccgctggtagcagcctcagctcctcttcgccaatgtcgctgctgcctacatcctctgcgccggccagctcctctccgcggagagctccacccgccaccgtcaccgcggcgctcaagggcctccccgagcgtcgacttgtgcttccgccgctcggcggcatgctcctgcacctccttcccggtgtgcttcgctgctccttagccacccacaacttccatgaactctttcatgcgctgctcttgttcctcaaccttccttgtcagctccgccacggcctcgccatgcgccgcatcccgtgcccccactgcagcgaagacggcgtgcatatgttgtcgcacaccccttcctctcctgcagcgcgggctctatatgcggcgaccaccggcaccgccgcctcccgtcggtcagtctcgtgcactggaaagagatggtggaagagaaaggaaagaggaagaggagctgaggctgttgtcggtggctgtggtggagatggcgacggtgctcggggtggttgaaggcgttggcggagagggcgagaaagagcgtcgggcgtcgccgtctctgttgccttcgctgagcacccctcccccccgcctcgaaggtctcacacacggacagaaaggggaggaggagaaggaggaagtgcccaggtcgtggtcggtgacgccgccgccaccgcccgccacccatctttgccagcgagcgccgccgatggccgccacttgtctttgccagggagcgtcgccgtcgcgccgcgcccttgttgtcaatcgccaagaagaggactgcaggacggaggaagagaggtagagagagtagtgcaaatagtcgctgacaggtgggcccacatggggacgacgctaactcagatgccacgtcatctaaaaccggagacaataccgtcgaggaacctagtttgcagttttgcactgttttgtaagttggaggatgtatcatgtcgggttttgtggttcaagggtgattttgtaattcaatgacaagacgagggaccttcggtgtactcatccaaaagaagcccaaacctatccctcccaccatcttcctctccccactttttaaggcccattggcccaatagcaaaaaaaaatatggcccaaactctatcaaaccctatctcctcacctccttgttcccaatcccgccgcccggcgacgcccgtcgcccccgcgccatcgcgccgtggccgtcttgccgttgccccgccgctccagtcagcccctccacgcagtcatcacagtaagatatactgcatgcaaaagtgattcttttgggccgaagaagaaagcatgggaggcatgtggggcataatatatcgatcaaagagtgtcgtgataagagagtaagagataccataagaagtataacgtatattgaactatttgatgggacaatactcccttcgtcctattataagtacagccataaatttccgtgcccaacgtttgaccgtccgtcttatttgaaaaaattatgaaaaaattgtaaaagttaagtctcacataaattactattcatattttaccatctaataacaataaaaaaactaatcataaaaatatttcaaataagatagatggtgaaagttgggcactgaaacccacaactgcgcttattatgggacggagggagtatatcagaactctagtcaatctattatacccaaatgcggcctcccttgttcaaaagtttagttgattcaatccatgccattataaaaaaaaggaaaaagtacaaactctctggacaatcgtggctgaccgaattaccccactaagctcaaataccagatattttacacactccattattcatactgaacgaattatgccctaacactgttttgagttgttttgaccaggagtttgcacacatggcgtcaacgtgtcaatccattcagaaaaaataataataattcactctaacaacaaatttgtagggccttccagtcaaaagaaaaaaattgtagggcccacttgtcatatatttcttcttttcctcgatctctcctctcctcctcttttccacactcgtcaggtcgggatgggcggcgactagatggaggaagcgggagaggcagggctcgggacgatgatagcggccggtggcggaggcgggagaggcagtgctcaggataggggtagcagccagtgacaaaggcggctggaggcagggctcgggaagagagcaacagctagtggcggaggcgggactcgggatgggggcggcggccggtggaggaggctgctggaggcaggactaggccccttgtctttccctcttcccaagtagctgggaatgggacaacgaatggctggaagtggttgggctcgggatgagattggcagccgaaggcgaggctatgaaggggctagctcgtcggctaccggcggaggcatctggaggctcgggatgagagcggcggcgtcaagggtgaggctaggaacgggggtggcggccggtggaggacactagtacagatcctctcatctgtgacggcccatcacatgcctaggcaacgtgggccgtcagaacgaagtcatctcaatcgggcctaaatttttgccgttgtagatgtactcgtcagggtgcatattccaatagctcgttaccgatgacactcatctatgacaggctcgaagttaggcccgattgagatgacctccactatctcaatcgggcccaaatactaagcccgtcacagatgagtgtcattggtgacgggctccaaagaaggcccgattgagatggccttaatgcccgttaccgatgactcttatcggtgtcgggcttctatttgtgcccgttagagattagtgtgcagccgttagagatgacatttttttggcccgattgagatatactttgcacactatatatactccagcagtccattgattgtagttatcccactgttcactattttggtgggaggttggagggggcgaatttttgtaatttttttgcaaacaaaaacaggaaaatcataaaagtaagtaaaagggtactaatcatttcctattaatttagtagtacttatgttatgagatgttaactaatattttgttcattgttcagcgatggatcaaagttggatgtacacgactggcttgaggcgtcagtacaaggagtatagagatggcgtattaagttttatgaaagccgcagaggaggataggataagaagaaacgacaagtacatgtgttgtccatgtagcgattgcaggaatgagattttatgggaagatgaaaaggaagtacacactcacttgatacgccggggattcatggagagatacacatgttgggtgaagcatggagagtaagatccgggtactgatggtgcacctgcagacggaagtggtgcagacaatcatgaagaaggagatgaagaagagcatgacatgtttgtcccatctccattgggcggtgaaatggttgatgtggaccctgatctgctgcaagacatgttacgtgacgttgatgacccagctatgaacgagagagattccatgaagttcagtaggttggtcagtgactcggagactcctctatacgcaggatgcaagccaaagcacaccaaattgttagcaacattagacctaatgaagttgaaggctagtagtggatggttagacaagagttttacagaacttttgggaatactaaaggacatgcttcctcaggagaacacattgcccgagaccacatatgaagcaaaataggttctgtgtcccctggggctagaggtccggagaattcacgcatgtccaaacgattgcatattgtaccacaagcaatgcgcggacttagatacttgtcatgtctgcaaggcttctcgatacaagcgaaagaagagcgcgggggagggaaagaagtcaaagcggggtggtccggcgaaggttgtgtggtatctagcaatcattgatcgtttcaagagaatatttgccaaccccaatgaagcaaagttagtacattggcatgccacatagagaaggaatgatggtttgctaaggcaccctgcgaattcgattcaatggaggaatatcgatcaaaaacacaaagactttgctgctgaccccagaaacatgaggatatgtttgtgtactgatggcatgaatcctttcagagacatgagcagttctcacagcacttggccagttcttattgcgaactataacctcccgccatggttgtgcttcaaaaggaaatatattatgttgtgcttgttaatccaaggtccaagacaacccggaatgatatcgatgtgttcttggagcctgttatcgatgaccgtgagattctgtggaaagagggtgtggaaacttgggatgcatatggtcgggagaacttcacgctacgagttccattgttctgcaccattaatgattatcctgcgctgggtaatctttctggacaaactgtgaaaggaagaaggcatgctctgactgtatggaacatacacgcagtaggtggctgaagaaatcaagcaagttggtttacatgggtcataggagatggctccctcaatggtaagaaagaacttgggtctgcccctgcggatttgtccggagatcaggtagacaacatggtgaaggacattactaatgagtttgggaagaaaagaaaacgtaacaaggaggacaagaagaggatgtggaagaaaaaaatccatattttggcggctaccttactgggaagatcttgaggtccgtcattgcattgatctaatgcacgtagagaagaacgtgtgcgattgcttgctggggctattgctgaatatgcctggcaagacaaaggacgggttgaatgcgcgtcttgatctacaggagatgagcattcgcagtgaacttcaacctgttacggatgagaagacaggaagagtgtacctcccaccagcttgccacacattgtcgaatgatgagaagatcgcaatgctatcatgtctggcagatattaaagttccttcgggctattgcgcgagaataagtaagtacgttaaattggaggatctaaagctggttggaatgaagtctcacgattgccacgtgctaatcacacaaatcttgccagttgctatcagaggcattctaccaccacaagtccatcacacgatccaacggctttgtgccttcttcaatgcaatcggtcagaagattatagatctagaagacctagatgggttgtaggccgatattgtcagtaccctgtgtcacttggagatgtattttccactggctttctttgatatcatggttcatctcactattcacctagtgaagcaaacaaaaatatgtgggccagcttttatgagagaaatgtggctgttcaagaggtacatgggaattctgaagtcctacgtacggaacagagcaaaaccagaggggagcatcgttgaaggttacacgactgaggaagccattgagttctgtatcgattacatggccgatactaatcctatcggagttcctacgtctcgccacgaaggaaggttggcaggtgtcaacacaactggcagaaaaagaattattccctatcaagcttcctacgcgcaggctcatttcgcagtgctgcaacatatggctgaagtaaccccatattttgaggagcatttagcgaaggtccgacgggacaatattggtcgatcagatatttggatcaatagagaacatggtgctcgcttcaacgaatggctcaaggatcgtgtagcacggtcgaccgatggcccaagtgagatattacaaaggttggcaaggggtccatcttgggatgttgacacatagcaagggtacgatatcaatggatac

SEQ ID NO: 22944 - DNA, 1277 bp, Oryza sativa
tgttccgttgcagttgggtgaatatccgcaatggtgtcaaagtcgacaaggaaggattcacattaatggacctggccaaggttggatacgcagacgaaccattcatactagcaaagcaggtcgaacagattttgtacataaaagaccccgcaaacaagaagatgcacgtcgttagggatggcaagcaaagaattgtgggtgtggacaacgttgtcgatgaagaataatacaacaagaatcttcatgtgagacctcagatcgaccctgacgatgatcccgaagacgatgtggcttacgttcgttcagaccattcggaaggcatatcactgtaaatgatgtatttaatttgtattggagccttaatgaatgaattgcatatgtttcatgccattccagttaaaactcattgaagaaatggatttgttaattatgtggttttaaaaaattatacttgttattttaaactatatgtgagaaagccaattgttaattgtatgaatttaaaaaagtaatatgaactttaaaatatatgtgagaaaggcaattgtcaattatatgattttaaaaaattaataggaattttaaactatgtaaataagacatttgttaattatatgagataaatcaaatgtaatagcaattttaaatcaggtagaagttaattataaatgatttttataacttaaaaatattttaataagtcatctatgacgggctttagtactatgcccgatagagattatttcatctctatcgggcttagtgctaatgctcgtcacggataggtatcatccgtatcgggaagagtactaacgcccgtcacggatgagtgtcatccgcatcgggcatagtagtctgcctgatagagatgaggattgactagggtttacttagtcaatcctcatccacgggtacttatccaccgccgatgccgcctctcactttctcacactctcactctctcagatccactgccgccgccgcctcctcctcctccgctgccgccgctgacgccgcctcctcctcctccaagccgtcgcctcccgaccactgccgcctccctccacgccccccggttcaagatcccccgccgcctccctccacgcccctggttcaagatccaacgccaccgcctccctccacgcctcccggttcaagatccaccgccgcctcctgctctgagcgccgccaccgcctcccggttcaagatccaccgctgcctcctccctcatcgtccacgagccctcgtggatccggccttcctgaccgccgcagcc

SEQ ID NO: 22945 - DNA, 16396 bp, Oryza sativa
tgcagtggatgaattttgcatgatttttgggggaaatgccatgttgggatgcagtgggctgtgatggaattaatttgtgatttttgggggaaatgccatgttggcatgaagtgggctgtgatggaattaatttctgatttttggggaaaatgccatgttgggatgcagtgggctgtgatggaattaatttgtcatttttgggggaaaatgccatgttgggatgttgtgggctgtgatggatgtatttgtgatgaatgtccaatgatgattgctcataaatagaccctacacacttgtgatttttggggttttttcaataagaacagaccatctacacttgttcattttatttgggggagggggagtggcagtatgggatgttttgcaaaatggatgcatttttgggctggcctcactcttgggccagcctcactcttgttcttgtttaggtttaaatgtgggtttttaatgcataagaacataccctatacacttgtgatttttgggtattttcaataagaacagaccatctacgctggttcattttatttgggggtggagtggcagtatgggatgttttgcaaaatggatgcatttttgggccggcctcactcttgttcaacatgtggacagatcctctacacttgttcttatatggctgcttgcaatattcttgggattttttgggtccaatgggatggatgaattgatgtgagctatgacggttgaattattttgggggaaatgtgagttttggtatgtgacttgtgttttttatagctgtttctttttttgcataaggacagaccctctacacttgttcttaatttcttttgggggtgggggcagttgcaaatgatggtaattaatgcataatttctgagcaaaactgaggccaaacttattatatgtcaagacttgtgtttttttaggtacaaaaataatatatatgtgacttgtgtactatgggctattttgggtgattttgagggatatgggatggatatgcatagggctgttattaaatgaagttagtgcaattatggcatttaggagaatacgaagtgttccggttgccaaatctggtttggtcgggttacttcttgcacggtaccgaccaagacaaggaataaggtcatttctagattgttatcgttactaatttcctagattgctttctaggtcatttctttctgaaaccccgttcacataaattcagtatccaaagctggttgttgtatctatggaaataagagtttcagaatgaaatgatattggatgcaatctaggagtttgctgacgataacgttaggggtctagtgcaattgtatggtaacaaggataggaagggttttggttgcctgtgtgttcaatctgcgtccgcctcgtcagcagatatgtagcatccatgttccttaaggccggagtagacgggatctcgacatcgacatccatatcccactagaacttgcaaccgctgccactatcttatggtagtgacattgatagcaagttcgagtgggatactgatatcgaggtcgagttcccggctgctccggccttattgagcatggatgctatggttccgtcgacaaggagaacacaggtaggagatagaggtacatcaaccgtgacataggacatgtcgcagcaaggcgaaccaatgtcgacgacgactactgggactacttcgagccataatcctaggacccagaataagatttctaaggaagtctacaccataacagaggtggacgatgttggatatccgatggctccgacgaaagctgtcaaaaagttccctacattatgcggagtcctagggaggcggaacttcactattctgaaggaccacatcgatctggtccctcaagaagaaaaagaagaggcctggaggcagttcaaggaaagcttccaataccctacagaggccgaggcaggactcaagcagcaggctatccgcaagatggggaattgttggaaaaatttcaagacaacactggtcacggagtacgtcctcaaccccgcccagccagaaccatttgggaaatacccattcatcacccgaaccatgtgggatgagttccatgccgccaaatcaacgaaagagtctcgggcaaaaagccaggcctaccgtgatctgcaggcaaggaaccttcacccgcaccggcttggcaccggaggctacgcggggaaacaggcaaaatgggacaagaaggatgaagctgcagcagaatctaacaccccgctagtgcttgctgatatcccgttccagcgggcaaggaactgggcaagggtaagggggaagaagaatagtgacggaactctttcgttctcaaatcccgaagatcaagcggtgtaccagaaaatcgtaagttgaacacatagaataaggttcattatgttgtatcgtattcttcgtctaatgcgtcctaactatacccaggtcgaactgaatgctgagagacaggtctcccaagaggtctgctcacaaagacgcgaggatggcatcctcacgaaagcgttgggaaacgaagaacaccgtggacgaacaagtggcattggctccaatgttccatgaaagtttgggtttccccaatacgtgtggcagtacaagaaacacaagctttccaaggcgcagaaagctgcacgccttaaggcccaacttcgggtggagcttaaagaagagcttagagaagagctcactgccgagctgttaggtatggaggctcggatggaggtatgcatcagggataggtcgaccgatgccactcccggtcccatagtacaagtgagccccacgcagaggcatagcagctgcgcatcaactgaggctccagcagaacaacctgaaggcctcgccgcggtggaccacataatggtaaaaatcaacttaataacgcatatattgtattagcaccacaaatacattgcaacatatactaaggacactaatgaatctatcacaggaacccacatcgtgtaccctagtcgttagggtgacaccaggatttgcaattcctgccgcagagggtcaagcgttcaagcctaccccggagacccgagtgcatggggcgcagctactagccggcaatgccaaagttcaggtggacttagttaagcccgattgggttggctacactatcccacacccaccgaatgagaagattctgacccttggggctgcacgtgggacctttattcaatgacccaagcacagcattgagatcaatataactccaaggccagcgccaagttctcatccgtcgccgacgcgtccccatccaacttttatatctctccctcctgccgttgaacaaagagacgaagatctccaattacagtatgatacagattttggggacgacggtatggaggtcgacagcaggccgcacctccccccctcctgccaaaaggagcaagagggcgaaatcttctccacccaagcttgatacaagtagaaaagctgctagaacggggagaggaaaaataaaggtgccattagccccaaagaagcttgatcttggcaaggcgccaatagctcctccaaatcatccagccgaattcacattgggcatggcattggtcggagacgatgccttattcaagatgggccctgcatgcaatgagttgcacgggtactacatggagaagtccaacgcaaggaggaagaacagagagacctccatgttgggccagcacgatggtcagccgttcctcgggtctactgccttcatcaccatagacttcaaagatcaatgggacctctacagggtgcgagcgatcgacaccaacctccttaagtgctactccttataagtatttctgggtacgcgatatggtagtaactgtccataaattatgcttaccctgattcttgtcttgctcgtaggttaacctggaagcatgtccatcgtaaagcaccccatgttgccttactcgatccagctgtcgtcaacgagacaacactgaaaaatgatcgagcaaacatgatgggctatatcaaggactgcttatttgcccgtcaagacaaggacttcattatttgtgcctacaatcaacagtaagcgtgtaccgtacttatactcaaatactcgacgcgtacaactgtagtatgtaactggcaatttaataatttcgcaggcaacattggattcttctggtaataacgccgaactggagtttggtacactaccttaactccaatatcaagccagaaatatacgattggtcggccatcgaatatgccttgaacaaggcatgggaccaatatgtgacaagaggcgggaggcataaggatgggcatcccaaactcggtcacaagaaagacttcccaatacatcaacaagttggcgatcagtgcgggttccatgtgtaacaccccagataaccacgtacctagagtgccacaccaaaaacactcaaaaactactaactcccaaaattattagaaatttcggcagtctcccctgcatatacggacatccacgacaggcagttgtaagataactcaataacaaaataacccacacaatccaaaccatcctaactccataaattccaagtgaaaatatggaccagaactttaaatgacctttacaagttctatgcaaaacttatgcttagcaaaaacatagtctaaaactaaatttcaatagtgtgcaataataatgtgtagtccaagggtgctactcccgccccatgccgatcaatgtcattaggtacctaaaaaccaaattaaacacaagagtgagtaaagaatactcagcaagtacaatattgaactagtaaaacatacacaagatttatgcattaagaaaccaatatgaagggttgggtttactttatttaaacaacgaagtcagaatatagtagttccctcccgggcaggtatgaatatcctcttagcattaccggtaacccgagcaagcgtgatcagcgcttctcaaggatcatgaataaagacccaaattgcactcccatgactacgcatggttcttggataatgtaaacagaacatccggaataatgaaacatgaataacatcgtgaatttgaatatggattgaaacacgaataagtagcataacatcagagccatacgatcagtaatatcaagcaattgaataataattatgcaagtaaaaccaaacaaaacaactcagtttgtccatcacataagtccgtcttgtacttgtcttaactccttcgataatctgactcaactcctccaacgttagaaccctccacacttgtggagcaaaactatacataaaccactatactcaactaatgacagttacaagggatatttactaaaatcgataacctagaacatatagacttttttaccaatttgtattaaataacctatagcagttccctttctgttttatgcataacttgcaaaccgtctaatggaatctagcaaataatataactttggacatctcaacaaaattatctacaactttcatgttgagcacaaaatcagattatgcctctgaaaatcccagattaaagaaaacgaattgctatcctgatttctggacccggtcagcagtactgttttttttttgtttctcccaaaccgtttatcagaattgagtgaaaccagcggaaagatcgggccaaacaatagccttgagtgtctcgagtggtactcagggttcagcagttcgaatcttcctaggctctgtaggcgctatagtagccccgcctgcgaaaataacctcggtgaaaaaaaaaatcctgccccccctccccagggtttcaaatcactttcacaaatctcgtccaagaaacaaaatccaatcacagacattgtaaacttgcaacataaaagcactggattcaaatccatagcaagttaacatcaataaacatgtaaacttaagaaaaaacaacatcgtcatcgccagcgaactcctctgttgcatgcggtggccgccaccgcctccctccccgctccggcaggatctaggagggcagcgagccattgatgcggccggcgctagtcgtcgccgtcctgcagtagtcttcgttgtcgcggccgacgccctccgcccgtgctaccgccgacgcccctcctctccaccggatctaggaggggaggggttgaggagaggggcagcgatgcagctggtggtagtcgtcgtcgcgtgcagtagtcgtcgtcgtcgtcgctcggtaggcgccgtcgtcatcgcttgctgtaggcgtcgtcgtcgacgcgcggtaggcgccgtcccctccgcccgtgccgccacagacgccattcgcctccgctgccaccgaccccctatgcccgcgccgccgccgatgccccctccatcggaaggaaggaaggggaggggagggaaggaatgggggagccggagggaaacgagagagagagagaggagggaatgagtggtggggagaggataagatggtagaagagatgataagatagaacttagattttttttatgtagacatgatttttgcaggcagaccacgtaaggttttgcctctaaaaatcatattttttaaggcggacctcttaagtagtcagcctaaaaaaaattgattttcgcaggcggatgataaaaatcgaccttggattatatttttgtaggcggatatttggctccgagggtcatacccgtctggaaaaataaaaggccaacatcgccaaaaatcgtttttctagtagtgcctaaatcaccaaaatttggccgaaatagaaaatgcaaaccctgggtctgtcaacaaagacattaactggcaactccatgattaataacagcaactgcatatagtaggatcacatcgtcagatatacgtaccccgtgtcattgcgtacggaaatatgcattgtctaaacaaagatgatatactcattatcttttggcatgtctttcctcttccttattgatacccattggacaattgaattttatctttgctcactgttcacattgttgtttatttggaaacaaaccacaattttcattagttatttattcaacttaatttttctacgtcattctcatgcaataattagttcattgtttgtcatgaatggctatgttcagccagccaattaaatcaatattctttcaactaggaaggtagcccgcacacatgcgcgggcatcttgtttaatgtgtttgaaattttcttacaaatgtttttgtgtagttggttttttttattggaatatcttttatactctattcaaatttatttgggatttctatgaatgttggttatgattttcttctagtttcccttgcaacataaaaatttgttaactaacattgtgtgaaagcgtgcagttctgaatttataagaaaatattgtgtcatcaccatgaagttggtttctatgaaactatctatattttgtactgtgggtatttctatactttaagtaataattgcttttatactatctatgtctttgtggattttaggataaattaatttaagattttctattaaacatatagctaatagaactatgtcatataattaaagatagattatacttcgtcgcataaatccgagaaagttaaattttgtgtcaaaatataagggattttagagtagtactacttgtcatatccaaacaactattatttattgtttaccctatcttaccctaaccttcttcccactctctacgtttcttttaattaataaggggtaccatagttccttttttttcttccttgttagctattactgtaaatatgatacgatggttctttactacttgtgaaatataacttgatgtatttttccaatttgttaacacacttggattattgtttttaatctaaatgcttatttataatgtagaaataatccgatagctacgaataacatgaccacttgactaatgataaattacacgtagaatgttgtgtcttcataaggaaaattttcaagaatttcttttattgattatatgctttaggagaccaataaatatatagattatatgccacatagattagtcatttttttaattatatgtagggtgtatattattgatgtcttttaatttatgttttttcatattgcagtatacatatttttttatttacagaaaagtcatgaggatgtagtttttattttgttccatgagattatagacctaatttagttatttgtgtttatgaatgacttattatacagctaggaaagtctgtaggagtcccacgtgacagcttgagagcgtttttagtaagtttaatagacgtttagtatataataatagatagatagatttttaggatttgtctgatttttatagcgcctcacgtgatggtgtaggagtgttttacttctagtacataatataatagatatattataatcagctagttatctaatgtttgattttattttcgtatgaaattttgctaggtagaaaattaaaagatgaaaagagtgatataagatatgcaaatgtacgtacgtacattacgtatacgtacatgagggggagagatgcctgggaggtggtggggtatgggtgggatatttttagatctaacggtgaaaaataatgggtccaccttattaactgaaaatgaaggggtaggatgttttgctttttttctcagaatttctttgatttctctaatttattagagcgccaagtagaggcttaggagcgtttgtagaaagtttcacggagttttagtatataataactaggaagatagcccacgtattcgcgcgggcatgcgtaatagtttgttttgaaaatagttctaaaaaataaattgaaattaaagtaagatgttttctatttttaattgagtgttcattgtatctttcgtctgaagaaatatcgacaaactataattaatgtatttttcccaccctgacaaccctctctttaattgcttcatatatatgcaattcgttatgcatgtgaatcagcaaagatgtaaaagttctttaaaaaatatttcatgtatttcaaatttagtgattcagtctaattttgaatttgtattcaaatcaaattattgttttattctaaattttatttatagggatttttaattgtacttaatctcgtattgtgttctgtttggacttttcttttaatacttattttattattccaaattttagctattttctataactcatacttttatcttactcttgaaattttatattttacctggaatcaaactgtattttttatagttttaatattttcttattttttaatgtatattttaaacaaattgcttgttttattttttttatgaatttagttgcgaactccttgtagttgatccgcttgccaacatcggtctcgttgatcatctcgtcgacctgctcattagtgagtctctcatgatgcattgaacatgatgtggcggggcttggcgttagagatgaagccattttctactccttgacgaagacgcgaaacatcttcctctgcccctcctctcggtacttgtcctttagcatgccattaggcccgagaactcgtggaagttaatgctaccattgcgtgtccacctgactaataatgtcttgtagctccgctttcattgggttcagagtatgtatcatggttccaagctctttggttccaagctctttggtggttattgaacctatactttaaactcacatatttgaattcattcattgttttcaaagtgctattttgctcaaatatttgtagtcagaacaaccaaattatctaacttttatatagtaaatatgggcaatatggatcttggattttgtatttaattatcaataacacaagaaatcaaataaattgagaaaagtgcatgtagcttgagagtcatgatcatttagctattgttatcttttatatattttgtgttagctagaaaataagaaaggttagctagaaaataggagatgagagtgggaaccaagaggagagtaggacggtggaggagtacgtagaaaataggagatgagagtgggaaccaagaggagagtaggacggtggaggagtacgtacgtgcgtggccacatatggtgggggtggaggtgggggtaccggattttttttgatataatagttaaaattattgggttacctatttaaagaaaaatcaatgtttttagattatttttttctttttaattataatttgcatgatttatttttaaatttattagagccccacatgacatcttagaagcgtttgtaaaacgccacgtgacagtttaagaacgtttgtagggagtttaatatacttttagtatataatctaatataatgttcccgcaaaattatttttttatgatttaaaatatactcaaaactgagtttttaattgttgatttaattgtaaagaatatgatgtttcaaacggatcagaaatcaaatgtataacttaatacttagtataagcgtgtaaaagcagggaggcacatacgtagaattagaaagaggtagtgcacgcgcgcttaaaaaccacctgataacccaaatgcctaaaattaattaatttatattccaaaagctttgtgaaatttatatgaaatcaaagatagccttgctgcactactacgtggaatcaaagtgataagccagctgtaaggtgacagatcaaacaaagagatggaagttgcttgcattgcttatattgatacagcagtcggtagaactgctccatatatcgatgaaggattttctttatctgattgtttgcttacaaaatatattaaaaactatagtaattattttgaactcatcgaaccgttgatttcttgataaaaaaatgattgcttagaaataggaaagagaataggaggggaggggcagcaaaagagaggagaggaggtgtgcgtacggaaataggcgaggtgtacagatcaacctaatctaagtagatctaatctaagtatcttacgctggaaataggtggtttttgttgttttcttattgagataaatttaatggtgcaaaataatgggtccaccaatttaaataaaaattaacggtcggatgttttacttttttctagaatttctagtattttctctattttattagaatgccacgtggcggtatgagagcgtttgtagaaagtttcatgcacttttagtatataatagacagaagatagatagatatatgccctttatcgctgaaccagcatatatatatgcatcctttgtgaacctggtgaccagagctggccacaataaacgcacatcttcatcgttagctatttactgtatgtatctttccagttgctgcacgcaccaacactatatgaacaaaccaggactcttttctaaaaacaaaaaaaacattaagtcgagtagcaagctgtagaactaaaatatgggtgcagtatgctatctatataggtataaggggcatctggaaaataggtttggatttgagggatcagaaacgtggattgagaatgcgggcagccactggtgaagaaaccgtttgtagtcccggttcgtaactaaagatcgctatctttagtcccgggtgaaataacttggactaaagatcaatctttagtcccggttggtgttaccaaccgggactaaagatcgagctgatctttttttatttgcatggccctgttactgcatgggttatatatatatatatatatatatatatatatatatatatatatatatatatatatatataaaccatgcatatatatatatgtttcaatacatatatatttataatatatatatatatattatatttatatatgtttcaatacatatacatgcataatatatatgtatttatacatatatatatgcaaatgcatatgtatatatatattaaagcacttaacattttatgtgcatatatatgaccaaaatatatatttaccctaaagtaaatgtgtacatgcatatagaaaaatagacatgcattaattacaattcattatgatgtcctagctagctacgacttcgacgtagtagtagtcgttatctcagaagctaacgacctatgaattatatttccgtcgtagtagaattcaccctcgggatcaaggatttattcgttgatgaatcccataagttgttcttgaaccgccgcgataaattccttatgtgtgagcttatccctcatgtgaataacctatgaatgtatgaaattaattagtaaacaacaaatcgatacgtacgcaatgaaattttcaatttatttgtatgtacatcgagctctcttgtgttgatgatttggtctgcaaggcagtggcaatactcgcacacgtagtaaccgcacaagttaattccctgatcttactttgcgcactatatatacatgacaaacggtgagagatctaattaatatacacttgtatttgaattggagattcaatataaatgtagagcatgtgtactcacatgaaagttaaacttccgcctaagtctttctctccatttgcagcggaccaaatgtcggaaccgataccaagccctacatggagtttaaagctatggttcgtagtagcaattaattataacaagactcataattaacattggaacatatgacagtacctgctataagtttcaaaaatctagtcaaacgtagacttctttttatctattgagtcatatacattgactacgcaggcctccaagtcgaagagtaaacggacccagtggaatctgcaatgtgcgtcggatgtattacatatgaaacacttagcatgttcgtacgggaatgaaatttggtaagaagacagtaaaaactaactctgtgttgtacggcaatagtataaacgtcttgtaatgctgcgctttaaggagatggacgagattgtcctctgtggcttgcggatactggtcgagcattgcgacgtttactttccgagggtcgacgaatccagtatcaaaaacccccccgctgtcgggcccgttgaatctccattctacaacgataaaaggaagtatatattatatatggtgtacttatatacaaggacctaattaattaaaggaggcgtaataagaaatctaactgaatgatacttacaaagtccaacaactcataatagagacgtcgagagcgtctagctggtatagttcgtagatacccttaaaattgatccagagaatatcttccccttgcatgaagtctgtgtccctgatcctcactccgatcatctctctactagtggcgctcatctccatgtacagttgatggaattggtacatttgtgttggtagggactgcagctgctcaggcttgacaagcggtttaccaagttcgtacatgtatttcacttccgccttttcgattggtgcgcctcgtagcaattgatccgtagttagcccgatgtcattaataaaatcttgtatcccaaattcttcatcggtcaccaacggctcgatctcctggtttggttgctctccaagctaagggactggtttggactttccagaagttgctttcttaagtgttcgctcatagtctgatagctttatggcctccttggcaggtgcagacatacccctgaagaagttcttgacactcgggtctataggaatcttattttctggacttcgaggcttcaattgtctcctgacttctgatgccacataagcgtcaagcttctcttgcgtgcaatcgtaccccgggtccttgtttttggcggcgtcaactttcgccttcttcattgcctttgtgggggcaggcggtggagcttggggggcccttgacttggaaggtgccggacgaggagcttgcggaggagttggtgtaggagcctgaggaggagtcggtgcaggagcctgaggaggagacggtgcaggtacctgaggaggagatggcggagccagaggagatggtgcacgagacgccgcttgtcgcccagggaggatgatgtaccgcttgcaccatagtataatggcgtggcttgtgtcttgtagatgcgtctcaccgtctcctccagggtagtccaactcaaggtcctagtacgcggctttcaccaactcaactttcaccttggagtatcctactggaatcggcctgcagtggtaagtctttgaagggtccgttaggatggccatgcccgacgccaccttcacgtggtgagaggttatttattagtaatcaacatatataagcagcaacttgcggaatggacaagtctaaaatctataaactacgagcttacctttattgataagttcttgaagggaatatgcacctcacatggtgtccgctgagtgatgtcatcaatgaggcaggtggtttcgtcctgggtttggatggcgtccatgctctgtgatcctacctgccccgttgaggcgcagctgctacgattgcctgaagggctcatcattgcaggaggaatggtcggctggggatcatgggaccgatgtgcggccatgcgttcatccaccttccttaccacctcctcttgcatgctgagctcgtagctcgataccctgtactcaagatcttcaatcttcgcctcggtatctctcttgctcctcatccgactcctgtacgtgtggatgtcctccttgaatccaatcttccaaggaatcacccctttccctcgtgttcgtcttggatgctccggagtctgtagggcgagtgacagctcgtccttctctctgtcgggtcagaacgtgccctgagaagaggcttccactgcgtccgttagtcgactcgcagcctcgcgtatctgatcgctgaagaccaaggagccatcaactgggttgagcgttccaccgtgagcatagtaccagaactttgatcgatccggccatttagcggtgaccggttcgatacctctctcaagcaagcttgcctccatctcctcgcacttcggcatcgcgacgctatagccgcctgaccccaagtggtgatggtacttcttcttggcggcattttctttgtttgtttccatcatagcctgcccttgttgacctatcttgtaagcaacgaactcgtcccagtgatcccttagcttcaggaatgtgttgaagttcggtgtctgccccttcaggatgtatgtgtggaacagatctcccttgaagctctacaactgttgtgccatttagttaagagtccaccttttccctatgttctctgtacccgcgggaagggtgaatgtctcgagcattgtggtccacaacatctctttctccgaatctaggacaaagccctcatgatctccgcgtgcctttgttctgcgaatacactgtactgacaggcacgttatcccgcacaacccaaccgttgtgtctacgtagttcttggctgcttctgccggggcactaggtcggccgttgtcacgcccagaaactcacgaatcagaatttctaagctgaatgtgtattaaacccctgtccaggaccagccagggtacacaaatgacaattgttgacatacagatccacgtcttacaaaaatataaaagattataaatgcagcggaaaaagataaaagcgagctgagcctgaagacttgactcctgcagcggacgactccattccacaggcatccttaacggcagcgacgaaaccaacctcttcgagacatcttcaactgagaaggacttcaactctggtgtgggggaaaagagagcaagactgagtactacccactgtactcagcaagtcataccggaagaggaggtatgatgcagggtatatccaagggaggctaaggttcttttgcataaagctagaatttaaaagcagttgttgaaagcagtaaaacaattgcagtaattaatcaatattaaccactcactgtccaacgctacaccacgttgcaacaggcccaaccaaccacctgaactacgccagttcattagctaactaggggtgagactaatcacggtgaatctggtcgaccgcccataaccgcgggcacggctattcgaatagttttactctgatcagaggtgtacaactgtacccacaagacacagccccacgacacattcccgtgcgccgacatgctaccacgacataccggaaagaggccgtgacaggacccttcgcataaccccctctaaccgatcgcaccacaccttagggttcgccccgtccccagcaggcaacgggcagcccccctttcatgccgcagtgaatccggaagccgatcaactggacaccccggtcgacccaactccatcacgcccaccctcgcctgggtacgtcggctagagaaaagctacactacaagcccagccgttgcccacgatggcttgtggtaagtacgataagttcttccagggcatcccgcgaaccggtccttaatcgccatgggcacaactagcaaaaccatgcacccacagcccaccatgtagtgtattttaataagccaacaccattacggtggcactaatccaaagctattgccaaagatca

SEQ ID NO: 22946 - DNA, 22077 bp, Oryza sativa
  unsure (1)..(22077): unsure at all n locations
ttgccttccattgcaagaattccagcatggtacccaactttttgtgtacatgttcgcaacctgggtgttttgtggtccgctaacatatgctccaatttctagacctcctttttaatttcgcaatccttctttacgtcacacaacatctcaccaagatcatctgcaccatcgttttcttcaacagctccgtctgcctcgcctgttgtattttatggaagtccatcgtattgagcccaatccggaatgttgtcgtcttcttcttaatcttcttccattgcaacctctaactcttcgtgcgagatccaacaattatagctaggcatgaatcctgactaaaacaagtgcatatgaagaattcttgatatagaatactccatctggttttgcacttttcgcatggacaatatataaaacctttaggcttgtgggcattggccacactcaaaaaaataatgcgagccattaattaattccttcgatcgtcggtccgtggtgtacatccatagccgattcatctacattaggaagtaacaaatgtaaaggaagtccatgaaagtgaaactacttcaatagtaatacaataatttaaaacatcgtaactaaactgaaaactgagggtaaacatttttaatgtattcttcttatttctaacgattttaatgagtttaaagatccgaaatatttgttggttttgccgatcgagcaaagatcggttgtccagtagtagtgtcagtagtgtcttatgggaagtgccactgatgtgaagaaaattttgctaaagtgactcgttaactttatgttgaaattctctatcattaattcctgtagatatgttcaaaactatctaaatagttcttttttttccaaaaagcagttgttatttttccaaaaagcacttgttatttttataaaatagttctaattagtttccaaacatcccatcttttctagtagagacactccatctactagaaaagactaagaaaattaaggtctactgctggctcagtcgctcagatgtgtggcaaaggtcaggatcactctcttgctgatttgctgtagaacaaaagatgattctgcatacccttgcccggacgcctcaaaccgctgctcttatgtcatagaacaaattgttgatgtcacttagtagcgatggcccacgtggcacctacgactggtcaaaaggccatttgatcaccacacgcctgcttgcgactgcgaggatagctgagcactgcacacggacgcacgcatgcacagccgacttggatgttgtggggaattcccaccgagactactacaccggcgttgttcgcagtttaagcatccaaataagtgcctttttctttccagagacctctcaaccccatcacattttttccacagaatttaaacattatatttttactagttatatattgctcgtgaaaggatatatatgttatatggtatagcatacaaatatccatgatgtagagggccatgttctttaattagttatatttattgaactggggataaatgacaagttcagtagaatccatgaaaatgcaatcaacaattatctatagaaaccaaacccatgcaccccggttgacatcgacggattttccttgcacaacgaagaaagctaggttccggcataattggtacatgagattggttggacttatttaagccaaacacattgaccttgtttgttcttaattagacgtatttttaagctaaccttttgcttatacgtcttataagcaaatggtatcaagcctttaagtttatagtttaaaaaaaagaatggcttatgactttaaaaagtctaatcgaaaaagctatttgtgtacttaggcttagactattcgactcataagttagcttaaaaacctaaacttaatatgatgagaaatttaacaatatgcatgttgggtacgatggtgggtacgatttcatgtttgcatgttgcaaatgatttttttctcctaaaccatttacccaatttgtgagtcggtttaactattctattaattattattaaatctgtgaaacaaaatgtcaggtgattatactttattaaatatgcatatatacgataagcgggccacataaaatttgggcttatccatctatatatgttttatctttccatccgaactataaattggatgctcccatccattaaaatcaaacagaaaatttgatcgctatatcgaatagattagggattgacatatcccatccacccacgaccataaacaaaacacacatttgataaatctaacggacaacacattttcaaccaagtgatttaccacaacgtgaaaaataaggatagagagaactttaagaacatttctttcaagctttcaaaatagagctagctactatgtaccaacagttattacatatgatttttacaatacatgctaatgtcattggtgatggttaatggctaaggcacaaatccaacagtgaatcacgatgctgagattcaatgtgaaagcgcaactgtccttgtcgagggacgatggaatcacgttggaaagccctgatgttttgttgtgcacccgccgccacactcaaggccgagccgacgacaattgaaaccgctcgataatgagggagctcttcgatgagaccttgctgcacaccgtgcacccctttccttttttccttccatgttgaccgcagacgcaggccaacaatctcctagtgcctcccatgcatgcttagcaatatgtttgctgccctgcaggagatgcatgctcctatcctagctagcgtgctaactggctgtatgactatgtagttgtacttatatacgacgggttctaaatctcggagtattgaacaaccatcacgcacacaagtgtatatcaaatggaaatagggatggtaatttcctctacgggccgggtccccacaagggacccaccccgcatttgggcgagcgaggcattccacccgctgggtcccggggtaatatattacctctcaaaatatagcctattgcaggtccaagaagcccatcttaaaatactaggattctaggatacaataaaaaaaatctaaccctaccttatcctcttgacccccacgccgcactcactagtcaccactccatctccagatcttgtctctctctcgccggtcaccctccctttctggatctcgcctcactcgacgctctccctccttacagccacaggtcaccgccctctccactccctcccttcctcaccggttgccctctcccctccctttcccttccctccctcaccggtcaccctctcccctcccgtcctctcccctgcagtctccacgtgatggcgtgtgacacagtggcggtgcgcaggtgcagtgagctagcgcacaggtgtggcgcggcatgtaggtatgggcccacggtgagcggagttgtgtggcgagcacaagattcgcacattgagaggcatttgtggtcatgcatgcattgagttcatggatggaataatgtatcatggaaatatttattttcttgatgaattttcgatgatgctattcatgtattcatgctattttcgatgatgtgtcaagtgattggatgaaatgacttcccaatgcggaggccccagtcaggttacagaaccctggaggggtcggggacgggggctgatttggtgccgcatctccactggggaccagggccgggtggagaggtccggggtcaggggcaaggccattccagcccaacctgctccgttgcatccctatatggaaaccatcattaccatcacatgtagtgttctttagcctatggatcccacgtgatatctccttaacgatttagagctcatcttcaaatatgtctagtcctaatccatcaccggctatacttccatggcttcgagcaacacctacccattaaacaagaaagaaaccatatccgaacacaagttcaaattaacttgactcacattagcacacaaacatcgctaaaccgcacccagggtgcgctatatctaaagcgctcccctcacatgcctcccacaccttttcttgctcatatattctttctttcagcaaataaattactcatagtaaaatctttctattagtaaataaattacaaacagatatgttgatctttacattgttatcccacaccttttttccttgtccatcctgactgccaccacacatttctcttgcatacatagtcctcttatagtaaattaattacttacagttattatattgtgattagtaaatggactactcggatgccttatcttagtaaataaattactattactcgtagttattatgtttttgttagtaaatgaattactcgaacatcttctcttagtaaataagttactccttgcaatacattctgtcagtaaatcaattactccttccgatctcttctttaaatttaaaatatactaaaattctagccacataatttctcctagtaaattagctactatccgcaccaatatttctccctcaataaattactcatagttattgtccttcccttaataaataaattactcttacttctcgtagtaaactaagaagtccttctagcgatgcttctcttagtaaattaattactctttccaacaccatctttcaaaataaattactccagggagtaaaagaatcacaaacatattgttccaaccacataatttaataaattcttaccaaaccagaaaatttttcaatggtattatatcaacgatctgatcacacatgcaatgtggtacatcggtagaatgcagagaagtaattaaagatcacaacagctcccgtaaatgaatcacaacagcaacagcactgatggatacggtgatgaagatttgatgccaagactaatacgacaatctagatcaaggccaatgacgcatctatgcatgcacgaatccaacaagcaagacaacaccaataacataaatcgacgttgagccgtagaggtgctgcaaattccagttctctctgtcgacagatatctgtcaccacggctgtgtggagaggcattccatagccacttggatataaaaaaaaaatgaagattgcatctaagtatcacaaaacagcaaaataaatatgatttcacttaaacctagtatttcatagccataatattgctgttgtgaattgctttgccatagaagaaagcaaacatatttatttttttcctgctggaatataactctgagaatcaacgagatacttaattgaaccaatccccccatcgtacagtttattcaccatgtaagatgctatagcagaagcactgcactagaaaggaaagcacaatctgaagttaatcatgcaaatggctgagatgcagcatccacctccatggcaatgcatcaacaaaacatgaacctccatgaccaaagcaataccaagaaaataagaaccggcaccaagaaacccaagaagcgaatggatccaacgatgatgagcatatacgaggacctccagaagaccatggttgcggacgctggtaacgtgtgcggcacaaaatctttcttttgttcagtctgaagaattttgttctatcgaaaagcaaagagaaactatagtgtttagaaaaaaaatcaatgtatcagctcagttgaaccacaaaatttcagagaattgctatccaatgacctttataggttgctctagctccaacttattcatccgtaaggtgagagtcccagttgagttagtaaatattatttactagcataagcatggtacttaggctaaataaatgtcgttggatttaggtgtgccccacggaaagtgaggtaagcggcaggtggtgacagccttgtccgtcctatattttcctccacatacgtatatgacataagagtgcgtaaataccataaccacgctggcggaccagctgggagtggtctctcggtagtacctaggtgactggagtggtcttggcggaccagctgggagtggtcttatgttgtaagcatgtacatgttaattgttgttagaggcatgtcacgagggcctttagccaggctttccaaaaccacaagaaccatgaggtgttggccaagtccaggaggcaaagcagctgagcgaagctagatgatgaaaaccgaatggtccaccaccaagcccactatcttgacaagtcattactatgggcgaagaccataatgcgaagcaggagggtttcgcctgagctagaagcggcatcggtagagggcttgggagacaccgcggcccacagatgcttttcgccattcatgggccggcccaaggagttcacttaaaagcccataaacacaaaggacactgtgtgccctcactaaagtccctatcataagggtatcgatgtaaattcccatgtacaaactaaaccctagagggtatgagcctgtactaagactataaatagcccccttgggccatataatgggggatcccaaaaaaatttttgtaccaattaatatattgctttttactattctaacaatctaccaagtgtaccacgtctttcgacatgatgcagttgtctttcgacaacaattgtatactagacatgattagtatagaagtatagatgaatcgtaatttccaaatgctaatttcctactagacatcctatcttgctataaagttataacctactaattctaaagctcaacatgcaaacatgacacctcatcacccactagcaataattacatacaaaacttatgcaagcatgcaacatcatccaattatcttccttcacattatttttcacaatatttttaatatatatatatataaccatcatttttataatacttaacatatattcatccatataatcaaagtgcgggatatcatatttcatctacaatttcatacattgtccactaaatttatttctctcttaacatagtttgacaaaccagtttatttgttattttacttttagctcggttattaaaaaatattagaatttacttagtaatttccacagcaaagcgcgaggaataacctaattcttatagagctgaatctcctgtgtgtccactaccatatccattattatcctaacccttgtttagactatggtgaattaattataggttgattaagcagatataaaaatcataactttatgccgccgccttccccgtcgaaatataaatacgatactcttgagaatacacatgggtgaaatgctacagcgttatccgtgcacttgcggattcatccatgaacataagaaaatacaaacaccaaccacaaagatgacgataataaacagatgataggaggcgaggagatttcttagctgatcagatttcggcagcgatattagttcgtgataggtccttgtgggcctacgttaggcggtcgtcaatagtgaaccaatgtcctccatgacagtgctgtcttgaaacttcggtgatgttgatagatcaaattggtgcatgacgatgattccgatctggtcaaggaacatactctggtcgggtcagatatcctaggaacaaagtcattgaaatatcccttgtctaaaagtccatagcgccaatatcttgataaagattgagacagcgagggtcccgatccataggagagtgcaatctggtcgggtcatatctcccaaagctaaagttgaggagttttttgccggaaaatccgtcttcttgaaactcatcttgtcgaaacgttaagcaccaagttccctacctggcggaatatttttgaggttggatatcctgacgatgacatttgcagagtatggggatcatttgggccaagccatacccgagattgaggtaaaaaatataggagacatatttttatacatgttcggaccccttaactaaccggtaatagccctagtcttgttggctgaagccggtgtagccattatatatcagtatcacattagtacaatatttgggataacctaatatagtctcggttagtttggcagaaaggagttctcacacgtagccgatggctagcgtagtcttcgtcctcgaatatgaactcgatgagactgaaggtagcgctagatctctcttgtcggtcattgtggctggcccccgattgagtatgtctaggcttttgttgttgtctgttggcttgtttcctctcctccaaggggtcttgtatttataccctcgaatgtccccctgtcgaaggaaaactagggagacaagtatggatacgatccgagtagttctatttttctttccttatccaaaacaccttccgtatatcaggcatgattctgcataaaacttggtatatggtgggctacgtcgataccaatccaagactattgggtatgcccgatctataacactgacggttagtataataaacttataccactaattttgatagtatatttggcatcttttatgcaatagctaacggttaaagtttgcacttaaggaccgtcaacagtaacgaaaatgatggctttcattgtaaagtattgtcttaaatacttatcccacacattcatcccatcctaccataaatctttcatatctttcatcaatggctcatggacatggacaatgtatctgtgttccaactgctcaacttcttttcaattctctcctctttcattttccaatacttgttatttaactttctagaatgcataggaatgccaagatatttaatagggtaagacccatgcggcacccaaaaatttgagaatattgttcttaacattcttttgcttcaccaaagcaaaagaattcactcttatgaaaatttattttaagaccacaaagcttttcggacacaaaaagaagtaacttcattttcttagaattttctaaattttctcaatgtgtcatccgcatactacaagatagacaaaccctcatcaacgacatatggaaccaaccatttggccatctgaataagtacagccaacatatcaacaactatgttaaacaagattggagagagaggatcaccttgccttaaacccttccaaggtttaaaatttggtccaatctggtcgttaacttctataccaacattacccattggatgaaggaatcaatccattcacaccatttagtggaaaagcctttcattctaatagtttgttgcacaaaagaccaataaattttatcacacgctttctcaaactcaatcataaaaataatcccattttgttttttcctatgcaactcatgaatcgtctcatgttaaataactacccgtccatgatattcctaccatgaataaaagccatctgagttgggcttataacattttgtgccattcccataattctatttgtgaccaccttagtaaatatcttaaaacttatatttaattagcatattggcctatattgttgtattttagtagcatcgttagacttgggttacaagataatcgtaccaaagttaagcgaatacaagtgcaatgaaacattatgaaattattgcgttaacaagtctagagaatcatcttttataacattccaaaaaacttggtaaaactcagttggaaatctacaaggaccgaagctttgttgtgttccatttgaaaaattgcctctctaacttatttttcagaatagtttgcttttaaagcctcattctcaattcgtgccacttgcggaatatcctccatcctgttctcatcaagagagaattgtgttttttcagatggcccaaaaagacctttataataagttgtaatatgcttttttaattcagcatacccacttattatatgatcaccatctagcaattggtatattcttgtttttctttgcttaccattagccagcaactgaaagtatttggtattggaatcaccttccaacaggtcccttactttagcacgttggtaccacttaatctcctcatatcttagaagcatagctgatctattattcagaagcatgcctctgcctttttgtcctgactatataacctgtccaacaactcttttttctgtttcctaaatgaaccacaaatattttnnnnatcctctcaaatgctgtcttatcttagcctacgtaatttcgcttgtcacctttcgttggagtattcccaacctgaacacttgcgcatacctccttaaccatgtcaaaaaaaagtcatctcgcaattaccaaccaagttcgaatttgaaacttggaaggaaacttgagaaagctgagttagagtttaacaataatggagtatgaccagaaatatctcaagataaagctaaaaccgaagataaagagtttatttcctcccattcagtagaaattagaattctatctagcttttcaaaggtaggaacagtaagaatgtttgcccatgtataattcttgcccgacatttgtaattcccgtaaatttggaccatcaattacagtattaaaaaggaacggctatctatctatcattaaagttagaattattcttttcttcaggacttcaaaaaatattaaatcgccgcctattagaatcagtaaattctcatgactacacaaatggactaactcagcaaggaattgttgtttaaattcattctgtgcaggcccatttaaacttatcactcttattacacaaatgaaatttaatataaaaatcaccctcttcaatcaagccaaatccacacacactgtaaatcgacaccccacaacataccaccaaatctacccttaggaggtttcagtgccaaaaaaatctttaccagcacaaagatttttaagggcatttgtcgtaaattcactcctaatagttgccgcaatagcaatgaactccagatgatgtttttttttgttaaacctatctctagtctcccctttatctcttcgtcctcaaccaagctacgggaggcgagctcccatcaagcacctcaattcatccacgcacataacatgatggtatgaaaaatgtaatattctccactttagtctttattaattaacagaatttgttccagcaagaaaaggctcagtgcattattgttggtagtgcgtgttgaatttattccctttgctgtgcaatcacgaactggatgcaatattctgggagaatgttatacttggcatattcttcaaatactggtgaggaagcacacacctttctacatcggttaaaaaagagatattggactatcagaatttgcaaaatcgaaagtatagaaatatcatctttacattaattccaggcagagtggtggcactcgtacagaaatagcatgttgcactggtccattattatttttagagtaaatttcagaaaagccatgtttttatggtcaaagttatagaaaatcacaggtattatgacatgtgccacataaccacaagttttatggactatatgtttcataaaactttacctttattaaaacattgattaatcacagcatatttgaagcattatttttcaatgtagccaatatgtaaactatcaaccttaatcaacaaccaattttatatacactctatggtttagaattttaagtattttatactcaacatgcacaaaggtgggactagtataagaagggactattgcaaagtatatttactgatgccaatactgtcactgtcgtggaggagaaggaggctgccattgagtacgttgaggcggagctggccatgatgacacatcagcatacagaaggggctgcagaagtagtggtggttcgggtgggtagatgtgagagggagacaggagatagagtgaagggggaaaggataaggacgaggggagaaaatgagaatgtgagggaaaggataaggaagcagctgtttttttttctcccccgcactcggcattgctatctgctcgatatgtgtcggtttaataaaaactggcaccaatgtcattttaaatgcaccagctaataaaaaaagtatgggaaatatatatggttcatttttattaaagaacctgcacagacgaggagttatcagtgccagttttttctctctcaggatgtggcggggttgggtgggcacgaaccacttatcattaccggtttttcctaatccaacgcatataacgttgtcccctattaggatttctgtagtagtgccttaaaatctgagatgaacctttccattctacttactgacttgtacgcctaagtttggttttgatccacttatacttcttccttggtgagtcgtttaacaaccctgcgaaatttatattagttttatccttgaacatggacgaaaatttaaaatttatagagtaatgtcatcttatatttacctataatattaacttcgttctatatatatgaggccaaaatttaaaatatattcaaaaagacatgcataacattattttagattcgatgtacaaaggtgagaccagtatagcaattctcagatactgcatacaacatccaaaatttgtcgtatatagcatcaaaaaaatacaatataatctctttagtgtgtattaaattttatcttgcattatgtaaaaataaacttgtttactaacaatatggcctcatactgtaaaccttatgattaatatgaactcatagaacaaactcatgtactccaaatattcttacattcctgtcatgctcgaagggtaaattggacttttcagagctattaattggtcagctaatgataaactgatagaatgggtatgaaaagaatcaacacaaattcaatagtatgcaaagaaagtgagaataaacaggggtataaaagagattgacaaaaaaattaaggccatacaaagaattctctctttggacctatatatccgtctatctatctatagtgtgggatgctcaaaacccaagtatacacatcttagctagtacaaatatgaactgtttctaatcttcctggttactctagtgcagcaagctatacatttgcgaacttaagaagaagttagctacatcagtcaaaatggtgtgttatcctcttcctccctctaaagattttatcaacattttccacattcaaaactgtaacaacataccgatctgtctgtggatgatttagagcatgatagttaccaagtttggtccatggggaggaccaggcggagattatagagacgttcaggtggctccttatcggctcgttcgcctaacaatccgcagcggagacaccgtcgacgggatctccttcacctacatcggcaacgatggtctcgtgtaccacatgggtcattggggttccgatggtggtgttccgcatgaggtaaagtctaccactgatactcctctcttcctctatctctttctttctatgtctatgtagctgtggtttgcatctccaatatttatatataaagttataactagatggtactccatgtgttgctgccgaaattcatacaaaatgattagcttgaaattgtgttggatgatttttttataggtaatgttatggatgaggcgacaatataatggtgcatagaaagtgccataattctcttaggtagcccaagcaaagcgttgcacactgtattagtagtactattatagtaacatatccgaacaaggtttagaaggatccagtacagctacaaacatctccgaatgaggttaagttttgcactgggctctgaaggaccgatgttgatattgatgttagatacaagctaggaaggtagcccgcgcagttgagctggcatcttatttaaactatcatattttttgtggttaggattttgagtattatgactttaatttgtctgtcgatgaaagaatttgaaggttcctttatactacatgattgaaaaaatatataggtcagaaatagtttagaaatgcatgagtaaaatagagtaaacaaattttggaccgaggacagaaataacatgaattttaaaatttgttaacccacatagatcaaatcatcatctatcattgcgtaaataaactgcaattaaccagacaacctttgcattagcagcttgattgtctccatcccatgcgaagggaaaaaaacatgcgcatgcatcttatttcaattttattaattttattgtcatagacatatgctgcaactttttatatgcaccatgcatggatacctcgcaagcaatatgatttagggataagtagatagtgatagtgaggatatacctcctaagttagaattgatcaagtatattgtatactacatattaagcgttttagtatctaagtaataaatttaaggccgagttctaaagagcttattggattggctactcgcttatttatagtgagcacacttcccaaacggctaaacgtgtaatattttatatttttctcataatttctattattttctcaatttattatagtatcaggtagtagtttaagagtcttcgtatggtgtttaatggacttaaactttcctatgttttttttggcatggtattggttggttatgaatttttccttcagaattactataatatattcatgcaaatcaaaggatagtatagatatgcaatcgataggaagcacactatttcttcctacaatccaaaggagctttgaattttaattttaaatcccaaatataattttgagctgaattcaaactttttaatggtgtattgctttttggatgttacaaaagaaaacaaaactaaagagatgaacgtggggcctgtgtgggtacttatgtaatgtacttatgtgcacctagaagtggggattttaagagataaatttaattggtagtttttttaggtagatgtaatggataaacaatggatctaccacaataaataaaaaccaacggttaaatacatttttcttagaatttatatgatttattacaacgccacgtggtggcttataagtgtttgtagatatgctatgaggcgggaaagaagcgttcgtagggatgatatgtggcagcttactagcgtacgtaagaagtttaatgaactttcaatatataatagatagatatatagatagatatataggtagattgtcaagaatagaaaaaattgaactgagcataaaacctgtaaatatgaaatttacactctggaaaacaagttaaaattttaatttgaatgttttatgaaaaaaatatagcggcatatataagtattgatagtcctttagtcaaaacttgtgaattttttaagttatgaaaccgtttttttctttaatttgtgacatgttcatgcatggcaatgggcaaaatccgatgatttatagtggatagaggtttgaaaccagatgaattaattagacatgtactatccaattatgtaatccatgtaaattgtacctgcagattcatctcggccttatggactttgtgatggaaatctctggcacaacgggcatgtgggtcagtggaatgagtaacgtcctacgatcactcaagatcaccaccttgaaaaggacttatgggccatacggcaaccctaaagctgggatcccttttagcttctcagttgatggcagtgatcggatcactggctttttcgtacgcgctggctttataaccgatgcaattggagtctatgttcgtcactgctagagttttaggctagaaaaaatacccatgctttacaacgggtgaaggttattttattgttatatgatttagttaaggtgaaattcactgtgggaattcacttggatatatatttttctaaaaaatcatgagctgcaattaagagtccgatcatcttaagttagtatgtgagttttttttaagaaatatattatacgactccttccgtatttccaaaagcgaacgggcttaaaacccgactcaaatacggatctatattttcaaaataaaatgaacttaaaaaccaactctatatatagatgacataccaaagcaaaaatatcttcaaattttatattactatagataatgaaatgaatctcgatctttgccgcactgaaaagctacagccgctgctagctacatagttatccacattttcaaagataagttttttactcgattaattctcagtgcctctagccgggtgggtgccggaagtagtttctacccatgtagtgatgtagacataccagcatgcaaggacaatattggttctccaacaattatagttcaatagatttaagtgaaatgtaataaacagtgcgacaatatattaagtgaagtattggattagacatattagtcgtcaacctgtgagttgcacatgtggaaatatttaaatcaaattgaatcatacatgtggttaaatgcattgttattttttccctaaaaatgattttatcatgatcgcagctcaaaaaacgggtgttcccaacattacaatgattagaaaaaaagataatatacaagcactatgagtatttggattagtgggatccatacacacataagtaatactcactctcattgtctatgaccacagttgacaccttcccatataataacaatgatgccgagtagtgagtaggagagatactcaataggatagcttaccagtccctccccaagatacgccggtcaaactacacaaggtggtgtatacataccacagataagtcgatctataagggctatcccataactatctcaagtgttcaaaacgcatacttgtgctcgactaattccgatcccagcaaaagaactagcctcccacttttagcttaattaaccaagttatcgaaatatggtgcaagaaggataatttaagaaaaactagagacatatagccaacttatatgcatatggtagactggcgtaatagtaaaagttcagtggactaggggtaggcccctaggtcaactagacttatactaaacatgcagactgactaggggtaggcccctagttcaaaccatcctgaagaagttaacaactagtgatatttgcaatcatatgacaatattgcattgcacaaaaggagatacaatcattttgtcttcatcgctcatgttagtttgatcgttgtgtctggtaggagaactaatgcatactatggtatcttgtgtaagatgcgcatttatggaagtacacttgcaccatcaaaaaacttacttacttgaaatgattttccttgtctgatcacatgtgactgatctagttatgatgcctacttggtcatatatgaccacgatcactctgatactcctgatgatgctctaaccattatatttggcatctcaatggaactcttcgtttgcttatttttgaaaagtcgtgaggcctcaataggcaaaatacaagaagaatcagatcaaaattaaggaaattgcaaaaaaaaaaaggtagtgcgatcaactgatgtagagtcctttccgtcttgaatgtcatacaaatgatctgaatattcggaaccatcttcacagctgacacatagagttcagttgggccacctgaccagtggctcaattgataccattaccatttgttaaaagcgaaatttaacaagattcacatggatttggagttggatatcgatgcggaatcaaaggagattgaatcttaccaaattcgaaatgcgcatcggctggaaacatagttggaaacggattgagccgatatggcaggtagccaatacagcttgacttgggctcggtttgggtttagattggaataactgatattgccgtatagagattgagctcgcctaaggcaattgtatctattaattaggatatttatgtcggtttaaattagagatatgataagagtttgccatgtggacttgttcgtattttatctttaggaaagcttgagtcgtgtccgtaatggacaagttttgtactcagggtatcaatataagccccatacaattgtaatagacggatcgaatcaatacaactttcagcgcatcgccacctttctcttttttacttttcgacgagttcttgtttcaagtcggagcatcggttgcgatctcgcgatctctcaacaagaggtaacttgtcttgatggcttgcgctatcgaggctattatgtcgctttagatgtattagtcctattatcatagtcattattatcatatatcttaaataatcctgacttagtatctcgatttagtcatatcgactgtttctcactttagggtttacgctggcatcgactaaatcatcttactaaattatattaactaagttatctaccatcctgaaaagcggttaatgacttgattgtctagactttatgcttctttgcatactttgtgatgcatcatacctaaccgtgcttagaatcatagaaactaactaggaattaatcataactaaggatagtatcggggtttcatccgatcttacctaatatacttgatagcgcatatttcctgatctgtttatgtatattttccatttatatagatagagattgatctcacttaaacttcatatttcgtgatcaattgctatttggtatatttatatatattgatttgtttacataaatttgtattgaagtattagccagcacattatctatctttgctttaaatactgatctattggttacttccataatattgtcttaaaataattgatataaaccaaggaaacagtattacagttgatagggcatatttagggttttaatctgattaactattataaagtcgcaaccaattaggtatacccatatcggctaggtcctgacgatacgtcatcgggcctattagcagatccgctactattcatctaattatattttctgtttctcttgctggtttcaggatcaaaccagctggcacgctcttgacactcgaggcaagcgttggacctgcactggagtgaaggaaaactcctagggtgccgtgttttccatcaacaccattataccatcggcacgagtcattgatcaacttgttaactacgggcaactacatcaagcttttactgttgcatatggaatgtaggagatacattagggatgctggcatcaggaaaccttttttttggaaggcagagaaaacataaacattttgctagttgctgtcacgtagattaccaaaatgctcttggtgtggtgcaacacatccattatgaattttgggatgtcatgggcataatagacattccgaacaagatttcacttgatgacttcgtgcatgaatttttgaaagtgtcgtatgagcaagactgttttggtataggcaggtaaaaaattgttgatagtccaactaatttaacaccgaacaaagtatgacactccggtgcattataggaagatccagtcctaagaagatgaaggcaaggagtctggaagtggaagatagtgttcgacggatagtccatttaatttgttgacaaccatttcacaggttggcacatgttgattccaactacatcgtattctttgttctatttggatgcaacctaaactggggtacatacctctggtgtagatgcctacgtagtttattgctcaaacagaaatttagtaactctctgaaaaatccaaattaatatcgttgcaaagattcaaaaggtattgactgatgctgagtaaatacatcacatgggtttgggcaaaaccagggtgaaccggcaatattactcagtatagagttcacacacaaccggttgtaatgggtcggtaatgatgttttttgtagaagtgaatttattttattggttattatgcagttttaacctcaataattggatcgcctaattgtgcatgatatgtgaggttaattatatgtaatttttcgttgtatatagctagctaggggttgatcaaatttcctctggtttgtttatctttgtatattttctacgtcatagagtaattgtttcctatagattgtgctatgtttagcaataatgcattaaacgtgcttggcttcggccgtttcactaatttatggtaactttgagtagcaaagtgattttgttacagataacacaaaatatcatcgttccaaacaaaattaatgggcctatgccgatggaagatggaacaagcgtactgaaatgtcaaaacttccctctaaagaaaatgtaaaaacctgatagtgaaattttgggtactaaagcaggtagttttccaaatgaaaaaaaaaaagaaacaacaagagatgaaaacagtctaataccgtatttcattttcgacattgataagtcgattgtacccactgtaaccccccgccccctctgtttgatattataagaaagaaaagtaagaagcaaaacaagatttgataacctattgtacccctctgtttgatattataaaatgttttaatatttttcttcataagttttactccctctgtttcaggttataagtcattttgactttgatcaaagtcaaactgcttcaagtttatccaagtttgtagaaaaaataataatattttcaagccaagacaaatttattatgaaaatatattcaattattaatttgatgaaactaatttagtattgtaaatattattatatttatctataaacttacttaaacttgaaacagtttgacttttaccaaagtcaaaacggagggaggaccaaatttataaaagaaaacatagtagcattttcaacaccaaacaactataccgttaatatatattatatgttagtttaataaactaatttgatgctgtaaacttgattaaacctacaaaaatttggcttagaaaaaaatcaaaaagtcctgtgatatgaatatgaaacggagggagtatttgatattgatcggcatacaaatcctgcatctacccaaaacaaatcaaatgatgccagccaaatagaatggtagtaaaaagtaagaaaggtacaacagtccacacatagtgacaaatcacacacaaacgggtagcagcacaccacacattattacaccaagcagcaatacaggatgaagagttcagtagttcagccactagattattctgttaatgctgaagctgatgattgatctcgtgctcttgtttattctacccaagctatgaagctaggccaccaaattgagcaactcaaattggatcatcatctgtccataaagatgatgcatcgtttctccatggaagtccagcaaaggcaacaaaaaccaaacagaaatcacggacaatgcggatgcagatcgcatccatgacgggcaaaatcatgcagatgcaaaataagcagcagatctgtctgtagacaaggcatctcttccttgcaagcgagacgtcacagtgtcatgcaatgatgcaaagagtacaaggacatacataacttatcattgacttgaagaaagcagagtaagcatctcttctcccatgacatgccaagccgtaatcatttgagatagtagggattactggctacctgtagataggaacccgacggcgtgccagtgaaaggcgttatagtcagatacaaatttaatttgtagcgaatgaaaaacactgaatttctgatatttgtttcctaaacaataatattaattaaactatgtagagaagctaatggtgcaaccaatgaaatcaactcatgcagatgaagtaataagcaagataggaaggacagagggtaaataagtgagtcaatcacctgagtagggaggttctccgcagggctttcttgtagtagtgcgagtggatgggcttgtagagggaaggatggtggttggcttccatgccttcccactcaaggccatcccaccattccttctcgcagtccactataggtggtgtgctatcgtggcgaccaacagatggcagccgtttgaggctccaacagcccctgatcttcacggtctcgagctggggcgtggacatcttgcggccgcagatgcgctgcagcttgggtagctcgtgcaggtggatgcgctttagccttcggaatactatagttgaatcggaatccagtgggaagacatccttgagtgcaccgcagcacacgatttcaagtgttttcaagctacggcatccatttgaatttgatgagcataaggggagtacatgtaccaacctggggcaccgatctagatgtaagaacttcaggttctcgaatgaattgtagctaggctgaaacaatgacgtgtcccagtcccagatgtagaaaacctttaagagttgagatgcccagaatgtttcgagactccggaaaatattgtctcgagtgcaaggcgcagtaaaaatagtgccttctaagttaggacacctctcaattcggcaccaccatagga

SEQ ID NO: 22947 - DNA, 8800 bp, Oryza sativa
  unsure (1)..(8800): unsure at all n locations
cagtatgcatttctcggctagcttctttaaaaccataagttgcagaaatattagcagtagatgaaatctcaacagatacacggttgccaagtctgtcgtgcaaaagtgaccgaatgaatcttgcattcctcaatgaaatgtagaaatcaaagttaacaactgcttggtcgccatgaagcacttttcttgatgatgaacctacacttgtatcgccactggctgcctctttcttgcttgatttgtcttctcccacccatcttgcatcagtggtgtcaatgtgtagcacatacaattctagcttcttccattccctaggccatagtattgctcgtagcttctcacaacccaacagaattagcttgttgagacgtggagcttgcattgcagtaaggtcaagcattttgattgctgtatgtgacatgtccatctccacgaggttctctaacaatcctctcagcaataggctcttcagttgcgtgcatccctggaacgagatgatctttatcttggcggcgacattgctgacgaatataaatgactctagcaacagaggcaggaaattgtgggcaagtttctccagctcaacacagccatcaagggcaattgtcttgatactagaggttgacaggtcagggaattctacaaatgatgatgcttggtttgtaatctcgcaacatgtaactcggagcttgccaaggttgcgcggcctgcagctgttgcttctagcaacatggccaggacctagatggcttatccaggtcgcattcttaatccccttcacattcaactcatgaaggtgaaccatttgatccatcatctcttctgatagcaaccaataccactctgtataacttatgtccaacacccaaagctcctcaaaacatgttctattgtgatggcccattttgctctgttgatgctcatcctcttcatcaagatgagctgccatttgatcgtctatgtccttgtccttgcaatggtcaagtaggaggaacctaaggttgctgcagccaaggaaggggggtgatgaaaaactgaaggtacactgggagagatgtagtacacgcaatctgctcctgtttgaatgtccaaacatgtcacctcgtaatatcatggagctacttttgtcaatcagtgatccggcttccgtcacaaagaaggatgttgcttgaggtggcacttttactgtagctacatactggtgggtagttgaaatccagcggtttgtgtgcctccactctttactactcaacccaaaggcatcacgaatattgactgcccagacctgatgccaatcctccaagtgcatagcactatgcagagcttcagcaatctcccatgccgatctatcaccattggtggcatcttttatgattccatcacatacccaataattggctgcgttggtgccccagttgatgccatagtcatcacctctcaatgccttgtacaagatgcactccatgacaagtttggtgctcatatcaggttcaaggacaccgctgtagaaggctacctcctcagcctctacttgcagcaggtgcctgacactattaagtatggaatcacttgacaaatcagcatatatagaaacattactctcagctaacttcctttcatgcacctctcttatgtcattgctatgaagtgaaaacctgcctcgggaggtccacaacaccctcttgcccaaaagccctgctacaaggataccacaatctttaagatcaatgtagcggccactcccattatggaagatcaccaggaatccgcggtcacgaaggttgtacaagatttcctccttgacatgttgtattgggcctctagcaacctggtgtaccccatcaaaatcgtccttctcatcccactggtcaaagagggctatcacatgttgaggaagattcagatcaatcgcaatggccttctgcacagccctggtgttttgccacagtgagcaatcaacgtggatgattttgtccatgcctgctttcatcacagtagcagcctctcctaacagtgatgctgatgatttgagccgtgtggcgatggctttgagaacagcggatgcccccaatccaccccagccatcaaagtgtatcacatctcctttgtttgaacccatcagaaaatggattatctcctctgcagcaccactgatgttgtctgccttgatattgattacctgttataattagtgctaataaatcagatagtggtggcatatttgtacatcaattgcagcgatggattacatacaagcctttatttcacaagagtacaaaaataattatcttgagagttgggatggatggatcagggtaatatgtttacattgcctttaattttgacacaatgataaaatctgcaatttaattcatccaacaaatatataaaaataaaactttatattctccacgtgaatattaagaacaaatagagttttttaacgaaaaagaacaatagaattatttgaagtaaaaaaataataagcatgtccataatgatatagaaaagtacagaacagaaatccaattattgcatgttcaaattaatgtgtgcgacgtttgaatttgccaagagaatgctgctgacgagagactttctatgttgtttggacgaatgacaaccgttaattacttacaatctaacaacgatttataagagaaggtacctaaagtaaggtactcaaatgtgggtcaagtattaacttcaatattaagtggaatgtcagactaatagtttaatctgtacgtagtgtgttagtatcatatttgatgatgaaggccaaattagtaaataattagccattcttcttgctgagtgtgcctcatattatcaagccgggtggatggaatagcactgcctttgtggccatggtccctgcctatggactgccgacgctcttagttccctaggagacaacaatgtagatgtataaatatggcgcgagagaggcgacatgaaagatttgcaccctcgatggctcgatgggcagaggtaacaatgattcttttgacggctgatcttgacgcttagtagaatacagttctcttttagtctcttcatcccaaaatataaggtccaaccactattttaagatatttcataatataaggcgtgcatatatgtatataattaactagcacctctctcctgtaacactctgaaaattcgactaacaaaatcaaaaccctaaaaatacggaccttcgaaaactttgtaaataaattgcatcatgccagttttattcgcctattttatttgcatttgatttcggagttcattgatcgtgagtaaagaataattaattaggaataaaccctaaaaataaattggcaaaataaataattgaaatataatttaagataaatattaggtgaggatagaaataaataaaatattatcgcgaccatattggtaacaattaaatttaagtgtgatggaataagaattagccctaattaaaattcaaataaattatataaaaataaaatataggtaatattaatatagggtgaatcctttgtttaaaataacacaaatattgagtaaaatccatttgtgcaaaaattaggatttacagaatgaaatttatataggaaataggctaaattaaggttaaataggagctagccctgttcattgcacagtagatgctcgatgagattccctagccctgccccctcctctgccgtgcgcgcctagccgcccctagccccgcgccaccctcaccgtcgtgtcccgttgccgctgccgcaccgtgcgccgtcgccatcattgccgcgccgccttagccggcctcgtgccctgagccgccgtcaccgaccatcgccgtgcacccgtcgccgtcctgtctcgcgccacgtgcccgccacctcgcgccccacgctgtcgcatcgccgcccatcgccctcgtgcctgcaccccgccacgcggccatctcgttgccgtcgccctgcgccgctgccgcgccgcccgtcccatcacaccgagcctcgtgccgtcgtgcgtgtcgcatcgccccgcctgtcacgccgcgcgccactcgcccatcgccgtcgcctcgagccccacgcgccgcgccgtcacgtcgccattaagccggccgcccctccctgcgccctataacctcccccccggtcgcccttcatatcacaccaccccacccccttttcccctcttttctcccctcttcctctccaccgcgctgccgtcctcggtgccgcccgccgtgtgctgcgccatgcgtcaccccgccttgcgccgccgtcgccgccgctgtcgtcggtaagccaccgccccctccccttgttcggtcgccgtcgccgcccgggtaggcagagggccgagagggaagaagaaaccgggagggagagaaaaagaaagaaaacaagagagagaaaaagaaaaaggaaaagtagatagaaattagggagagattaaggaggtttagaaaattaaaataattggggttagttgtagatttcttttagttgtagaattgcaaaattttatataattatagattattttggtaatctctgtaagtaattaattcatggtagataatcggatttaattactaagaattgtattgtttgatgaattttaaagaagatacttctaaatcgcaaaatgacttaggttgaatgagcttaaaattggaataacgtagtttcgctaactttgtagtcgatatagaaagatcgattcgcgttcgacttttatttgagtttatttggattttatttgaagtctaattgaattcaaatcatttcttcgcacgtaattttagagcccgaggtagttgcggatccgagcgaggaacaagacctgcaggactacgagcatggcaagtaatcactattctttgaacatgttgatcccaattgcgaaattattttgtttacaaataaaattgcatgcaatgatgaacatcctacttatgattatgccatgccttgattattgtttacccttaaatccctgtaaccatgagtacgtatgagtccctagtcaattatgacaaatgcttagaaatgttattctagattcatgcatactcatatttatcaaatgttttatgcttgggaaattacctttaggaaggtaattgagatgcggcatgtggagacatgaacgccacattgccatgatattgatgacatgatttgtgaaaggaaaaaaataaaactaaacaaatgttttcgactggggcggctagaggattttggtagtgtccagaaaaggctagtgccgtccctggtcagttaaggaccgaaccatgaagttaagcatgaaacgacccccgtacaaccgcacttctcgtatggttatagacctagcggagtagatagctgagcggaggcagtatccatgcatagtggtttcttgatgtgtgaggcaagggctctacggtggggcagccattggtaggaccacgaggcaggtgtctacagtggtgtcgccatcggtaggactgccatgtgagaatctaaacataattataacttaatgcatgtgtgagtcttcccttcccgggtgcgccagaactcctatcactgctagaaatcgtattacgcctggagtgcatgaggatgtaaagtttatggagcgggtactgccaatgcgaggttgtcgaaaggctttgccgtgacgcgtttcatgtgttggggcgaggctcatatgttgggcagtcgcgaagtgcgggtaaagtgtacatccactgcagtgtgagtaaaccaaatctattcgaatagccgtgctcgcggttattgaacaccgggacgtgtattacacttggctagactctaaattcttaacttgtatgggatgggatattgcatgatgatttttatgttgatggagccacttcctgagaggagggaaggtggacgtcctcagaaaaccatgacgactcaatggcgggaagctatccttaggatcacaatggatggtggacagaaccgtcgttgtttaatgtgaacactggtactaaaatttgatcagactatgctaggtcttaggcttgtgaaaagaattgcaaaacttgctttgcgcaaaagaaccatagccattccttgaatagcctctatcatgtgcattgctgctgtggtggcttgctgattacggttggtactcactcttgcaatatacaaacttaatcagaagtcagagataaagcttcggaggatctctacgcttactaccaggagggtgatgaagatgatggcgctcagtaggtcttagttatggtcgttgcctgtggcaatggcatgccgctgcctcaattccgctgccttatctatttctgcttttggaatgtattccggaccattcggtcctatgatctaagactatgcctgcgggcttatgatgtaataattcgcactagactctcatgtatgtgcacttggtatttcagctatgaactcgtgtgtaccagactacttgatccagggaaatggtacagtttacacgattgattcctattataaaaacgggggtccacatctcctctctaaattttttattttaagtcctccactcttaatatctctaatcccgttgggtgcatgcatgtatttattgagattattcaactaaggaggtgataataattgtttttttctttgcgtctatgatggttatgccttatattttgggatagagagagtatgaaatttagtcgtgtgcaatgatgatggctccccatatactgagtatgaacacaatagtaattgtctaagggtgccatcgtttggcatattggtggaataagccaaacgacatattagcaaatgaaaaataatttgtgaataaaacttttatatatgtgttcttagtgatctaaaagcaaaagctgaaaaataaacttcgatgaaaaaacctcaaattcagctccaaatttaacgttgaaaattcaaattttggctgataagcataagaatatgccaaacgatggggacctaataatacatggagcaccttctacaagtagggatagagagaaaaaaatctatcttttttgcgtgcacgcttcccaaactgctaggcagtgtgtgttttgcaaaaaaaattctataaaaaagttgctttataaatcgtataaacctttttttaggttcaaaataattaatagtcaataaccatacgctaatgctcacctcgtatatattacatatcttctcaatcttcgctttcccctcctctcaaacactctcaaactctctacagaaaagtgaaaaactaactaactcaatagacaagcaaagaaatagcaattatgattggggctcaataagcaaagatgtactcatataaacacatgtgatcacgcaggtaactttagcttttgatattgttatttttcagccatctgattatttttctgaacatgcagtcaactaaggttgcacactgcaagatttgcaactcatgtaacgaagtgtaacattttgttttctttgtttttcatttacagggttaatgggatgcatttttatgcttgtctagattaaagtttgttctttcattttgaaaataagttagatcattattgtgttgcatttcaacaaaaagtgctaattattcgatcgatgtaccccacgcttcaataaaaaaatagaaaataaataaggtttgtagagctcatccaactaagcaaaataaacggacacaattacaaattgagagcccgatttttttcaaaatatctggcgttgtttcacctactgtataaaaatgtctcacatgtatgtaaaaatttttcaaactattaaaatggagatgcattgttgcatcacagttaaaacatatcgctcttaatcatgaaacatcgagcttcaactgttgaaacagccacggagccgcaagaatcaaagacaaaaaaaatgaaacaccattgaaatcccaagtgcaacactttgatgcaacatgtggaacaaccatatattgactgaaacatcgaaaaatcataaaatatgccgattagatctggcttcttactcctctctggtggtacaatctacgatcaatgtggatgagtgacaaaggtggggaggggggggagatggcggcaacaacagcacaaagagcaacgacaactgacgattgccgaccctggtggaaggactgctcctcagcggcaaagagatgtggcctttggcactgctactgcttgatacctgtggatcacatgatcccaccaacattggtaccatgtacctgcgatgatatgaagcctcatcgctgaaaagatnnttatttactgtctacatactagattatatctattgttatttcctatttaattttctaacttaactttcaattcaacaagtttgtggtaataaccgggactaaaggtatctttagcccacctgtcagtccgtccccgatttttgaatttatttttaagaaatacattacaaactttaaaaaatatataaactgaaagtaatacattacattgcacaatataaataatacatcaattccatttaaaaatctatttacaatgtttacaatcttatagaatctatttacaatgtatataattccatttaaaattcattaaaatggttagaaaataaggagaacacactaaaaaatatgtttagaattttaaaaaattctaaaaaaagtaaaatatagataatatataaaattatagttacaacttgtgtgatgttttaattgttcaatgcagatattgtatttacttaactttatgattttcttgccaggattggatgcaggcgactctcaagtttaattacattattcgaaggtcgccaagcaa

SEQ ID NO: 22948 - DNA, 7930 bp, Oryza sativa
cattataacatttcatgtattatttaatgttacgaatagatgacagatcgcaacgattatccttcatcatggaaatgatgaatttcatacatttataacatttatatcattgcttagttttttaatctttttctactatcactatatcctattatatttttttttattgaagaggtgtatgtctaatatagcaatcctctcatatatatgtatacatagtatcctaatcagcctctaaatcaaaaagattagctatgtagtatccttttcgccttcctccgcacacatcagacaaattcatgcaccaaaaacgagtattttacaagttcttacactagattgcacccacctaataagtttgtgtaccgttgatgcaatttactcatgcatttttgtaccagttgatagcaccaaagcgtacgaatcggtactaaatatgcccttagggttagttgaaaaaaacatctcaatctatatcaaatgtatgtagtaggtgggatggcaatgcgtgtgagagttaaggtgagagatcttgagtttgaatcccacaacccacatattttttttaattagtgtgcatctttactaccggctgaaaaatggttaaagattgagatgtttggtctcgatttactggtttaggttgctacaaccggtactaaaagggattttaaccggtattaaacatcgtttctcatgtagtgattggtcaatgttttaaaagttaggagtagactgaatcatgtcttaaatatcaaatatttatgattggaattagtaccaatcttagtgttttttcaactttcacaaagattacaagtattctggaaagaggatctaaaagtctcctcatattttatgtattgattacatgaagaaaatgtagtatgctactcgcaacatttgaattttaggtgagaattaatacgggaaaaagagattggtagtagtatatatgcatgtgtcacaaaataagggaggactattggtcaggtaaggcatgcatcagagtggcgaataacaaacagcagatctagatatataggagatccagcaggtcatgcctaaaaacaattacttgttaactcccaagttcttgttattttatattcgtaaactgccttataatgaatcaacaataagtgtttaatagtctgggaggtaattggaatacggcaaaaactctctgctgttacgtagtctgtcatcactaaattccttcgagacaatcgaagtcagaagagtgatttacctctgtttccatggggaatacaatgtgttgttgctttgcagtatgtttagctagcacttgttaaactacaagctggactagcagctccatctgcatcaatgctttctggatctccatatctcaccatctgctcgcaaaactatctctttgaagctccctacttccttccagccaaccaatatttcctacacagatataaacagatacacttgatgggtccaaagtccaaactgttactagctccttaattacatcgatgatgaggtacatatatgatggctattcatgatttggcttaactaatcattctcaaacaaagtaaatacaagctgtaattaaaactggagtgtcagcatgtattcgtgaaccctcgttgaacatttaaacaagcttgaactatatataatgatgcgtaaatgggtagaggtatagactaatcaccttgatcttgacttcaggaaaccatgcatggttgcatatgcataaggaggaagatgagcgataatgtctggagagcagacaactgacatgcatatactaggtgcttctctaatgcagaggcttcaatgaaatgacgtgcggcgttccattccctggcatatattcctgccttgtgcttcctttgaattgcttttctgcaaagcccccaaatcggtcatatgctgcacgcagcatcaatcatcaaattctttgcttgtatctgtgtcagatgccaggctagctgggacctgccatgaaagataactaaaggtaaaggtacaaggcaggtagagacatgtacgatccaattggggatgggaatggatcaatcgactgaagatttgtctggttaggttaggcctacatggaagaagattagtacggtaatgtaaaactatttcgacccagtgattgatagaataatcttgggcatttgtatttttcttaagtttagctgcatttcagttcgttagttgtttcctcatgcatgtaataagctgactgaaaataagtttagctgcattacagttcgttagttgtttcctcttaagtttagcctttttttagtcgttgtggccgagctgggaacggatcgtgggatggcacgaattctcagatctagctgtttaatcggtcaagttttgcatgtagcaaactcttaagatggaggtgaataaatagaaggagaaaaaccgaaaagctgcagcggcattacgcaacgcaaaaccagtcgttcttgttgctctgttttcttcgtgctctgttcttcagtccattgttcacgtctggaaatattcagagatagtaggatagccatagatcgagtgcagagtgagggaaatttgctgacaattggtatcagagcgaggttccggttccgtttttgatgttgtcggatgcgcgctacattccgccgccgaggcgtggtggaagtgacggtagtagcagcgagcaggggagcggcagtgcaaatggcgcaacgatgccgctggtgccgctgtccagagatggtggcacagctgcgaggctgccaatgcgacgaggacgaactaccccagctgggagatcgaccccggctacgtgaagtaccgcgaggatcgtgtggccctctctgccatactccaggccattccgcgggagatgttgcgcgggctggcgaagcatgacacggcgaaggcggcgtgggaccccatcaagaccatgcgggtcggtgtcgaccgcgtgcatgaggccaaggagcaagggtttcgccggcaatttgaatcgatgcggttcaaggagggagagaagccggaggagtttgcgatgtggctgacagccgttgttgcgaacatttgcgacattggcggagtcatggaggacgaacatgttgcgtgttgtccctaagaagaacaagccggtggcaatttcactcaagcaactcctcgatatcaagaccatggccttggaggagctcgtcgggcagttgtccacgattgattcgtacagtgacgatgattggctagtgccagtggcaaactatacctcggagcagtgggaggtgcacgcgaagcaggagcaagaaggcgcagccgccaacaaggcccatggcggtgctggctcgcaaaatcgcctaggcaaaactactggatcaccgaagggaaaggaagcggctaccggtgggagcggcagtcgtgacatccaagatgaaatgtttcaattgtaatgaatatggtcattatgccaagcaatgtcgcaagccacgacgccaacgccgaggggaagcaaatttggctcagggggagggggagccaactctgctcatggctcatgttatggggttgtctctcactggcgaggcgacatttggccaaacacctggcgtctacgaggtgcatatgacaaagaagaaagtggtcttggatcacgacgatgtaggtgaggaggacactgcagaatggttcctagacacaggagccaccaatcacatgattggggcgtgctccgcgttcgccgacctcgatgccggcgtcgtggggacagtcaagttcggagatggctctgtggtagaaatccagggacgtggcgccgtggtgttcaagtgtaagaacggcgaccaccgctcgttggaggcggtgtattacatcccaaactgcgcaagaatattatcagtgtcgggcgccttgatgcacgcggttacgatgcacatgtctggggtggcgttttcacgctgcgtaacccggcggactcctgcttgcaaaggtaaaactgtctcccagctatctttatatattgagattggacatggcaaggcccgtttgtttggcggcgagtaggagcaaggaggcaaggctatggcatgggcgtttcgggcacttgaaccaccaggcgcaaggtgacatggtccgcgggctccctccacttggtcactatgatcagttgtgtgatgggtgcctcgcaggcaagcaacggtgctcgtcgttcctggaggaagctaagtagagagcgcaaatggcgcttgatcttgtgcatggtgacttgtgcgggccaatcacgccggcaacgccgggcggcaagaagtactttctgttgttggcagatgatatgagtcgtttcatgtggatacgtcttattaccggcaagaacgaagcagcagcagctattaagcaatttaagtacgacgtcgaggtggagactggccgaaaattggaggtcctccgaactgatcggctcgtcgttctgacggctccccggcctcctcgccccacttgtcccgtgcactcgagcacctcctcctcctcggcctccttgagccgccgcgtcatctcagcctctactccctgtgcacctcgtcctccaatagctcctcggcctcctcgccacgtacccccatagcagagccgcgaatctggccacatggccatggccacggcgaccgcagcatgcgcgtgtggcacgttcatcggaggaggaggttggtggccatcgacacgcacgggggctgaagaagaaaagaaaataaaagagagaaggaaaagagaagggagaagaacagtgtccaagggcattttaatactttcaacgccctttctctctctgttttcaccggaaataataaaataatgcctcttgtgtccagcagctaattaccatatttttacagtgtctccaagaaaatacacgttcgtttggtgtcttgcagtaaatgccacaaactttgagtatcctgtaataaattttgcccaattacatcaatcggctggtcgattttcactactacacatgtgcttttcctggacgccggcccctttaggttccaggcgggccgtaagtggctccgcctggaaccaggcgatcccggcgtcgggcagtggaccacatgggataatcaattatctcgtgtggcccgtgtaagccgaccgcctgcgatggtgggggagctatataagccccagcccgactgttgctatggcatgccggcgatttctctctcctaaacctccacaaattaggggggaaggttttcgacctcaaatttttgattgggttccatataaaaggtgtagagcttgctctcctccttcatttgcttccatttttgtcagttttcttatttttgtcagtacaatacgaagaaacttgcacatttataaatggaatagtgtaggcacttttttgtttttttcttatttttttagcaaatacataatgattccattacatgtttataaaagtatttagtacctaaattgaaaagttgggtttgtctctattaaatttattttcattcagatgaaagtacgatttttttcattttttttagaaatggataatattttattaatgcttaaaattgttgtgcggccgtttaaatagtccgtaaaactttaatttgttatgtgattagttccctccaatttaaatacattcgtgtttgaatcgggcatggatgtattaatgacaagctttattctaggtcatggatcggacatggatgtacaacacgaaaagagctcatccaacgttcttgaaggaagcaaccaaatttgttgaggtcgcaaagacacatgctgtgagggagaatttgagaagcattttttgcccatgcaaagtgtgtaagaacgaaattttgttgcaagatccgaatgaagtattgtcgcacatcgtagagcgaggatttaagaagggctacgagatatggacttttcatggggaagtcggcggtcgtaacgaagtgacggatgatttctgctttgatgatgcagaaaattttataatcgaagacatgtcacagggaaacatcccagaatgcggtggctttggtatagagaatgaaggtattgattttgatccggaagatatgttgcggcacgttgaaccagaggtcctaactggtagaacacgagggttggacaattcggaagcgttggaaaaagcagcgtaggagcttttgtacgacgaagcgaaaggatgcgacaaggactattcggtgctgcgctcgatgcttgaacttctcagattgaaggccagacatggatggtcggacactagcttcaatgatttgatggaccttttgagagttatgcttcctaagccgaacctgctaccgacgaacacatatcaagtgaagaaatcgatatgtccattgtctctaggtcttcagaagatccatgcatgtgaaaatcattgcatactgtaccgcaaggaattcacggatttagactcttgcccaacatgtgggacgagtcggtacaagacgggcaatggagcctccgatggagaggtggtcgacaaagatgatgcaccggtggatgagaataaaaagattcctaggatggtgatgtggttcctgccagtgaaagatcgcctgaagcagctatattccaaccgtgacgacgccgagttgatgagatggcaccaggagggtaggaaaaatgacggtaagatccgacaccccgccaatgctcgacagtggaaaaactttaatgcactacacccggaatttgcaaaggacccgagaaatgtaaggtttgcattgagcacggacggaatgaacccgttcggtgacttaagcagcacacacaacacctggctagtgctgctaaccatgtacaacttgcctacatggatttgctagaagcgaaagtatattcttttgtctatccttatacaaggtccaagacagcctgggattaatatagatgtgtttctggaatcattgatggaagacatgcaagaattgtgggaggaaggattacgaatgtgggacgagtaccgtagggaacattttactctgcatgccatcatattcgttacgatcaacgacttaccggtaaacttttcgctctcgggccagtttaaggggaagttcggatgtctcatatgtatcgacaagatgtcgtacaagtacctcaccttgtcaaccaagggtgtgtacatgcgttgtcgtcggttcttacctcagaggcataggtggcatgcgaaggctagattattcgacaatacagtagagaacgatctagttccggaaacacgaactggtggctctgttttcgagctgagaaagaacattaagattgtgtttggcaagccaaagaagaagcccgtcaagaggaagaaatggatggatcaggaaaatactgatgcagctgcagaagaaagtaatctgccttttaagaagcactcaatatttttcaggtatctggattactggaaagacctgaaggttcgtcatgccatcgacgtaatgaaccttgagaagaatatgtttgatagcaccattggcactttactggatatcccgagtaagacgaaagatgggttgaagtcccggaccgacctcatcaatttggacctaaggcatgagcttcaaccaaaagagctgccaaatgtgaagatcgatattcctccggcttgctactcactgataccggaagagaaaaaaaattatgtagatgcttgcatagtgtgaaagtcccgactggtttctcagcgaacgtcagaaaacttgtatctttgaaagatttgaccatctctgggtacaatgctcatgattgtcacaagatgctaacaatcttcctaccgattgctataagagcagtcaagccagttcacactcggttagtgataaccaagtgctactttttcaatcgagtatcacagaaggtttttgatcctgaagagttaggaccccttcaaaaatttgcaatcgagacaacg

SEQ ID NO: 22949 - DNA, 3238 bp, Oryza sativa
ctccaaattctcttgaaaggagtaggtgtctgctgaatacaaagagcattgtaaaaagttttgacagaaaaggtcccttacttagtcaggttccagcggagcctatctttgcaacctggctgaaagtgtcatcagcaaatttttgtttaatgaggttccaatctgtcaacttttcatcaaccaaggtccttctaaacttgaccacactccaacctttttcttttatcttagctaaggagataagttttgtcaaggtaatattataaagagcagagaactgagaggatagtggccagccacccatccagctatcctcctaaaacattacagatctcccgtctcccactttgtttgaacacagactataaaatttgtcctttagttcaagaagcccctaccaaaagtaagaatctccagattttgctttcaggacagatatgggtttcttcttcaagtatttgtttctcagaaaatcttgccaccatccctcttcattttcaagttgccagatccatttccctagcagagctttgttcataagatcaaggtctaacactcccaacccccctggtccataggagtgcagataactggccattgaacaaagtggtacttcctaatgccagagaagccttcttcttaaaaaaaatccattctctctcttcaccctgaggaattctataaaaggacaacatgtagagagggatattacttaagctggagttaatcaaaatcagcctcccaccaattgattgaaatctcccttgccagcaacccaacttgtgttccattttgtttttagctgttttccgatcctttttcaggatccttcttttatctataggtacccccaaatatctcataggcaaatcacctatgttacaagtaaagagttggctatagttttttttttgtctttcttctgtcaatcctatacaaaaaatttcactcttgttgaagttaattttgagacctgataattgctcaaaaagacacataatatatttcatttgtggcatattctaaactatcaggaaataagagaatagtgtcatcagcatattgcaaaacggcagctttgttttcatcattgacacctgatccttctagcaaggaattattttctgccctatgaatcaacaaagtaagggctttagctgctaaattaaaaagcagaggagatggagggtctccctgtctgagacctttgtaagtttgaaagtaagggccaacttcatcatttactttgactactactttccctgctctaatgactttcatcatctaggcgcaccattgaggtgggaaattctttgcaactagcattctatgaataaaatcccaatctactttatcataagctttttcgaaatcaatcttaaaaagaatgccactttgtttcttttagtgaatagaattcagaatttcatgtagaattaccaccccctccaatgtaaacttattcttaagaaaggcagtttggtttctggagataatataagctattacacattcaatcctattcatcaaaacttttgtcaagattttgaagctcacattcagagacaaataggtctaaacttttgaatttgcacagcatccttagttttaggaaccaaagtgataatgccaaagttgagcctctctacatccaaaattcctttatgaaagtcattcaataaatctaagagatcaagttttatcaagtcccagaatttggcataaaactccccaggggctttattgtgtttaaggtcaaataccacagtcttaatttcttccaaactaaaaggctgaatgagccttgctttgtcttcctcagagactgtagaagctccacccatgtcaaaattcatggtgttttctttagaatggccaaaaagttccttataaaatagtgttatataatttactaattccctttgtcccactatcttaccctcctcctgagagagggagtgtatctggtttttcctcctcccatttgcttttgcatggtaatattttgtgttacaatcccgctctaatatttctttaactttgcttctttggtaccatttcagcttttcttccataatcataaaactcagctgttgctctaacacccttctctcctttctatcactattagtcatgccagctgattcaattttgatgtcaatagcatcaatttttttgaaaatctcttcttttcctttcttatacagcccttcccagtttttgttccagccattcaactttcttctcagggctaagtttcttttgccatctctcaatactactaccagagatctggctattccacacttctgtcactactttagtgaggtgtaacagttactaggtaattgttgctacctagtaactctattttgaaagcttgaaagaaatgtttttttaagttctctctttcttttccacggtgttggaaatcacttgcttgaaaatgggttgtccgttagatttattaaatgtgtgttttgttcatggtcgtcgatggatgggatatgtccatccataatttattcgatatatcaatcaaattttttgtttgattttaatggatgggagcatccaatttatagttcggttgaaacaataaaacatagatgggataagcccatggtttgcttttatatatacatacaataaaatataatcacccggcatcttgtttaataattaatataacagtgtaagactcacaaattgggtaagtggtttaggagaaaaaaaatcatttgcaacatgcaaacatgaaatcgtacccaccacagctaatctgaacatgccacgtccaagtcctccattggaggattgatcatattaagactctctttgtttagacttataagtaaacaaatgtctacctaagtaaacaaatagctttcccgattagaccttttaaagacattcttattcttaaggaaaacaaaactatagaatttttttatatatgtgaagtggaggtatgactttgtattaaacttaaagccttgaaacaacttgcttataatacatttgaacaaaaggtttgcttaaaaaataagtttaagaacaaacaagttctatgtgtttttgcacaaattttgacaatttgacgctttgcggaaactaattttacaaatgaaccgcggccaaaacttattttagaaatgacccttttgttcagcgccaaatcgtatggcgctgaacttaaacacctcatcgccacgtcaacagacgctgaatgccgtgc

SEQ ID NO: 22950 - DNA, 16237 bp, Oryza sativa
tgtgggctgtgttcttgactcttgcatgagtccatgggcttaggaggtgtcgaggatttgagcatgagaaacagttgatgtggaaggatcaaacatcacgaactaagccaaccagaagaggggtgaatggttgtagtatccaaaaaccaaaatttttagcgaaaataaaagttacccttgaatcgacggattatggtttgaccgaagtagatcggccggtctgaccgcgcctatgtcaccggtctgaccggtatagattgaccggtccaaccgtcccgaagtcgcctctgcttcctgtcaccgtcgccagtctgaccgccgtgtacccgccggtctgactgctggtgtctcgccggttagaccgctgaacccgagcaaacacaaatcaaagaactcttgatgtagatgacaactttattacttatctctgtgtttagaaagtgcaacaacaacactcctaaagaaaatctctactaaactcgaaaccctagctattcttacaactcaatgctctctaaaatgataccgggaggcctcaccctccctctctatttatacatgaggtaggcagtctaaagccacgaaccaaacttatacaagaagtcctaatccacctagtataccttcctgtacatgaaaccaactttacaaactccaatcataccaaatttggactccttcaaaattcgaatccgcatcccatacacacacaatatctccatcgtatgccatatggaatcttcaccaaccacgtgcgttaatctttagcctaagtatctcgcatgatatctgaccgtctggacatcgccttatctacaagttgactcccgatccatcaccggcaatactcacccgaggcatcaagacacctacacttgaatcaaacaaaaaaaccatattccgagaccaagctatctccaacttgactcattgttagcaaacaatataaaatcaaaggtgtttttgattattattctgtgatgaacaattgggcattggagattattggttttgttatttggaatttattcacaaagtggttttggagatgattggatttacacgtgaatcgcaggatcgttatttcatgtgactggtcagaccgggcattgtgtaccggtcagaccggcggtgatcgagtggtcggaccgaccagcccgcggtttgaccggccgacactgtgtcggtttcggttttgggttgtttgtttcgatatccgagtttatttcatgattatggcttctaaatggatactatacgtatgtaatactattgtttgctgctaatgagtcaagttggagatagcttggtttcggaatatggtttctttgtttgttccatgtgtaggtgactcgatgtctcgggagagtatttgcggtgatggaccgggagtcggcttggggataagacgacgtccgtggtggtcagagatcatgcgggatacttaggctagagttgatgcacgtggttgatggagatttcatatggcatacgatggaggtattgtgtgcgtatgacatgcggagtcgaatttggaaggagtccaaatttggtacgattggttatataaagtttctttcttgtattagagggtttcctaaggtgtttaggactcgtagtatgagtttggttcgtggctttaggctggctacctcatgtataaatagagggggagcgtgaggcttcccggtatcgctttagagagcaattgagttgagttttgagttagggtttcgagtttagtcgaaatttttctaaggagtgctgttggtgcactttgtaaacatagagagaatcaataaagtcgtcatctactttaagagcgggtttcggcggtctaaccggtgatctaccggtggtcagactggcggcaagcggcggtcagaccggcgggagcacggcggtcagaccagcggcggcagcgacaggcgcggcaggctacttcggcggtcagaccggagattcaataccggtcagaccggcggcatctacccggttagaccaacaggacaacttcggtcagaccgcgatccgttgaattcgagggtaacttttatttccgctaaaagttttcggtttttgggtacaccaaccattcaccccccctctggttggcttagttcttgtgattcgatcctacaagtggatcagagcctgacgacggctgtggcctccggctatggccgtggcggcggcagcaaccgggtcgacagcggcagcggcagtggttatctggggtgttacaccatgtctgccataacatgaggagcttcgtagacaaggtgacattgctcgaccctgaggtgtctaattcaattgtttatacacacataggatgacaaatttacaagtatgtagactaacttggcgctgaacatgcatgaatttatttcaaggattccggaaatcaacttcgaaatcattagagaggagatagcacaattcatactagatgatatcttgtcaccaaaagggatgtttagagtgaagtcctaggtagctcatctcagaatggcagaacatttgcaatgcatacgcgataaacatttgatttttgtaaatattctttgtaatacaattaaattctttagagtaaagtcctaggtaacttgtctctttatatacttgcatttctaattacatataaaattgttccaatttataacttagttttgcaggttttgatgcatgtcggtggtttggagagaaaaatggatgtgaatgacatatacttcctccttttcacagtgtaagactttctagcattaccacattcatttagatgttaatgaatctagacatatgtatgtgtctagcttcattaacatctttatgtatgtggccaatgctaaaaagccttagattgtgaaacggagggagtatatgtgatgtgaatgcatgtgttgtgatggaatacaaatgtgaatgagttgtgaattggctgtgaatgcatgttttgtgatggaatgtaaatgctgtgatgctgggaatataaatgttgtgaattggctgtgaatattgtgatgctggaaatggggttgctgggaatgggactatatatatgtgcttctatcaatttttgcagcgggcatggctagcaaagtcctaaggctagccaaattataaaattttattttttttttccaaactcatccctgacgggcatattaataatgcccgaaagagatatgtcatccgtgacgggcttttagaataagcccgatagagctaagtcatccgtgatgggcttttagagtaagcccaatagagataagtcatctgaaccgggactcgtttgacttaacacgtgaggtcaaaccaattggtgtcgggctctatctaaatgcccgattgagatgactagttacccgtgacgggcttagtggtgtgcccgattgagattagtcatccgtgacgggctcctaactatgctggtttgactggtcatactcatctgtgacgggctttgttttcggcctgattgagataacatccatccgtgacgggcttttgcccgattgagatttttcctcacatcagtgacctttgtccagtgacgggggccttacccgatagtgatgaggcttttagcacgtcacagataagcgatcccgttctagtgggaggtggttcttcctccggggcgaggctaggaataagtctattttgcctccgtcaactcatgctctagttgaatcgcattccacaacccctaaaccgggtataacccgtccgctaactttcaaaaccattgcaaatcgactttccggacggtttcggataagaataagttcaccagccgtccctcaactttacagtgactggaaggtgcatgtagccatcccttccatggtcagaaaagaagcacggaaaacatcgttgccagggccatcttctgcttcaacgatcgatatgtaagcacatcactgacagttcgtaatcaaacttgagcagtgattgaaacaatttcagccaaagaaaaaggaaaaaagagttcgagcagaaaacggactctgtttatgacattctgcaatcttggatgcgtatgttcttgcattggtcgtcgggtgtagatctacagcggatgccaggggacagcacaggctggggtgggagggcgtgctgcgtgtgccgtcagaggcggaaggatctggcttcccgcccctcggaagcggcgacggctgagggggcgagcggcgcagcacgcggatccagtacaccgctagcagcaaccacccgtatggcatcccgccgccatcgccacaccagccccttctcccctcccccatctcccgccgactggccaccctctttagctagccgcgtcgggttgggacaaaaagagaagaaagaggaggatacctgtcatgtgggcccacacatacgttttgttattgttttgctgactaggatgccacgttagcgagaccatatatatatacagttatgagaccaaaattgcatggttttatataatttaggggtgaagattttcgatattggggattagggatgttatacaaacttgacgtaaagtcgagggatgacatgtaaacttatttctctcagaggcgattccgtcctacgtgggaccaaacagcccaacaagggaagtagcggcccacgagggcacgacgggcccaaatagccccaaactcctcagacgggcgggctcacaatgattcatgggtattcaaatgaaaacccaagattttttttaaaaaaatacatatatgaagtatatattccatatgtatatgacatgtgaacttatttctctcgagaaaaagtacatcgaaggtccatcatgttgtcatcgggttacaaaatcatcctccaaccacaaaccaggtatatcgcatccctaatcttacaacaccgggttactttaggtccctaggcggttttgactctggttttgatcaatgtggcagctgagtcagcatgggaccccacgtgggtcctacacgtcagcctcttcttcccctcccctctccacctctcttcctctctcctcatctctccacggccgacggctgacggagacgagctgtgcgcggcatgccgatgcggcgggagcgggcgcgggcgaaggccggcgggtgcaggcgaaggccggcaggcgcgagcggcggcggcggcgtcaccgagctcggccaagcatcagcgcgcaaagagagagcagtggcaacaatcccgcgtctgtatcagccttagtcccgacggcggggagcagctaaactatgggatggtcgacgtcacacccgcagcctctttccaccagacgcaccatcatcaccccaacctcaccggcgacgacaacgacaaactccctccaccattccccttacttccgccatcgccctccttcgcctctccccacctcgccggcgacgacgacaaccgtaacgacgcgagcgcaaggtatgtgagcacctcctttctcttcgccccaagcattgccaccatcgccaccacaaccgccggcagcagcctcagctcctcttcgtcggtgtcgctgttccctacatgctctgcgccaaccagctcctctccgtggagagctccacccgccaccgtcaccacggtgctcaaggtcctccccgagcgttgacttgtgcttccgccgctcagccgcatgctcctgcactccttcccgacgcgctccgctgctccttagccacccgcaacttccacgaactctttcacgcactgctcctgttcctcaacctttcttgtcagctccgccacggcctcgccatgcgccgcgtgccgttcccacgccgtggtgaagacggcgtgcatctgctgtcgcaaaccccttcctctcccgcagcgtgggctttatctgcggcgaccaccggcaccgccgcctcccgtcggtcactctcgtgcactggaaagagatgggggaagagaagggaaagaggaagaggagctgaggctgttgtcgatggctgtggtggagatggcgacgaaagagcgtcaggtgtcgccgtcactgttgccttcgctgggcaccccccgcctcgaaggtctcgcgcacggacagaaaggggaggaggagaaggaggaagtgcccaggtcgtggtcggtgacatcgccgccgccggccaccacccgtctttgccagcgagcgccgccgccaatggccgccacttgtctttgccagtgagcgtcgccgtcgcgccgcacccttgttgtcaatcaccaagaagaggactgcaggtcagaggaagagaggtagagagagtagtgcaaatagtcactgacaggtgggcccacatggggaccacgctaactcagatgccacatcatctaaaaccgaagacaataccgtcgaggaatctagtttgcactttgcactgttttgtaagttggaggatgtgtcatgtcgggttttgtggttcaagggcgattttttaattcaatgacaagatgagggaccttcggtgtactcatccaaaagaagcccaaacctatccctcccaccatcttcctctccccactttttaaggcccattggcccaatagcaaaaaaaaaaatggcccaaactctatcaaaccctatctcctcacctcccgttcccgatcccgccgcccgccgcccgcccgcgcccggccgcccgtcgcccccgcgccgtcgcgccgtggccgtctcgccgtcgccccgccgctccggtcagcccctccacgcagttacacgcgcgccgcccgcccggctcggcagccgccagcggcacgcgccccgcgcggccagggccagccgaccacgccacggcaccagcgcggcagcgcgccccggcgccccgatccctccagtagcaggcaagcttccgggctccagtccaccggccacacgccagcgacgccgcccggtcgtccgagtctcgaaggtaactcttccctagttcccttcatcccctgtcctgcgcccttgctgcccgtagatgtcatgtctgatgttgctcctgctaggtatgaggccatgctctgcttcatttttaccatgcccttgtgcagttcctgctccttaggtgcctcctaattcttggaatcacgcagataaatgacaaatttgcagtctagaaacctttagctgtatgtgctgaacttaaataggttgtagccgctgcttttggtgtgaaatctagttgagggagagggtcaagactgaacattttgtagtttttgcttgggttcaggacttcagatactaattgaaattaggaagcactccatgctcggagaccagggagttactaggcctttcagacttcagggaggaggagttgttttggaggagttgttttttattagaagatcctgtcagttgttaatgtatcttaaaaactgtacttatctttgttgatagaaaacgttggtctgaattttcatctgagcacctcaaaagtagtttcatggttgaatatagtatattgttgttttgtaggtttgaaacgtgaagagaaaaaacatgaatatagtatattgttgttttgcaggtttgaaattatgtttataccgttatatattatacaactattagtgggttggaaattttttttttatctcttctaatttcgaatacccaagttgaaaatcctgggcccgcctgtccccatggctggaggtgagccggttcccccaaattcgacaacctgttgcctcacgcgctgccgcccgcctccgtcccccgtcgccaacctgccgctgtaatcccagccgacgggccacctctaagtgaactgctcatctcgctcccatttaagcctgcagctagtgggttagctgtttgtcgttgtgcgtgtgttaatctactacgctgcgagaattgtatggtgttttcatttagtggtgcagattgtagcttgtagaatcgatcctccttgtgaataactttggtatttcaatgttgtgcgtgtagaaattcgtaggttgtgtagaggaagggaaccgttgcttcactattgattgcagtttttttttcccaaattccgaatttaattgttgattttagcctgtttttatacgagatgctattgctatatctatatctttttttttttagcaaattttgtaggtgtatattggatttatggtgtgataaaaatttggatttgtgggttgtgacaggcacaatcaacaaaaaaattacttgaaggagttctactgtacagtgagcattcgtcgacgatatggttcatttcaagaacaggtacatggtgatggaggtgttcatcgatacaccagtcaagggccagcccgaccctctcattctcacgcagatcaatatcaccaaagctatcaaagacagcatccagctcaactttggggagtgtggcctagcagcttgtcttgggtcgttgcaaggttggtgtttgttaggagtacatcgacaaccctcttacagttttcagacagcgtcatgaatgcttgcattttgagtcgttatttataggtgtttatgagctctgttcatctgcagtgaagtatgtaaatccgataacgaagctttgcgtgatccgagtttcccgtgaagatcaccagaaagtgtgggctgctatcaccatggtgaggaacattgggaaaatcccagtttcattcaacctgcgggatatgagtggtaagtggataacttcctatatatacatggtggaagaaagcaaattttagttttaggtttacatctggagtaagtttatttcactgtctggtgcccaagtttgggaaatcaattccctgcaataaaactgtctgtctaaccatgttgctttatttactcagcccacagccttgaattcatgcaacttaaatacattgttatcctgattccttgctttgatgcgaccaacttaacgaggactttgaattgctcgctgtacactattagtctattatgacaacaaattctttcacatttacattttttaaagctgcatactaattgaaacctcttggattatagtgttttcgctccataaacgatttcttcctagtgcgtgtgttgaattagtgacttagtgggcttaaatatttcaatgaaaactttagctgaacatctcactacaaatttggattagtagtggttggggaatggattgtgaaactaaagcagttttatcattatgcacgataattgatttctggcaacatgtatcttttcttcttcttctttttttgtacagacatgaatttatttctgattttctgtattcagggcaatcctgattttcagtgtaaggtgaagttcagatgctatcagcgctgctaaatgcattctctttaaattccgatgacatgaatactacagtttgttaaaacatcttcaaacaatatattgtatggtgttttcatgcattttaactctagcatgatggagtctcaacttttccatttgactcctcatgtattttgacatgctgactcgttctgcgtgtttatatattgcattccctaagtgaaatgtttgcaaggccatcgtacaacccggagcagagctaattcatcaatatccttttaacttcattcaggaagtatcagggcctgcaagaaggctgcgttggagtgtgaagaagctaagttcgagtattacaaactggctgctggtgatcgtatcacgcccaagtttgtggagaccatggagagctgctttgccaagattaaaggattagagagctaatgcatcctcgtgtatcatacatttgtttcctgacactttagtggattattaatctgtagggaatcaagtaaacaaaaattttgtttgtctgatcaactaatcactgagcctattttttcgaatgtgcaagaatgacgcatatcgattaagagaaattttgtttgtcttgaattctgtatgtatattttacttgagaagcaaaaccacaagctgacggagtcccaattttcttgattacacaaaacagaaatattaactccgggatgcaatacaacatgaaccatcagattcacgacaaggcagaattgcatcttcagatcaagcaagagaagcaaaaacctgtcatgggcacagttgtcacccacgcagggtcgcatcttcagatcacacacggttgcatcttcagatcagattttagtcacagttcaggatgcaattattatcgcgaagaaaatggcacggtttgaaaattaagggtaaactgaaacatacattggcagttgccaccctcaaaaccagtccctgtgttctttacaccttctgttacatctgaattcaaacatacggaaacacaattcctgcagttccctagaatggttcagcggctgctgaaaagatatatattcattttcccaaaaatataacggcaatttttaccaacacatcaccagatggaagcttcacaataagcgacggttccggctttccaggagttgacaagctccaggacatgctagtcattctgcctctgcttacacaaaccgaatctagtctctgctaacacaagctaaatacaggcaaccttgaaattacgtactgctgttgattaaactgacaaatgacaaccaacttcagagctattaatgaattgttcactattgttatgttgtcaatgaacaaaaatggtttgcatgactgcatttcaacttaataattgcatccacaaatgtctgaaatttgatttctggcatagtgactaatgaccacagtatagcatgttttatgaactaatgaaacatcttccagtggataaaaggtatgctgatttggggtaagatattcaatcatcatcacataatacactgctatcaatgtgaatacaatacaactaccaacccacaatataaaaataaagaacaagaggatatttgatgcgatggaatggtgacaataacaacaggagcaatactaaatacatctcaagagaattacacacgaccagcaataaagtcagctatacgttacaaggtttctctcttgcaaatgccacaaaagaaaagctagcacagcatccacagtcgcaacacaaaaacaaacaaaagtatcatttcacctattgttttggcagttggcagtacagaagaagcaattcttcccttgaaattacaacttcgcgcattgctacggagctccacgataagttgactgcaaccaagcacaccaagatcagtaatgaaataaacaagcataccaaattgaccaatgaaaatatgtttcgtatatatgtagctgtgtgtaattgtaggtttgatgaatttaatcaaagaggcttccaatttctacagtggtgaacaccaaatcagtgttcctagcttctcatcactgttagttccaaacaaacaaaatgcatggcagctcaaatctttagaaaatggtgcttgctaacataatggagttgccaactgatttcattcattagaaagtggaaagctaccacagaagcataatttcgcctaaatcaacctcaccaaattaatcagtagcaataatcagtgaagatagacaccaggtctcaccaattcgtacctatccaatccgaaatatttaatggccatggccgtccgaggacgaggagcagcatccaccgccgccgccgcttgtcccctcgccggcgtccccgggcgggctccggcggccgccgtcggggtcgtcgtcgctgcaatcctcgtcgaaggggacgtccttgtggaagatgcagcacttcttggagctcttgcggccgagggactcgttgtccaccgtcccctccttccacgtcaccttcttcttcgcccgccgcttcagccgcagcaccaccgtctccgccgccggcgggggcgccgacgaggccggcgcggaggaggacggggtggggtccaccgtcacggtcgcggacccggtcgccggcgcgcgcgttgccatcggcggcgaatcttggtcgtctccgactcccgtttcttctcacctgttttttttttcctttttttcgatttttagtttcttttttagtcagcgctagtgttacgacgaattttatttcccataagccaaaacaggaaataaaaattaaataaataatcctttcaagtcatatctacgacgctagaatttttctatcatttggatggtgtaaaccattactacagcctctaacaccaatagagtccgatcttcgttgacctccatctaataagtgcaagccagacaaaggctaggtagtaaaggattgcacgctaataaaaatagagaagattttagtgttgtaaatatggacatatggcctatataggactattttctttaatttatttcatgttttggcttatggaaaaaaaatttaggcgttaagaagtggaaatgccaatttaaacttaaattgaactatatccatgagagttttattttttaaaaacagtgtctgggagttgacatgggaactcctcggtttttttttacggtactagtgggacttgacaagaagaatggatttgtattaccaattagttagttcagaattttttatttacattttatataggaaaagttcaaggttgcatagtattcttttcacttaataaacgatcgtacttacgagttacccgttgttaattttgttgctagcacacacctaaacctatattcaacatcaaattttttcgattttcattatttagaattatttaaacaataaaatatatttagactatatcttagcgtagaaaataatctaatcctcgtaaactaaactttgacaagagttcagtcaattttattgacctgagattatttattggttataggagttaccttgcactttatttggagtattttggaatttttttatctcccgccactgctgggaaaccctctttaatcccggtttgcaacccctatattcccgggttgtaaaccgggagtaagaatcaggtattaaagatcgctatctttaatccggttaaaatactcgggagtaaagatgcattattagtcccggttggtaacacaaatcgaaagtaatgtttttttctttttttcctccttcgttttttttctcctttttcattcatagcacatcacaaatttattcacagaaaaattcacaaatcaacatcaacaaatcatctaaaaaaatcaagaaaaactgaaacaaatcaaaatcccatcgtgccacctggccaccagccaccgaccggcctcccttcccgccgccggccggccacccttcccatcgcctcccctccgaccggatatggcggagggggcggtgtcagacccctctactatcgagactaaaaatctatttttagttccatcttaacacaacaaacgggggaaaaagcctgagccacgcgcgtccagctctctctcccatccttgctccatcctaatcacgcgtccggccggccggcctccatctcgccgccccgcgctgggttgctatcggccggccttccatcacgccgcctgtcggagggaggggaggaggggaggagaggggagggggccggaagaggggggaggaggatgggtgagagaagaaggaaacggaggatgagagaatgggaggagagaaggagattaggatggagcaaggatgggagagagagctggacgcgcgtggctcaggctttttcccccgtttgttgtgttaagatggaactaaaaatagatttttagtctcgatagtagagggatctgacaccgcctaccatatattgaaccgggcctaataatgatttttagtaccagccagtcaggcagcactatcaggttgtgattgccacctctcctatcatgctatctagcctgagaattagttagcaatagcatatactcgctccttcaaataattatatctaagtacatcttatatgtcatactggtttttttattttgttagtatgtgttacatcccgaaatagatttgtttattttgttatgaaagcagtttgaatttttttttgaaaaaaagacaatcactatcgtgactcctacttacggtgatatggagttaccaatcacttcgatctagtcaaaagctaaatcaagatgagttttgtaagactaaaccagctagcaaaatcgatttagatggaacaaaggataaacacccatttcataggcaaatggtaggtttacgagacaaacctgcaaaagggataatcatactctcatagctaagatggacggctttcagtataaaccggtgaagttggacaaaactaggctaaaactagttaaaaagtaaatgcgatattgaaaagcgattgtgttgaaagtagattgtgtgtccaattaaaccggtcttgtctcttataaaaggattagtcttgcctcctacataaccttttccacatcaaattatggtagagataaattagaatttgaaaaatatctccccatgcaagaaaactcgaaacccggcgaaattcgcttcaaacttggaaaatacctccccatgtctctgccgccaatgaaaatctcttttcaccaccaacgaaaacagtttttctagtagcgcttgtttgtttctcactgtgctctgcaaatatgggctggacatataggacgtttaacaagaacatatgggctggacattctagcatctatcacggtacagtacgttgatcctcagaggaacaattgcttttctaccgcaatgagattgcgtagacgaagctcgacaatctcatccaaagtaacccaatgttgtgaccgctcactagtggaaaaaccatctttgatccgtcggccgaaatccacgatagtcccggatccatttaaaaccaggactaaagatgatctttagtcctggttggtggctacaacgggcatatttgatctagtctcggttgtagagatgtcagacgttgtcagggccccgggatctttagtcccggttggtaaacaccaaccgggactaacgatcctaactttagtcccggttggtgttaccaatcggggctaaagatccaccgggaccaaagatccccctttatatatgccttcttcctctttcagcccaagagcaagcttcaaaatttctctaaaaaagaggggaggtcatgccaaaatttcttgtgaaatttttttagtgattatatacaaatcggagatgtctaaaaggttagtaatttcatcctccaattttttttttgttgttatattacttttggagctatgtttcacacatttttttttgtctccaaaactttgttgtaagttgatgagagagaaaatttgtgtggggaagaagaatatatagaaaatttattctcatagtttaaaatttgatgaaaattaatcttaaaaaatataaaacaaactaaattgaaaattaagagaagtacaacattaatattagtttagaacttcaaaaattattaataagaattgcttgtcgaaagagtttttaattattttatcattactgtttgactgtcattattgtacgaaaatttatttatgtacgattttttttatttcatgtagatggatcgacaatggatgtacgctgaccggtgatccaaaaagtttatcgagggcgtgcattatttttttgagagtggccgaagctaacaagcgtaacggttttatttgttgtctatgcaataagtgtaagaaccagaagtagtattctgcatccaggactattcatttccatctgtttgagtcggggttcatgccaagctataattattggacatcccacggtgagcaaggggttgaaatggaagaagatgaagcggaggacgagaacattcccgactgggctcagtacgctggatttgaaggaaatcaaacgggcgaggtggacagggatgttggcgataacaacgcttcggatgatcttggtcagatgttgcagaacgcaaaggaggattgtgaaagtgaaaaggaggcccgtaaattggagcagatgttagaggaccacagaacgtcgttgtacccaggttgcgagcagatgcacaaaaagttggataccactctggagttcttgcaacggaaggcaaaatatagtgttagtgacaaggcatttggcgatttattgaaactcgtcaagaacattcttctggagggaaacaaattgtccaagacaacgtacgaggctaagaagatagtctgccctctaggactggaagttcagaagattcatgcatgtccgaatgattgtatcctatatcgtggtgaggagtccgagaacctagaagcatgccctgtttgcaaagcactacgatacaagattagacgagaggatccaggtgaagttgacgggcagccaacaaagaagagaat

SEQ ID NO: 22951 - DNA, 2542 bp, Oryza sativa
cccccttggctatgcatgaagaggaaatacataatgatgccgattattattcaaggccccaagcaatctggtaacaacattgatgtgtacccaagacaactagtcgaagattttaaactattgtggaaaaaggatggtgtcccagtgtgggacgaggacaaacaggaggagtttaacctacgagcgctgctgttcgtaaccatcaacgattggcctgcactaagcaacctttccgggcagtccaacaaggggtacaaggcttacactcgctgtatggaaagttgtgtacatgggtcatcgccgattccttgttgcaaaccacccggtacggaagaaaggcaagcactttgaacataaggtggaccaccatacgaagcctaaacatcacagcgggaaaacaatgtttgctatgattaaagatcttaaagtagtgtttggaaaggggcctggaagccagcctatagagagcgaagatggtcacgcggtgatctggaaaaagaacactatattttgggagttaccctattgggaattcctggacgtccgccacgcaatcgacatgatgcacctcactaagaacctttgcgtaaaccttcttggctacctaggtgtatatggaaagttaaaagatacacttgaagcacgtaatgatttgaagcatatggaacaacgcgacgaccttaacccggaaccaacggagaaaggaagccattacttgagtccagctagctacactcttaacaaggcagagaagaaaagtatgtttgaatgcttggagagcataaagttaccgtctagatactccagaatataaagcgaataataagcacgaaggagaagaagtctcatgactatcacgtgttgatgacacaactgctaccagttgtaataaggggtatccttccagacaatgttcgggaaataataacaaagctatgtgctttcatgaacgcaatttcgcagaaggtcatcgatccggatagattagaagcccttcagaatgatgtggtgcaatgtcttgtcagttttgagttgatatttccaccttcatttttcaatataatgacggatctgctttgtcaccctatcaaagagatcagtattctcgggcctgtgtacctacacaacatgtttccgttcgagaggtacatgggcgttctgaagtagtatgttcgtaaccgtgctcgtctagaggcaagcttcgccaaggggtatggaacagaggaggtcatcgaattctgcgtagaatttattgaagacctttgcccaatcggggtacctgaatcactccataaagggagactacgggacaggggactctcggaaggaaagcaataatgacggtagacaacaatttattccgtaaagcccatttcacggttttgcaacaatcttcattggtggctccttacatcgaggagtacttggctctaggtctcgccagaaacatcggtaagttcgatgcatagattacacagcatcacattgatactttccccgcgtggctacgacaacatgtaatgggtaacgagacgattaaccaacaactggccttcctggcgaggggaccatctggctcgatcgcgacattttagggatatgagatcaatgggtacacattctacacgagagcccaagacatgaaaagcacgaaccaaaacagcgatgttcgtatcaatgccatgagacatgatggaacaactggcacgtattacggtgccatcgaggacatatgggaacttgactatggtcctctcaaggtccctctgttccggtgtcaatgggttaggttgactggtgaaggcataacgattgatgacagtgggatgacaacggtagaccttaacaaggttggatactcggacgttccttttgtccttgccaatgatgtaacacaagtcttttacgtgaaggacatgtctagcaaaggaaagaagggcaaagggcctgacgggccaaagcgccacgtggttctcccaggcaaaagaaaaatcatcggagtagaggacaagactgacgaggattacaatcagttggatgggcatcctcctatcaaatgaagacaccccttactcacgtagcgaacacaaggagggaacaatagtgaggagaaagtacgtgcggtcaaccgtcaccgccgatgtattgccgtaattattgtgtacacgatgtaaactattttggatgtattgattatccatataaatcaatcgttgtatggcttatgttaattatgtatgattattagaattttgaacaattttaaatcgtgcatatgctagtaatatgtgataattagaattttaaaagttttaaatcatgcatttggcatttacatatgttaattagagtttttaacaattttaaatcatgcatatgctaattatatatgattattagaatttttattaattttaaatcatgcatgtggtatgtacatatgttaattagaatttttaacaatttaatatcatgcatatgctaattatatatgattattagaatttttaacaagtttaaaacatatatttgcttattacgt

SEQ ID NO: 22952 - DNA, 1477 bp, Oryza sativa
cccgccgatgccgaccccgacctcgatgcggccgccaccgccgacgacgtcgcgccggcactgccgatgacgccgacgccactgctacgccgccgcgccacgccgctgggccgcgcctcgctgccgccgcgcaacgccgcagctgcgctgccacgccaccgccgcgccacgccgctgctccgctgccgccacgtgaacgaaacgtgaacataacgagaacgaacgtgaacgaacaaacgtacgtggacaaaacgtgaacttaacgagaacgcgaacgtgaacgaaacgtgaacttaacgagaacgcgaacgtgaatgaacgtgaacgaaacgtgaatgaacatgaacgaacgtgaatgaaacgttaacgaacgtgaatgaaacgtgaacggtcgccttatacgacactacgtgaaatacaatatatgttactttgcgtttagactaatacatttttttgtatgttgcagaaaagacgtcgtcatcgtcgtccctcaagccggagtggtagctagccctcgaaggaattcgcgcaggtacgtgatgtaaagatatgattgttagatttctaatataatataagactattagatttaatatacgacacttagacatagcatatatcattatctagggttctaatgtacgacacttagacatagcatatatgattatttgagttctaatatacgacacttagacttagcatatatgattgttagagttttaatataagattattagatttgtaatataggactaataatataagactattagatttaatatacaacacttagacatagcatatatgattatctagggttctaatgtacgacacttagacttagcatatatgattatttgagttctaatatacgacagttagacttagcatatatgattgttagagttttaatataagattattagatttgtaatataggactaataatataagactattagatttaatacacaacacttagacatagcatacataattatctaggactaattatataagactattagatttttaatataaaattattagagttttaatacaagattattagagttttaatataagattattagatttgtaattagacttagcatatatgattatctagggttctaatatacgacacttgaacgaggaagggaacgtggagagggatgcggaggggaaccaggagggaaacgtggagagggatgcggaggggaacgaggaggaggaggctagtgaaagtcaaccctccgctggacagaagagagcccacggacaacgaggtgccgcgaagaagctagagggtcgacacatcataacagaaatggacgaagacggctgtcacgccctgaagttcccctttccagctttaaaattgtaaaataaatcgtccgaagaaattgttctttttaacctagagctaattcctcaaattaataaatccaaataataatcggaatgggca

SEQ ID NO: 22953 - DNA, 664 bp, Oryza sativa
  unsure (1)..(664): unsure at all n locations
gccccattgtactttgcttcaattcactgcaaatggagcttacttcataggcacatgcagcattcttttcagcaaaactgaatgcttgttgatttctannnnnnnnnnnnnnnnnnnnnnnnnnggttcactgaaattgtaggcagtccatattacatggctccagaggttttaaagcgacactatggccctgaagttgatgtctggagtgcaggagtgatactttacatacttctttgcggtgtaccaccattttgggcaggtgtgttctttctcttgactagactgcatgtgttgcggggaagttatagaacaccattcttatcatattattgtggtgccatgcagaaaccgagcagggagtagcgcaggcaattatacgctctgtggtagatttcaaaagagaaccatggcccagggtatctgagccagctaaagatcttgttaagcggatgttggacccaaatcccatgacaaggcttactgcagaacaagtacttggtaagcatcgccaatcacctgtcctaacgcgtagcagcatacataatgctatctcactcctactttagtggaatatatgaaggatatgtctgtactatatattatctatgatgtgattgatgagtaatgaactcacattattataagaagatataaaattagc

SEQ ID NO: 22954 - DNA, 612 bp, Oryza sativa
ttggtactgggtaagtcgagtaagaggaaaagtacaatatgcagacctaggagcggaaaactggaaacctatcagcaacttacatgatatgtcatctagtcactcaaagactttaggctataagaggctgactaaaagcaatccaatctcatgccaaattctattgtataaatctcgctctaaaggccgaaaaaatcagcgctcgacacggactcattgtcaccacccgtcacctaaaatctactcagcgtcggcaaaggagccatgggttctagcaactaacttacctgttgaaattcgaacacccaaacaacttgttaatatctattcgaagcgaatgcagattgaagaaaccttccgagacttgaaaagtcctgcctacggactaggcctacgccatagccgaacgagcagctcagagcgttttgatatcatgctgctaatcgccctgatgcttcaactaacatgttggcttgcgggcgttcatgctcagaaacaaggttgggacaagcactcccaggctaacacagtcagaaatcgaaacgtactctcaacagttcgcttaggcatggaagttttgcggcattctggctacacaataacaagggaaga

SEQ ID NO: 22955 - DNA, 8352 bp, Oryza sativa
  unsure (1)..(8352): unsure at all n locations
ttgggcaacaactcaacaattatataatataaacagataagatgtggaggagctaatgattggctgactgttgcatgaaaggaaatatatgaaattcgtggtaaccatatttatacaagtcattaacaaatatcataatctcttttcaacaaaaaaagcaaaaggaaagagataaagtaaagcacccaaatgcattgatgtaactgaacataagttgtttggcaaatgataaaactgttgactggttttggttgatctgtgtgctattagtcattttggagctctaatcacaaatattagtgccatctaactaataatattattaatataatatttattgcaaaagacgctagggcccaattgttaagtggttattcggcttatgccacttgatgcagttttttttttctaaacttaattataatttggtggtgtactatgaaataaataaacccattcccctaaaagttttgcaagctctagtgttgactttaaacctttattaaatgtgatatttttctcattgctcaatgatcagcttgttagctatttgctgattcctttcgtattttcctccttttgttttgttcaccatgttgcaagttggactctgtatttgagaagaacagtttgactttctccttcagaaaaaaaaaagcttttgactttgttaattattattggcaaatcagaatgctatagaaaacattgtacaacagaaattattactgatcactcatgtatcagtagagatatgtaggcagttggtcaaagagccagtgttcatagaagaatcttccaaaaaaatgaaaacaaaaacagagtcgttgcattctctgtcaagtgtcaaccagttctaggtttgatttggggaaggaaatgcaggaactgcacattgacccttgaccaaagatttcattcctatcgcgatattcagatcttattctctgatcatccacttgacataatttgataaattggtcaaataactctgattcgttcattcgtttttgttaatccatgtagaaaaaaaatgtagcatcaagaaatgccattttgactgtctaactgtagtaggattaagtcaaagttatcatttacctgaccaattttactatttcatataaatatttgttcatgttgaccttctgaatcttatataatattctgaaccgatgattgctgagtcttctggtctccatactatccagagagatcaccactgcattctacgaaagagtttgacaatgttcaagtgaactctaaaatatgtgttaaatcaagcttatccttgtaaaaatgtgcatatgcattcagaatgtgaagttgactttgaacaagaagatgatgggcttgacctttgacatgcaagcactgccctaactaatacccagttcccaatcatgcacgagagtgtctccatgaccaagaaacaagacttgggaatatgatgtcaaagaagcaaccagaactgatgcagatgccaacttgtatccacagacagatacagcatagagccacacattgcacaagaggaatgactggctgactgccactagttttccaggccaaatgttgcatgtatcacctgtcatgttgattggccaggagttttctgaatgaaatagagaaagtaagaaaataaaaattataaatacagacaatttataagtttttatagggaatgcgcaaaaggattgcgcgaattttttttttgacacaaaattgcgcgaattataagttttcatgtaaagaaaaattagtattgcgcgccaccgagttttactcatacccacaacatgtcactcaaagtatgcggtctcgaattaagaacaaggacagtgtagagcatagtcatagactattgaagtgcgcggcaagtgagattctcaatagcaaagctcagtgaagaccttgaaaaagttgatatattatgataaagactgccaaatattcccctttcacaagattccttattttgtttttccccctttttctttgcaaggtctcaacgatttaattatttcagctcatgatttctatgttacaaggagaggctattacatcaatcccccaattaacatccaagtcaatactttttagtttttactcctactgttacacacccaaaatcagaggagaaaccaaaaagaaaaaaaaaactcaaaactcataagttacactctcgcgcgcaattcatcaatctcctcatatcacaaagaaacacagcaaaaacaaaaaggagtcaaccagttaccagtatatgaacaatcttgctttgcattgcaattggcaggtcatcgagatgttgaccgcagaagcagcagccttcatcgtttgatccgactgacgagctctgaatttgatcggcaatggcgattggcagcagcctgaatgtcttgagagtggcatggtgctctgcgtttttgtgtttggtcatgtatgtgtatgtaagtaggttggtgcctgcgcttctcagattgcagcggccgccgccatggcggcggccgcggaggcgaagacggagatgttgcctgaagtggccttgccggcggcgaagaggggaggtttgccggcggcgatgctgctgcgttcttggtcctcgaagaggaatgaccggacggcgtcgatgcacggcgcggcgacgagccgctgccacgcgtcgtcggcggcgtggccgcgcctcctgaacacctccgtggcgtcgacgcggcgggcgcgccacatgcggtccagcctctcgatcttgcggtgctggcggcacgcgagccggaacgtgttcaacttgatctccgcgacggccgcggcgagcatgcgcgcccgctcctcctcgtcggcgccgtcgccgcgggagcggaggtacgcgtcgagctccggcacgccgatggcgcgccagatgcccctggagtagtggtgcggcgcgggtcgaacgctgcggccacctcccggacgaggcctcgccggcacatctcgtcgacgcggcgggcgacgaaaccgcggagcacctcgagatctacgtcgacccagaggaagcagcactcgtaccgctcccggaacgcgcggccgtcgccttcgacgagctcctcgacgtaggagttggaccccccggcgatgatgggcaacctccccctctcaaccgcccccgccgcggcgcgcgccgnctcgcggcggaagtcggcggccgtgaactcgtcgtcggggcgcgccacgctgatcaggtggtgcggcacgccggcgcactcctcctcggtcaccttgttcgtcaccacatccaacccggaatgtatctgcatcttatcggagttgatgacctcgccgccgaaccgcagggcgaggtcgacggcgaggcgtgacttcccggtgcccgtggcgcccatcaccacgacggccttgtgcttgacgccggcgccatgcctcagcacgagcggcgccaccgggacggccgcgtcgaagcgctccctgtccctgatgacggtggtggtgcgcggcagcagcgtcagcgaggccggtggcgccggagcggcggcgaccgccatgtacgcctgcatggtgatgatggtggtgatgctcgctaggtgttcgaccggtgttgatcgctagctcagctcgcgcgcgggcggtggcgcgtgcgcttgggtagctagctgaggtggattttgcgatggatgctgtggaggaagatgaggctggcagtggggtatttatagggggggagagggcgctctggaatgtgaagggcgatcacccacactgtgggttggaggacgcggcgccttgcagtcgttagggggagagggagtttagtgatcatgctgcagtgctctgatatgcatttgatagtgcagtgacaagaggtatgtggtttcaaccctaaaaatcccgcgttcaattcccaatacgctaataatttcttcttaaaataaatgttcggaggaaagtttaaatataaattatagagataagataaaattctagagatagaatattattatagataaatgtagttctagaaataaatttgttttaaaatttgtattgtactctaaatctctatctcacatatactctatatatatctgtgagagagtcactacaatacaacagaatacaacaaattatattttccacatgcacgattgccaaaacatttctttagttatagttttctattataatatatatacagtgaataaataaatatttactttattgatagtgctttttaagagtaatctatgtatgccgctggtgtagttattgatagtgcaaaattctaaaagagaccttaacgtccttaaccttgtttaaaatgttaggaatatgaaaccggatggagtaatagttcttgtacgataaaggatgcatgcatgagacgtacgctgcgcctgtgcgtcgaggatgctgaccttggtggagtgctccgcagcggctgatgaggatggcgtcattgtgagcattcagaagaagcacgccgcggacgcgcgcggccacacgcggccacctggggttttcagataatatgcctaaattttgtcaataaaaaaaactcttgctgtctgatcaagagtaaaagttgttatcattagataggccaaatttatgcgcttacaatgatttttttttgtctatcaagttatgaattgtcctagagaacataatcgtgttacacatgagcttgctaaaattgacgcatctctaggtctacaaagtcactttgtttggcttgaaggattcccagacattgtttgtaatttggtactccctccgtcccacaatataagagattttgagtttttgattgcaacgtttaactactcgtctcattcaattttttttttgcaaatataaaagacgaaaagttgtgcttaaagttctgtagataataaagtaagtcacaaataaaataaataatagtttcaaaaaaatttgaataagacgagtgatcaaacgttgcaagtaaaaactcaaaatctcttatattatgggatggagggagtagctagcaattcaactgtgttgggctatctgaacaatggagttgtcttattctttttttaaaaagagactagcttgagcagacaaatcaatttagagattttttttgaggcgaggtatatagaattagtttttttaagaagtatatttgtgtagtaaattttcaaaaaagaaaccaaaatgttaaaatttcaaacatcttctcttttgaaattggagactggatcgagatgagctgattgcattcgacactgatatgcatatatatggatggtagttacgtatccatacaaatggtggtgcccgtgttcatgatgcctctttttctctcaaagtgagtgacactttatatataacggtacagttgaccagaggcaacagacgacgtactgctgccactgtactacaacggattttgagttttttttttcactgtttgaccactcgtcttatttaaaaaatggaattattatttttttgacttactttattatccaaagtactttaagcataatttttcgttttttatatttacacaatttttttaataagacgagtggtcaaacagtgtaaacaaaaacttaaaatcccttatattataggatggagggagtagcacttttaactgttccttttggctcaactagatactgtactacagtagtcagtacgcgctatagtgttatgcaaacccagccaagccgctacgtacaaataaaacaggaataatttcgttgacctctctgatgcatgatctctcatagctgctggagaaaaggagtcaagtcgttttcatggcgtagaaaacagatcaacgacaggtcttttggcatatactactactacatgttaacagttaccacatctcaattaaggttgtgtcatcggttatgtgtgccagtgtgcaacaatcaccatgtcatgccagatcgtatctttgactctgaatgagaaatagaggacagcaacataggaccatgtatactctctctatcccataaaaaacaaacttaaatacgggacgtgacataaatatcaactgtgtcacatttccgtattatgtttttttatgaagaaagtgtatattaatgagaagctagtagccatgagcggaagatttttgtatatagtcgataacatatgtacataggaccatactctctccatcgaccatactctccgtttcaaaaaaaaataaatctaatagagaatattatacaggtgtgtcatatctgtatgggacgaaagaaagtatatactattgagaagttagtagccgcgcgtggatgctttttgttgtcgtcgtcgtcgtctttcggcaatgaaaatctcgatgtaccgtacataaagatgtgtatatccgggcagatcggaaggtgacatgtcatggtcatatcaaccgagatggcattcaacaaatcaactaagttgttgacaatcttaattacgtacgtccaatgttgacagagagagggagacgtacgtccttcaccgtcccactaacaatgttcttaactaaattaaccaacagaaaagatacaaattaaaatggcaggccagcatgggcgcttgatcactttccggttcatcggaataatctccgagctgagatgaaaccggtggctgcagggaagaagacgacgggttgcttctaatgaaaaaaaggcatatagatatataagtatactttacatcgtactacgtatatccctcattcgaagccaaaaccgccatgtagtacggttggcgccaacaggtagtaagcacacactaagcacatttggtggtagaaacaagtatagaaacagtcgatcgatatattccccaatttgggaggatatgcaaaactaagctgcccaatcaggcaagcacgtacgcttataaagactactcctaccttaattagtagtagtagtagtaggagtattagtaaagtgaaagcacttaggacacacgcatcaacgcacagtggtcatagccgtagtggtagtggtggtactatagtagtagtagctagaaggctcatgcaggggaggggaggagagaagcaactcaaatgaaagactacctagagatttgaagtccttccaaatatttttaagaaaaaattataaacatgtaagagattgaacacgagatttcgaggttaaaacaacacaatcttttatctctatacttgagtgtatctcagtgtgttctactttcatcggtctctttgtttttttccaaaatggattaaaactcggtctctaaatccaaatcgaatatactcagcaaaccaaatcaaatggagtatggttgtgtttagttcacaccaaaactaaaattttggttgaaattggaacgacgtgatggaaaaattgaaaatttatgtgtataagaaagttttgatgtgatagaaaagttggaagtttgaagaattatttggaactaaacacggcgtatatatatatatatatatatatatatatatatagctcgatggctttgcgttttttgcagcggtccccgaggcgcgggtggccgtggtgcggagcgcgtcaccgtcatccgtttgcgcggatcgaattaattcccccgcgaaaccggcctgtctgatcggaaactgggaagccgcggcggcggcggatatatcgtctggtggtgggacgccgacgttggattctactactagctagagtatatcgatcaatcgatggatcgattcatgggtgattagtggcactacatggatagaacgatagaaacgacatgactttgtagtagtagcaagcagcaagcgcgtggagagatggagacggagatggagatggatggtatggtggtggccggagcaatcatgggatgcggcggcaacgaatcggagagcgacagggagcagccaccagggctgcaggacgagacgagacgagacgccggcttaggcttgtggacagcgtgtgccctgcgcccctgcctaccggtagatcgtctcctgcggcgtgtgcgtacgtgctctagtttcaaattttgcgactccgcgcattcatcgatgggatggatcgatctgcacggccaactccactattgcgcgcccaagcgtcaggttcgccgcacttccacatgtacagtgtacaggcgcctacctatagaacctgagactgattggaccaacgactccatcggcgccgtgaccactatcgtgtgttgtacacccaactgatttatctaccattgagttgtatacaccaactaatttatttgttcggagaatttaatatgataaaaaggaatgaacgattcacgtttattcttaacactgctctcgaaattgagatataagtaaagtgagcgtttaatttgtcctactccctcggt

SEQ ID NO: 22956 - DNA, 4763 bp, Oryza sativa
aagaatattcgggatgcaaaaacttgtatagaaatataccgtcggtgtcgcacaaccattgcgcgaaaatgacgcaggaatgacgtcgcgggtggtctcccgcggcaataccgcgagcccgcgcggtttcgcggactgaaagagcgagaccgttcaagcaatcagcgacactgtccaatgggctccttttgattagtaattaattatttgattaacaattaattaataattagtaattagttatcctgattagggattaattaattattaaaatccttaatcaggataattaaattgggaaggaacggtttcgctgtttgcttgagcgatagcgctgattgtttgagcgagaccgcgtgatctcgcacttgtgcgataccggttgcgacgtcattttcacgtgcgtaatggttgtgcgagaccgatggtatatttgtgcaaaagattttgaatcccgaatattttttaaaaaaattgaatgaacaataaattttcaaatttaattccctgagagacgggcatgcacctgcaccgtggtcaaggtcggcaataataccgcagggaagcatggacggcgcactcggatggttaggctcgcagctgcagtggaaaccatcagatcacaggacattactctcgcacagttgcacgtttggtactcaaaataatgtttgaccgttcgtcttatttaaaaaaaattatgaaaaaaataaaaaaaaattagtcacacataaagtgctatttatgttttatcatctaatagcaataaaaatactaatcataaaaatttttaaataagacgaacaatcaaacgttgaacgtgaatagtttaaaactgcacttattttgagacggagggagtagctcatatccgatatccgaggggagaggatggatggatggagacagacacagacccagaaagcaaaaattactggctggacaaccaccacgccgcttcccgtggtaaaacaatcatgataccctctttttggaacgctcaaattccaccaaagtgatgaggagatagcacaaatgtggtgggtatttatagttgcaacctgcaaatgacaactagatagatacggccgcaagtattgacagcatcgtaagacggcaacaataggatcgcggtggaatctcagcaagtctgcatactgcaaggaaacggtaatggtttgcacaattgaatctaacaatagcatcagttataaccaggcaaactgacgtggttgcaccttgcaaatgaagcctgcataccgcacaacttattactgtcaaaatgaacaagcacgaactagacaatagcaaacaatagcaaaagagagcattttttctttctacgaaagttgttttccttaaaatgtagtagtaggcttttaagtcggcagacacttccatctcaacgtcatcactacacaatataccttctagctagcgtactcagtcagtacaacagcctctaccacaggccagcaaccgagaacatagttcaacgaacaaagttgatcaaacttagtgcagatatataaggatagcagaatcaagactcaggggggctggatctggaagatatatcacaccatacatcggttaagactacgttcgtaccatctatcaaaaaacacagaccgagaacattcaggattgcggacatagtagctcccagtcaccatgtcaaggcagcaagcctgcgaggtggagtccgagatcgccgatgtaatggcctgtcagggagacaaactagtcagcaggttaaacagagtaagagtataaaatttctagccagaagtggtcagcaccatatctgaattcctgttacacaatacaaatctgcactcaattaatccagaggattattaagacagaagttccacgtctagagaatggggcattgcactagctgcagtttagatcaggctcagataacgcttcctcaacgctactgtctaatactgtacgtagtaggagttcacaagaaataggtcagagtttggactcactttgtttcttctcagatatcattacctcagactggttattgaaacagtgaattatcatttgcggtttactcataatcacggaactaagagaacaaaaacacttctgctcccacaaatataaactacttgtttccaccatcaatttatcgaagtagttggaatttggaaatacagcaatagagctagaggtgatggactatttagtactccctccgtatttaaatatatgatattgttgactttattcggtcaaacttttgaaactttgaccatcatctctaaaaatatatagtttgaaagcgtagaaaacatataggtatactttactactttataagtacttttacaatattataattttattagatattatcattatattataatagaaaaatagtggttgaagttgcacaccaaagatcgaataaagttaacactcaacctagatcagatgtgatagtctgagttcacaaacactggaccttctgcagaaaaaaacttactacctccgtcccaaaatagttgtcattttgagtttttgcttgtaacttttgaccattcgtcttattcaaaagattatgaaattattatttattttgtttttgacttgctttattatcaaaagtactttaaatatgacttatccttttttatatttacaataatttttaaaataaaacgaatggtcaaacgttgcaagcaaaaagtcaaaacgacatctaatttaggacggagggagtatgaaacataggtaatgtcttccaggttaacaggtttacacgagtctaattatgtcaaaattccacaagtctggatgaactgcttatgcaaatcccagatcaaaccaaaccaaataaacaggccactaggatagggaaaaaatagccactgaatatgaaacaatatgttacagttacagatcttgcatgcaagatttcacgaaagggcaattgccaggaaatttagatttagaattttagattcagaacaaacagaaaaaagaacaagacattgtttggtgatgagattgtggagtaaatgaaaccctatgccagtgtaacacaacaaatcacctatcccagcaaatgcaaaagataaaagcatggttaataacacaccttgtactggtgagtttctgtataggacctctgctgaatgcccagtcaacatagacagtccttgttaacagctgagtcccattcattgctttgattgcagtttgtgcttcctcaaaactttcatattcaactaatgcatatccctgttagacagaagaacagatgtgaacagaaatcagatagctctgtgagaaagaaacatagatatttccatatacaactaatccaaaaacagtgtttttcacttagatctataaatgtgctaggcatacactaaatagtcttggatccacgaaattttggagataaaaacgttgataagttggatcgtgtatcaggagatggacaccagttggatgcaaagtatttgggaaatgaaactagtatcagggcatcatgaaagccatcaaatcatttcaaacagtaaacaatacgaaataattggaagtcccaacacccctcttaacccttaccatgtaaacacaccgtggtgcataaaccatttattttctgtaagaatgttaaatgatgtgtactctggggtaaactagccatattgtaccagaatatagcattctggcagaaccaaactagtgcatattcttgacttaatatgaaaatagacatttctctaaattatcacagtagaaggaaaatctaatttcacatcaggtacatgacttctaacaccatgtgctccaagattgcccccattattagattctcttatataagtcatccagagaccttagattagtatgggtgcagttttatcagaataaactaatatcttcttgatgtaatcaagtaaaatgacttgagcaatacactcatgttggtcaattacaaaatgtgtaatccaacttttaccatgctaaatcaaagttgagaattatatcacataaaaaataggagaaacaagatgaataatcaatccaaacaagctaagcaatgtggttgaagaaagtgagtggccatttatgaaactcagagaacatcatttgatatgatttcgattaagaaggtttctaaacagcataaatcaaattttcaactattctcatagcagtccctcaagaaatattcctgcaaataaaaaaggaaaatgatgatgcagagacaggatataaatagtcacccaaactccaaggaatactgacagagtcgttagcgaaagagaatatggttgaaagtaaatttaaggtggttgtgctaagttgaattaacacagaagctttattattcaaggaattacattcagcatatcaaacacaccatgcccttcagattaattaactgaatatgggaagccctcactgccagaagctgcatggaaaagaaactacaatgcacataggtcccaaacagaccttaagaagcctatataggccagtagtaaatactcctataatgttatgtataaccacagtggttgctgcgcattagcagtttgtattgaattgctgcctgttggaataaatatcaattttaccttggcatatccagtgcggcgttccagatttaaatgtaggtccttaacatgaccaaaatcactgaaagtgttgtacagatcatcttcttccgcgtcttctttgactccagagaccagtagtatccatccttcaatagctacaattcagca

SEQ ID NO: 22957 - DNA, 3556 bp, Oryza sativa
attactgatgtgttgtccttggttcgcaatttcctagcttcacttaacacatgatgtgctactttatctgctgaagttttctgctcgctgtacttctgcttaccctgaaaaatgagataaaagatcagcacaccacgacttaataaccatgaggttgaagccgatcgatgagttacctcaaggacaagctgcgctgccctgttagcgctaataacatcccatagcccgtcgctgcaaaggagcaaacaagcgcacgttatgaaatgtatgagtaatgcattacattagcaagcatgaccatcatagatggggagttttgatacctagcaataagggcagaggctaagcatgcttttgtcatgcgaactgcctggctcacatatggttcagagctgaaccgtgaatcttgttcctttaaaaacttgtccccaagcatcctgccaagatttagtcctgtggaaataaacagcgagatcgtgtcatcattattgttcaagtctgcagctgatgtaagatagcaatatagcatataccacatatacggctttcaccgtctttcaggggttgtcctgaatttgccatccgggctcgttctgttgtactgactactcgatgatcctcggtcattgtaattatttccccgttgacactggcaacaatttataaattattgctgtattacaaagcttgatgaaagaggaccttataaatcattttttattgctattgtatagcagtttaatatacaatagggtggcaatatttaaatttcaattatggtgtatttcacattatactagcaagtgactgctagtgggtttttttttctttgcgaggaagcaagtgctacagaaaaccaaatagtacagtgtcttcgagaacagaaaagatgctaattacctcataatacaagctgagtcaccaagattagcacattgggcgaagcaatcttcgttctggtcgaaccaaatcagaaggatagttgctgtgcagccctggaaaagatagaaaaacatggtaagcctactgaaaaggtggcaattcaagaaacagaggattccaaggacccactagacttcatgtacagcatatagccttagaaagactatctggagtctaggagttttaatgggagactcaactcataatttcggtaaatatttcctggcaatcatgggaaccttaaattgcaagagacttcgcttcatgtatacatttcagaaaccaaattaagaatcagagctaaacttttaaatctagaaaaccagcaagtgatgaattttacacatccaggggcaagtaaaggacaagaaattgcagtagcacatcatttgatcaaaaaagttaacaaacatacaatgtagcaacattcgtccaacaaattctataccaaccaaatgtatagataaaccttgtaacaaacatatgatatttatttaatcaagttattaaactaccagacaagaaattaagcaacatagttcaaaaaatatagtacacgagaaatccagataaaaggaaaacctcatactgatgatggagtgcagcttcagtcaatgcaaaggcatgtctaagaacatctgaagcactatggcatgaaagaactctttcttttgtttcctgttgagacaaaatgtttgcaatgttctgtggaagaatcctaggcaacaaagggggtcatcagttcaacacgtatataatcatatcaaactcaaaatcaagaacggttatagtaattaatacacgaatgtccaaattctaggataacattatgatttgcacttgatcaaacaaataggcagaaatagcttacctgctggcagctattgcagcaccatcccctccatggccatcgaatatgccaaatagcccaaactgtgtaaaaatcaatatcagaaaccactcaagtatttgcacaaaaactaatcattcacataccttttccacaccgataagaggatactggcagcagctgacatcctccatgtgaagtttcttcccagttcgacgggctgtcattggatcagatgctataccaactcctacaggttgttggttttgtagctcaatttggacctagcacggtagcgctatcagggaattgctttcttcaaagatagatacaaccaaatttcaaacatatgttgaagagtttttttttcttttttatatatgctccagtttctatggcatggcagacatgtggaaccaaataggccagcatatgaactgaaatgtcaacagctagcaagaaaacagaaaagccgagtgtggtaacatgtttgccaatttgaattaggtatagttggattatatgaaaaaaaaatgcataggggtttcatttcaagcagaatgatatgtgaacataaaagcattaaccatcagatgaataataatgctggaccataagcaataaaagaccaattctactataaattagttataaaaatcttcagtacacttgaaaggacacactgaaaaacaaaagcggttataacttacagatacttttgatgaactcccaagtgttataatatcaccatctgcaagttcagcaggctcaccccaacgcctagatccaacatcaggatgattaactgaccgggaattcaaaaatgttccatttagactacccatatccacaatttcccatttgagtttctgcaataaaagagtaataataattttattggatgggaatgtaagaaggcttaagatatttgcaggtatgtacataggtcatatgaattttttttttagatacagcttagatcttcacaacttacatttgcattccagtcaatctgtgcatgctttcctgacacctctgagtcctttaacaccaaatgacttggaggaacccttccaagagtcacgggtagcatggacttgttacctgactgcatatagtggtttattccatgagatgggccagctatgacctccaaagctaggttgcttcctgcacttctagcaaatgattataaacatgagcatatgcatgttaacaacaatatttgcagcataaggaccactcgaatatttaaatattttcagggattttttaccaactataatgtcaggaatggtgccattgtgattactctctccagaatcccttcttatgtgcttcacatcaggtgttggcccatttgccacagctggacgcttaagcgtatttcccaaatagagctcttccgttttactgtttgtaacatcaattacatgagtttctcctacacaaaccaaagaattgattatttttgtaattttatgacgattgttagtaaataagatgaatattactaaaagaggaaatgaaaacaagactgatgctgtataacataatgatgaaagtttgggtgtaaatgtatacgcaccttcaataacatgagattcagtgggataggttgccccttttccaacaatgccatgagtcttaggtgaagtgataatcctatcaatccgaattcctgattcatcgacagtactactattgctcgagactgaatagtcatccaaattgtcagatatgagaggcatgggctgcaggaat

SEQ ID NO: 22958 - DNA, 11833 bp, Oryza sativa
tattaattacagtttgtgataacattcgtatgtgaatgaattacgacagaaaaatcttgtatatcttctaaaaacaaattaagtgcgcttagattaaacatagcattccgtgctcttagcagaaaagtaagacagtgggggcttcattggcttagtgccagttgttccagtggaccaggaagcttaatagaggaaaaggaaaagtggttgctacccatatccaaccatatgggacgcaacgtatcttgccgggccggccaaagattaggccgaccaaatttccttaagattgagagtactatgggacacaatgtatcatttaacacaaaacagcaaagtataatataagtaaaagatcatgaaaaatgattgaagtacaaaaatggaaaaacattgactaaagtaaagaaaatcacatccatttcatcgggctgtatttactgtttatgcttttgacaaaccaagagtcggaaatgaagcttaaagaagcaaagataacaatcttatgtccagtaatccagttgcatctaagaacattgcagcttgggcaatacgacaataatccccccctcctcctatcaagctgcaatttgccttgtcgatgaccaaattaacaaacgcaccaaattcatcaatcaaatatgcatgctggattaaatatcagaacagaaaacaaaagctaccgccgaatctccaccaatgcaacattcactgcaaggcagcagctacaatctagggctgggagcaggccacggtattcccctcgctcatggttctgtgttggtgtagtatattctaacgagagaacgccatggacgaatccaaggacctcaaaaatcaaatcgctcgtgaaacagtaccctcgtaacgaacatcaccaagatccaccaccaccacaagaaagtacaaatcaccactcgacaatgtttccatttcatacggcgatcaaataaattggtgaaaaaaaaataatcgagggattccggggggtccgacctgggaggaagcgggaggtgggggcgcgggggacgcgccccgccgccaccgccggcaggcgaagacggcgaggccgaggacggcgagggtggcgacggcgaccccgctgacggcgaggggagggatggccatggtcgcttcgcggggtgccgaatggcgaatgcttcgcgacgcacacgggctcctgttttaatttcttttcgctctttttttcccttttttttgacttgtttgtttgtttttcctctccggaggacgctatttttgtgctatgaattcccgagtttgtgtggtttttttttccctctgtttatacatgttacacgtgactattcacgtttactattttcccttttatcgattattaataataccattgcatttatttttgtaggtttgtgttggaaagcatttagtttctacaagttgttgttatcttcaggctttatccccaaaaccgggatgtactaaatatctttgttttgctagtggtagttttatctattactcacaaattattgttttgtcaacaattgcactgccgtacactctcctcgtaatcctattaccctgtttgaaacatattgtccgctaaattattaccatcgattatctcggataaaccaactattttaagaaataaactaaacaaatatctgtttcacaatgcaagactttctagcattgcccacacttataaggatgagtgtggccttatgagtgtgggcaatactagaaagtcttgcattgtgaaacggaaggaatattttagaaaaagtgctctaactagtttcatagaagacaattttgaaaaaaaaaatatgttctttaaaaatggtgcaaaaaatctacgataacaatatagttaggtaatcaaatattgttcttttaaggtaatttaccctagacttgctagacgcatgagttttgtttttccctgtattgttgacatcatcttaatgatgaaaatcattttagagataaatactgtataaggatacacatgtactccgtaatcgctatgcacaaaagcagcaatagtataagtcacaccctagcaaataaagcctggtccgaatctttaccgggtctttttttcagactgatcacttgggacagtttccctacctgaattttattaaaatggagaaatagtacaatgctttagtttgttacattggaccgtgagtaattattagctgagtaatacaattccctttccctgtaagaaaaaaaaacgcctgtattggtgtggtgtattcccagtgttaccgcaccatcgagaaaaaaaaaatgtagtgctcccctaaaatatttgcttctccctcccttcagaaatatctatcatttatgataaaatttggtgagctttttaaaagttcgacaactaactttatattagaataactaggaaggtagcccgcgtattcgcgcgggcatatattgtacattgcgtttgaatatatataaacagaatatcaataggctgacacctcccatgtttaaaagtactattttttaataagacacatcaggtgaggcctccgctgttcatcggtattttgctttgataattttttcaagatatttgttaggttttaaaatatataatatttaatacatctatataaataattatctatgatcgctttattatatagaatgaagttcgatttaatttgtttggaaagtgtgtctaataaatcaagtgtaaattagaagtaaggtgttttgtccctttttaatagaatctttactcgcttttttttaacaaattctaaagaactatattgttaataaatatggtttatttgtagcatcaagtagttctccttctagttggtttaagttgatgcaagtttttacatacttatatataaattaataaagacatgtcatatacctcgcttcactgtgatttgtgtgatatgtattatatttttcaaaagaaaatacctagttaacatgaatccaaaattttaaatttaatagtaacaaatataacttttcaatgaactatatagtgcgaaccttattgcggtttgtatgtgtaataatatgtggagaaactcataatgctatgatataggatagatgtaaggacattaatgtctaagcattttaaaattgttacgaaaaaggaacatgcaatggttggtccaattttagtgaaatgtgagaaccaattttttaataacttattatgttttctctaaatagtttaatttagtctctattgacattttctattacttgctttattttatattttataccagctcaaaatataagctttatggatctttaaatcaatgttttaattataaatacaacaatatctaaattagaaatcggatgtgtagcttgaaatttatgcaagttttaaaatttttgattattttcggctatataaacaggaaggggtagagtggagagctcaagacgagaagggatggggcgaatagtgccgtgttgtgcgtatgtgtgggggatggcgaagtggaggggtattttttttctattttatctaaatgatttaagtgaaaccaatgatatatttttttctcacattttatgttatttttttctaattcttaagacgtaacacatggttgcttaagattttcttaaaagaatatctattggttgaaaataatggatctacctatttaagtggaaactgatgctaagatggtttttcttccaatttgtaaagttatatttttatttaaggcgtaacacatgacgccttgagtgtgctcagaggatgtccagtgatttacggtaatataatacttattttcattttgtattatggtccgtgttttttctatttggttaccatgcaaaggaacagtgtctatgcttaaatgacatattttcattttttatagagtgaaatatgggtaatatggatcttaaatattttatttaattgtaaaaaaacaaaaattcaaataagttaaaattatgatttaatttaagaattataatcatttagctttctaattattgatatttctttacttagttaaaaattaggagataaaggaattaaatgagtgagtagaggaagagagcgttgaaggatagagattatgcgtgcatataattgcaataattctttttatccgattatgcgtgcatataattgcaataattctttttatctgtcgtaggctctccgaatcttccattataattaagagatgaaataaataattcaagtcatcaaacaagcataatgaaatatccgacgcctcgagagagtaatattggagatattgttgggcctttagcctgccagtcaacttcagcctgagatgtgcccgttaaaccactcgaaggcggtgaccagatatgttacacatttaggagacttgacaaaaatggcttaagatctacaacatctcaaatattcttaactcatactcatgtgaatctaattcccaggatgtgcactagattcacactttcatctcaagcatgattatacatagcaaacacaaataagatgaaagtgattataaactacatctactttagttacattggccgaccgaccaaataaataatagaacagcggaagcttgtctttccaatccacaagcacaccgactaggggtttaccccattaagttcaagtcctagaagaagcagtcgatcacccgcatcactcaaaggctaagtctaaaacctgcaagcaaaagttaattcaacagcaagagtcaataatgtactggcaagcatcaagacaagcctaacaccctacttgcaaggcatataatcaaggaaggcatagtatggttctttttagcataaagcaagttttatttgcataaaacgcattcaaaacggatttgctttcaaataaaatttcagcaagctagtacttaacatatgggcatcaaagtaggcattaatcatgtataaatatccacctcattgccatccatggcagcaaggagatcattctcaaatctcatcacaatttgaaggtaaatttcagcattcaggagaataaacacaagtctatactcaatacatatccacacgccgctcatgaccgtgagcacggctaatcgattagttttaactttgcagagtttgtacactttacccacatgatacgaaataataatcatgcaaaagcatggcacgcgatacataagtacccgatttattacccgcaacaaagcttttccaaaattcatgatttagccttacaccagcacgatacgtgttactccatcctaagccatactcgatatatggcctagaaccgttaagtggtgggcccacgccttaaacttaacgccgtggtgacggacacaacgggaacccaccacgtggcacaataccgttgtattggacacacttagtcacctaaactaccacgtcggggtaaataggaagctcctctgaattatatgaactcatacacaccggcctaccagaatgtaaggctaaaccataaacaacttactaagcttgggctatcccatactagcatatgtggttgtactgtatacggaatgaactgacattgagtgaagtccttaagtcggtttgggcgcacactccccctatcggtacataactaatcaccatatgtgcaccacttgaggcccaaacctaaaattcatattttccaccattttatttatcaaaatcacaagtattaaagttctgctcagattatttaaaaatcaattttcatgtttgtaatgagcccataatgacaaggaagaccattctaagcatggctaagcattatagtaacctagtgtcaccaaaactcgtatataaatggtatagtcatattgttcctaaggttaggtatgagggatatggatatatgtggggttaaggtgataatgcaaataataggagtttgtctaacaagtttaacaaaattttaattgattagtgtacaaatcgacatgcaagatttacaaacattttcaataacctccaaaacataggttcaaagtgatcaaagagagggaggtaggacttgccttgtaactggaaaaagtcagcacctaaatcacttcttcaccgtttaagcaatcatctatacaatgtacacgttatgcaattaaaacaccgaaatatgtgaaaaatccaaaatgctctaaaatgcatgatttgtgcacagtggataggtactggtctaaaatgaatttatgtgaaagaatttctattttatctcatttcatttgagagttataaattttagaagtttcgtcggtatagtgtaggatttacttaggtactattgtgaattattgtgaattgctgttgtaaggtgattcttattaagtttatgtttgctggggtgaagatatgtgtttttaagatgaacacatttggtttcataatttttagagttaatatgaattctttatgtattttacaagttataacgtgttataggtgtatagtgttctataggttcatggctttagaggtttaggtccagaacttgcctcatctagctagtgatgtataaaaatgagtattttagttaactaatctaaccttagttcataggcttatggtctttattatcatggttcatattttataaactaggggagctctagtccatgctagcaatttattatatcaacctagaaattattatatgagctaagtgccttaagttttggtggatggggatggatctatgtattcactggtctaacaagttttatttgggtttctttatagctagagtgtatttctatatacatttatatatatacatattgctcaatcaatactatgtgattagcacctatcctataaatttaaagtttagagctataacctgtacagaaggttccatattttattttactatgttgaagcccactgtttgctggttctatagatatttggttcacttcatttagactaaagatgaattttctacaaattttacaatttaaggttgctctatattggttattacttacataagtatttagaggcttttatcatacaataagtatgtaattttattttataacttggaaggacatgttttggtgattctacagaacttgggtttattcaaaaaggatctaagatgaattttatatgaacttctaaaattcagcttatctaaaactagtcatttaaaggtaatagttttagaggcatttgatgtatagtatgtatactatttcattttgctttataggagaacataagttggtggatctgtagaaactgagtttgctccaaaatgagttgagatgtactttgtatgtattttataagtttgtgtatgctttatgtatgatttatcttagacccattttagagacaaggtctgtgctgagggtgccaagcttattgttatcacattaaagttcatagttttgttaacctatagaaatttgaatcatctcaaaataagttatatttgattttatatggattttacaagtttaggtgttttgctgttaaaaagtaaaggcttttagtattatcttttacattttcagattttaaacttatggggtccacctgtcggtctcatgccaatatgcaaaaaggcccctagggtttcaggaaatcaaaccgcagtcctatgcctgttctgtgtgtcatgagcttttgcataaaggaccctacattaacctaaattcttgtgaggaggtccctggttcgagctgaagcagatcaagccatggctgagctcgatttcaagtttgccagcggcaaacggtggctcgtttgagggtgcgaccaaaagacaaaatgaagatcatgctattgcgattccattcctctacttttatcggtcagtggacatcggagtaacgccggcggcgagtccgagcggcggctgtgcttaggctgctattgcttgttgagttggtgctcgattctaagtgaatgaaatgcatgaatgcaatcctatgggctcaagggtgctcaccgaaccttgaacgagacgcgggaaagtctggactgcggcaacggtgaagaagatggtccggcgacggtgtagagctccgggaagacggcaacggctcgatccactcatcgaattgacatgcatgtgttttcatggggttagtgaggtcccagggatggtgtatacgcgaagaatcggacaatggttcaccggaggaggcgaaatcgacaatggcgacggcgaccggaggtgaagaagacggtagccgatctccgcactcgtagtaccatccttctagattcttgaaggaaaatggagaggaggtcgaggcgaaaacgctggcgcgacagcttggcccggcttggtccagataagcgggaacggcaatgatgtcgctgcggcggtgcacagagcgcgctctagagcgaccatgacatggcagcgttcccgctgctgtagaagatgaaatggaatgggataaaaaccaaagttgttcggcatggtgagatgagaatggaacgagtatgagttagagatggagagggctcgacgacggttggcgatgtccctcttcttggcggccggcgacgaaagagaggtggagagggagagctggagcttcctccctcggttggatcggcactgggatggtgggtgaagagtggcgacgcagctgggtggaggtgaagctttggttcggcactgccacgtcgaggccacgcgtcgacgccgtccagtgccggtcggcgccctcagtctctctctctcggctgtcactgtgttggatggaggagaaatagaatatggacagagaagaagtgactcagagaggcttccaggtgggtccagggcgaagggaacaaggctggagtgagagaggtgggtagaagatggggtgttaattgattttggacgaattttcaggattatttctctccatctcactctgtagttctatagtttcatttgtgagtgtgataaattctcgtggatttttctagaggtagatgaagttacctagtttccattttctttggttgcacttaaaaattatggatagattactctcaaaaattaggggaagaggggctctttggaaactagtttggatttttaggagacctaaacagagaagataaattctggaaaaattatatttattcatgataattaacctagtatttgaataaattatttccctatacacccagaaattcccgaaccagaatttctaagctgaatgtgtattaaacccttgtccaggaccagccagggtacacaaacgacaattgttgacatacagatccacgtcttacaaaaatataaaagattacaaatgcagcggaaaagataaaagcgagctaagcctaaagacttgactcctgcagcgggcgactccattccacaggcatccttgacggcaacgacgaaaccaacttctttgagacatcttcagctgagaaggacttcaactctggtgtgggggaaaagagagcaagactgagtactacccattgtactcagcaagtcataccgaaagaggaggtatgatgcaggatatacccaagggaggctaaagggctcatttgcataaagctagcatttaaaagcagtagttgaaagcagtaaaacagttgtagtaattaatcagtattaaccaatcactgtccaatgctacaccatgttgcaacaggctcaaccaaccacctgaactacgctagttcattagctaactaggggtgagactaatcacggtgaatctggtcgaccgcccataaccgcgggcacgactattcgaatagttttactctgatcagaagtgtacaactgtacccacaagacacagccccacgacacgtttctgtgcgccgacatgccaccacgacataccggaaagaggccgtgacaggacctttcgcataaccctctctaaccaagcacaccacacctcaggtttcacccccactcctcgcaaggcagcgggcagtcccctctcgtgcctaggtgaatccggaagcgacagaggtcgtcgcaaggcccgccccgctccatcacgcccacccttgcctggatgcgtcagctagaggaaagctacactacaagcccagccgttgctcacgttggcttgtggtaagtacgaggaattcttccagggtttcccgcgaaccggtccttaatcgccatgggcacgactaacaaaaccatgcacccatagcccaccatgtagtgtattttaattaaccaacatcattacggtggcactaaaccaaagctatgccaataatcaaagtctatgcattaatgtgattccccttttgtgtactagttgaactaagcatggttaagcatttcctaaaccaatatctagtcatttcaatacccaagttatcaatggcataagggaaacaacatatagctaagtaataggacccatcccacatgatattgtaaaataatgcaatatttaatagaaatgcgggacatttgtaaattgggtacaatatgatcaattgtaatgcatgacttgccttgctctcgcactgatgagaccacagcaacgccttcgaggaaccgcagatcgacgaaacggccgaaatctacgcgacaaacaaagcacacaagcaaaataggctataagactactgaaaacaggaaacaaaaccatttttaatggattctatgcatttttatgaatttactgagacttgaatggacttaatcggagctcggatgaattagttatgatttttagaagattctctgtgtttttactattaaagaaaagccttaatgtatttattgcgcaatattgccccagggctgacgtcagcaatgggggcggcgccgataggcgggacccacgggtcagaggcacaagggagagggaggggggtactggcaggcggggcccaccgggcggcggctcattgggaggaggtggtaccggccgggctcggctcggctccaaagccggccagccggccatggctagcggcggcggcatgcggtcgccggcgatggcaatcggcggcgcgggaggcggcggcagccgaaggcgacggcgcacggccgaagcggcggctcggctcggctcagcgctaggagggagaggaaggggaaaagaggggaggagtgcctcaccgcgagttggccggtgtgggggaagacgacggcgagcgaccggagaacggcgacgatgggcggacgagctccgagacctcctagggaacaagatgggagggattagagggagaggggtggtccacggcgggcggaaaccatggccgaaggcggcagtagtggtggtgctcaccggagtgcgaggagatgcgggctccggcgacgggtttggccgggcggatagcggacgcggcggctcgccggatggcgaacgcggcggcgtcgacggtgaggctcggtgcggcggctagcggcggccggagggcggcggcgatgggtgttgacggagcgtggggctcctcaccgggagaccgcgcgggcccccctttgccggttcggccgggggcgctaggtgaggttctaagcactcgatctgtggaatgtttcgcgagagagcaaatgcgcaagacacgggcgatgtagacaggttcgggccactgagaagtgtaataccctactcctgtgttctggtggatctgtgtatgaaggagttacaaagagctggagagcaagagagttcaaactctagaaaccctcttcctctttctctcctctacgagctcaggtcttctcccccctctttccccagctcctcccttcttaagtgggcaaggtcctccttttatatctcaaggggatcccacatgcaccacttctacctactcttcttttgggtggggactcaccctatcttcccaaaaaagaaaaaactcgcttgcgcct

SEQ ID NO: 22959 - DNA, 5278 bp, Oryza sativa
tgctaactccaggagtcagcaggccgggtccggctagggacgagtgcctagaggctctcatcattccgacgggacggggcgaggcgtgcgaaaggccgcctgttgccacctaacccgcgatctgaccggtctgtgaccggtcacacactgtgacctgtcacggaccgaacgagtgtgttgcgctgcattaaatgcggcgtggggcgctcgtccaacccgcaataaacgcggttaggtgagcgccgctgtgctcacctaacccacacacgtggcgccaaacccacagggggtcggggcgccccagccctcggggccgaaacgggagcggcccgacccctcggggagacagagggaggggcggccacatcaccctcgggcccgacccccccgagggggtcaggccacgtgggtgactgcagctgccccaaacctatagtcaagatacccccggtcccatgtcaccgacagtagcccccggcgttatgccagggcgatcgccctcctcgaggaaagcgctcgggcgtgacgccactccttaggcctggtgacaggtggggccggtctctacaggcgggcaggaatccagtggtcgcaaatcgcgcgcatcggcaagggaaaaaccgaccgataataatgagcggctttcttcaagaccgctacattacttgagtagcgcgcgaattgggacgagccggttcgtttcgcctggagatgtgatgatggtgcatcggtcggcgagcgtagttaacgcgcgcacgatatgtgccatctcgactaccacggccgcacatccgcctcgtgcgccgcaaacgggcgagcgggattagtggaggagtgggcgcgagaaacgagggggcgagatagtgggcgagggaagcgaggagccgggcatagcgttggtaagggtataaagacgccgaggaagagattcgtttccttcctctcgccattattccccttgccttcgccgcttgcgttctaacttctcgtttcctgtgccctaccttcgccgcactcactcgctctcaagcccctcctccgccggcgtcatggcacggggctccgcaccgctcgatggtagcgtgctgccgccttctcgcatcgtgagcgagaggcaggccgggctgccgcgccgattcatgccggaatctgccactggccgggaggtggtcgcgctgggtgagggacgcccggcaccacactacccggggcggtccgtattcttcctttccttcgcaatggcagggctggtcccgccattctcttctttcttcatggatgttctggagctttataatctccagatggcgcacctcacccctaacgcggtaatgacgttggccatcttcgcgcacctatgcgagatgttcatcggggtacgcccatctctccggctgttccggtggttcttcaccgtacagccggtgtcgccaccgtcggtagtcggtggctgctacttccagccgcgggggccggtgctgaaccgctacattccctgcgtccttcgcaagaagtgggacgactggaagagcgactggttctacacccctctcgccgacgaagcgcgcctccgacttccgagccagcccccggcgcaggcctccagctggcgggcgccggtagatctgggagacggctacgacgccgttcttgaccgcctggctggtttgcgatcccaggggctcacgggggccatggtgtacggcgattaccttcgtcgccggatcgcgccgctccagcggcgcgcccggggcgcctgggagtacaccgggtccgaggactacatgaggatccaccagggggtcaaatgggattgggtccctgaagacttcaagatggtgatccaacgggtgctgaatctcagctccttggaggcatccctcatcccccaaggtgtcctccccctctgcagcgatccagagcgcgccaacatcctgaccatcatgcaggcggtcggggcgtcaggggagcgggctcctcgaggccacgatggcgcgggcgggagccgcaggggggaacaatctaccccgggagggggtcgtgcttctgggccccgtgacgggggcccggggggcagccgccctgccgacgcccgggggaagaggaaacaggaggataccccctccccatctcctccccgagggggcggggcggtgcgtgccagcagcaggcgcccggagggtgctgtgccgacgtcgcagcccgagggggagcgaaaaaagaagcggctccgcaagatgggggggaccgaaccatgccggggaaacctcatctcccccccaaggtggtcgtttagccgacctcctcgcaggttcgtccccgcgcccactgcggccgtattcattctcccatctcccaaggcaagttttcactcacccgtttttcgtcttctggtttttcttctgcctcagcgagatcccgtcgcgcccttcccgccattccaagtctggccggtctgaggccgaggagacggcgaccgcggaggcccggaggcggggagctgaccggcgagaagccgcagaccgcctccgggaagccgaagaagctgcccaggaggccgtccgggctcgccaggctgaggaagccgcttgggaggaggccagactccgccgggccgaggagtccgtccgggagacggaggcggcgcgtgtacgccgggcggcctgccgagcccccgacccgactccgcccgaggcgacgacgacttctgaggccgcccacgacgaggccgcgggcgcgccgctcgggcccgacccctcgggcaatgcttggggcgagccagcttcggggaacgcccccgagtcggcatgtccatcggcgggccgagccgcgcggcgcccacaccgaggcggctctcccctctgccttccgctgccccactgagcgcagaacccctcctgcaggccttggccgctgcgaacaccacggtgttggacgggttaagcgcccagatggaggtcctgcaggcagagcgggcggaggtcgatgcggcgtgggcgcgcgtcgaagaggggcggcgctcggtggaagccatggtggaggcgggccgcaaggcacaccgccggcatgcctcagagctcgaggcccgtcgtagggacctggcggagatcgccagggaggtggaggaggagcgggagactgcctcatcgcacccgccgtgttcaacgcggcgcgggacgacctctgcctcccatacgggagccgggcggcggagctagagaagaagctcgacgcgtcccggcagcgcgaagaggcccttgaggctcgcgccacggtgctggaggagcgcgcccgcgccttggacacgaaggagagggaactggcgggtcgcgaggccgccatcgccatccgggaggcaacgctggcggcgcacgaggccgcctgcgccgaagaggagtccgcactccgcctccgcgaggacgagctcactgagcgggagcgagctctcgaggaggccgaggccgcggcgcagcggcgggaggagcaggcgcgcctcaatctggaaggcgcccgcgccgagagggccgcactggatcagcgggccgctgaattcgaggcacgggcgaaggagctggacgcgagagcgcgcagcggcggggcgaccgcgggcgacggcgacctagccgcccgccttgcagccgccgaacacaccatcaccgagctgcagggcgcgctggactcgtccgccggggaggtcgaagccctccgcttggcgggcgaggtagggcctggcatgcttcgggacgccgtctcccgtctagaccgtgccgggcggcaggtgggcctctggggcgggcggtccgcgaaatacgccgccaaccaggggggcctcgcccagcgcctctcagagatggccgggaccctccagcggctccccgaggagcttgaggaggcgatcaagtcatcctcgagggacctcgcccggggggcggcggagctcgtactggcaagctaccaggccagggaccctgacttctccccgtgggcagcgctggaagagttccctcccagaaccgaggatggcgcacgtgcgagggtccgggacgccgccgaccacatcgtccacagcttcgagggtacggcccctcgactcgcgttcgcgctcgactccgacgaggagggcggtgacgacggcgcggacgacagcgacgacgaggccgacggcccgggggcgtcggagtgagcccccaggcccccgccaatcttaataacttttccttcttcttccgaggccttcgggcccccttcttgtatagactgatttaatctgtaatcaagtaaagaggaaatttctgcgtcagttaagtttgttgtgtgtatgagacgaggatggtccgtgccgcggtccttctgtgtcttggcttaaacgagggctcgtgcccaggtcccaacctcaagtggcgcgggtcggggctagtgcctggggagatccgcgtgtcgagactggccaggccgggagcgtggtgaccgagggttatggatgacccgattgtgggcctatgccgattcccccccggagttcaccacgccccggggcacggctcggttctgggccccgtttggcgattttagccggcccgggccaccgagggcagggtcgggcacgagcgtgctaattcaagccaagattcttcaaaaggaaacgatggcacagacacaatcctcaggaaatcgaaaatgcttttactgaaatacggaagagaaaaaagataaggatatgcatgtggtagcccccggccaaccctgcacgcccgggggggcgcggggttggcccgagcccgagacctgacacccgacccccactaggggtagaagcgacgaaggtgttcgatgttccacggattaggcagctctgtgccgtcgcccgtggccagccgaacggagcccggccgggggacgccgatcactcgatacggaccctcccacattggtgagagcttgctcagtccagcacgcgtttagacgcggcgtaggacgaggtcgtcgacgcagagtgacgggcccggacgtgacgctgatggtagcgccgcaggctctgctggtagcgcgcggctcgaagggccgcgcgccgccttcgttcttccaagtagtcgaggtcatctctgcgaagctgatcttgatcagcctcgcagtacatggtggcccgaggggacctcagggtgagctcggatgggagaaccgcctccgcgccgtagacgaggaagaaaggcgtttccccggttgctcagcttggcgtggttcggttcgcccaaagcaccgctggcaacttctcgatcca

SEQ ID NO: 22960 - DNA, 16240 bp, Oryza sativa
gccattgcatctggggtggccgggggaggcgaagcagagcttgatgcccatgtcttcgcagtagtcaccgaagagctcactagtgaactgggtgccgttatccgtaatgatacggttaggcaccccaaaccgagcagtgatgcccctgatgaatttaagcgcggagtgcttatcgatcttgatgaccggataagcctcgggccacttagtgaacttgtcgacagcgacatacagatactcgaacccgcccggggcccgcctgaatggacccaggatatcgagcccccagacagcaaacggccacgaaagaggtatggtctgcagggcctgggccggctgatgggtttgcttggcgtggaactggcacgccctgcaccgccggaccaggtcaaccgcatcgttgagagccgtcggccaatagaaaccctggcgaaaggccttgccaaccaaggagtgggaggcggagtgggctccgcactcgccttcatggatatcggcaagaagctcgacaccttgttcccgaggaatgcacttcagaaggactccgttagccgcgcgccgatagagggtcccttccaccagcacgtagcgcttggagatgcgctggacgcgttcactccattcgcggtcctcgggtagagtcttatctgcgaggtatgcctggatttcagtgatccaagcaatcaatctaggggaactgggagcgctcccctcgggtcccgaggcctggactccgacgggcctcgggggccgttcaggcgcgtccgtctcccctagggggtcgggtcgcgccgacggctgggcaagcctttcttcaaaggcgcccggtggggtctgggctcgcgaggaagcgagcattgagagttcgtcggcgaccgcgttatcccgtctgggcacgtgccgaagctctatcccgtcgaaatggcgctccatacgccgcacctggcgcacgtaagcgttcatctgcgggtcagagcaccggtactccttacagacctggttaacgaccaattgggagtcgcctaacaccaggaggcggcggatccccagtccagctgccactctgagtcccgcaaggagtccctcgtactccgccatattgttggtcgcccgaaagtcgaggcggaccaggtatctgaggacgtctccgcttggcgaggtcaacgtgacccccgcaccggcgccctgaagagatagggagccgtcgaactgcatcacccagtaggcagtgtgaggcagctgcgaggggcccgagctagcctcggggatggagatgggctcaggggctggggtccactccgccacaaagtcggcgagggcctggctcttgattgcgtggcgtggttcaaagcgcaaatcgaattcagagagttcgattgcccatttcaccacccgtccagtaccctctcggttatgcaagatttgaccgagggggtaagacgtgaccaccgtgacccgatgcgcctggaaataatggcgcaacttcctcgaagccatcagaatagcgtaaagcatcttctgggcctgagggtatcgggtcttggcgtcccggagggcctcactaacgaagtagacgggccgctgcacctttcggcggggccgatccttttcgccaggggccgcatctccagggcgctcttcgtccgagaggccatgcggggcgcactcggcttctgtgccgacgacctcggggtcagagggcgacaggcgcggccttcccgcagtggccccggggccatcctgggggtcgggggcgcctggcaccgtcggacaagcaggcggagggccagctccggccgtcgggggcctcgggccgccgttcggctcgggggcctctcctgcctgctctctcccgggtcgagtcgacgcagggtggggatgcgcggagtgagggttgtcctcgtcgcgctccacgaccaacgccgcgctgaccacctgcggggttgccgccatgtaaagtagcaacggctcatctggctccggggcgaccaggactgggggagaactaaggtacgccttcaactgagtgagggcccgctcagcctcctccgtccaggtaaacggcccggagcgtttgaggagcttaaataggggcagtgccttctctcccagcctcgatatgaaccgacttagggcggccatgcagccggtgacgcactgcacatccctaagcttgctgggggggcgcatccgctctatagctcgtatcttctcggggttggcctcgatgcctcgggcagagaccaagaacccgcgaagcttgcccgcaggcacgccgaacacgcacttatcggggtttagctttatgcgggcggagcggagactttcgaaagtttccgctagatccgagagtaaggtctcttggttgcgcgtcttcacaaccaagtcatcaacataggcctcaacattgcgtcctatctggctacctaaagaaattcgagtagtacgttgaaaagtaggacccgcattctttaacccgaaaggcattgtcgtataacaataagttcctatgggggtaatgaaagcagttttttcctcatcctccctagccatgcgaatctgatgataaccagagtatgcatctagaaaacacaaaaggtcgcaccccgcggtggagtcgacaatctgatctatgcgtggcagggggtaagggtccttaggacatgccttgttaaggtcggtgtagtcgatgcacatccgaagcttgccgttcgccttgggaacgacgaccgggttcgccagccactccggatggataacctctcggatgaatccggcctccagaagtcgcgccacctcctcgcggatgaaggcttgacgttccggggcctgccgccgcactttctgccggaccggccttgcgcccggccgcacggcgagacggtgctcaatcacctccctagggaccccgggcatgtccgccggtctccaggcgaagacatcggcgtttgcccgcaggaaggagacaagcgcgtcttcctatttgccgtccagaagaccaccgattcgtgtagtcttggacgggccgtcgcccagggcaacctccttgaccgggacctcgtcgcacgtgatcatccgctgcctcggggcggctgggacggaggtgctgagcctctcgttgccaccctcgggcttggacgcggcggcgaggtggttcgcgcactgctccatacatgcaagcgcgactttgaggttgccatggacagagatggggccaccggggcccggcatcttcatctggaggtaggcgtagtggaccgccgccatgaacttcaccaacgcgggcctccccaggaccgcgttgtagggcagactgaggtccgccacatcgaagttcacccgctccgtgcggaagttggcggatccaccgaaggtgaccgggaggtcgatatgacctagcggccaagtgtgccccggcgtcacaccgataatcagctgggacggccgaagcaccatccccggggccttgatggcgtcaaaggctgcgggggaaaggatgttgagggctgcacccccgtctatgaggacacgccccaacttcacgttgcaaacggtgggggaaaccaccatcgcgatctgtcctccccgggcaacgcacggcgggtggtcggtctggtcgaaggtgagggcaacctccgaccaccgcgcccgccgcgtcgcctcatgggtaggggccgcggccagaagctctcgcttcatggccttgaggctccgacgagaagcgtgagcgcacgctcccccatcgacggtggcgatggtggccccaggctcctggaaccctaggtcatcgtcgccatcgtcgatgtcctcggcgggggccttctgcttggcctcacttcgccggttgccggagggagccgccggggccttgccctcacggcgttcctgcctcctctcctcctcccacttccttgtccgctcagccaaacttttgaccgcgcggcagtccgcgaggtcgtggagggaggtgttgtgcacggcgcaccacttgccggtcgggcgccccctgctgggagcgccggcctccttctttttgtcgctcgcaggcctcccctttcgggtggcccgcgaagcgccctcgacggcgaggacgtgaccctcgtcgtcggaatgggccgacctctttttcctcctcctatcccgccgccctgaccgagcggcggatccgggggcggccgaagctgccacaccagaaccggtggagttccaggtccaggcctcctccttgcgagccacacggtccgcgagctgaaaaagctctgcggtggtctggggctccttggaggcgatctttttgagcatgcggttgtgccgcacgccccccctgaacgcgtagattaccgcgtgtgcggggatgcatggtatggtgttgcggacttgacaaaaccgctgaatgtacgagcgaagagactcatcgtcccttcgctgtaccgcatgcaagtccgcttcttcacctgggcgcggatatgtgccttggaagttcatggtgaactgctggcacaaatcctcccaagagtggaccgacgcgggcggcaagttcattagccaaccccgcgcctgtcccttcagggccatggggaagaaattcgccatgaccctgtcgtcacccccggcggcctcgatcccggtcgtgtagacctggagaaactcggcggggttgacgcttccgtcatatttttcggtgatggtgggccggaaccttgggggccaacggacgttccgaaggctcgccacaaaggctcgacagccgacaccaccaagcgggggcacggggggctggcccccgcgcccgtaccgaagtggcgctccggacgaggaagcgccttccgttgcgtgggcagcacgacgaccattgcgccggcgctcgatactgaggcgggcatccggccccctacgaacatcttcttgggtcggaggcgttgacgagggaatggcagacgaacggcgggtaacggccgccgctcgccgcgccctccgcctcgacgacacagagccggtggtagcagcgccagaggccttggcggcggaggactgcccaccggctcctaggcgctactgcgccgtcatgaccaagtcggccacgtcatccagccaacatcgggctggagtctctggatcggggacgacgggcgggtgacgcaagagcgcgcccgcagcttggagcgcgccctggggcgtgctgccatcgccgtagacgaggaggcgacgctccccgtctctccgtccttctccatcgctcgtgggtggcgaagtcgcggatctttcgaccccctcgagcacctcctcccgcctaagacttcggcgagaggggggcggtggagtacgagctcgacggcgcgggttctgctccccgtcgtcaccgctagcgctcggagagaggttgtgcgccactgcccgttcggccattgggctgagcgggagaagcttggcgcacacaaaagaggacgagggcttagaaaaacacacgcgccccctacctggcgcgccagatgacggagcgtggggctcctcaccgggagaccgcgcgggcccccctttgccggttcggccgggggcgctaggtgaggttctaagcactcgatctgtggaatgtttcgcgagagagcaaatgcgcaagacacgggcgatgtagacaggttcgggccgctgagaagcgtaataccctactcctgtgttctggtggatctgtgtatgaaggagttacaaagagctggagagcaagagagttcaaactctagaaaccctcttcctctttctctcctctacgagctcaggtcttctcccccctctttccccagctcctcccttcttaagtgggcaaggtcctccttttatatctcaaggggatcccacatgcaccacttctacctactcttcttttgggtggggactcaccctatcttcccaaaaaagaaaaaactggcttgcgccttcgcctggaagctaaatcacagcttgtttttgagtgaggcccagcgtcatcactcgcctgacaccggggatctccctgttactccctcattaatgggcggagatttgccatggctgttgtccgaatgaccctctgatgggatgggccatacctacctccactccgccggaagcaggcgcaacgtgggagcacggttgtctgccgatgacgtgaccggcgtcaaaccagtcacaaaccggtcattcttgtctaccacgcgtcagtttagcatgccacacgtcagcccttcttcataaaatgacttccttgtaatggttgcgatgaagcctggtatgaatctagccgggactgacgtgctaactccaggagtcagcacgccggctccggctagggacgagtgcctagaggctctcatcattccgacgggacggggcgaggcgtgcgaaaggccgcctgttgccacctaacccgcgatctgaccggtctgtgaccggtcacacactgtgacctgtcacggaccgaacgagtgtgttgcgctgcattaaatgcggcgtggggcgctcgtccaacccgcaataaacgcggttaggtgagcgccgctgtgctcacctaacccacacacgtggcgccaaacccacagggggtcggggcgccccagccctcggggccgaaacgggagcggcccgacccctcggggagacagagggaggggcggccacatcaccctcgggcccgacccccccgagggggtcaggccacgtgggtgactgcagctgccccaaacctctagtcaagatacccccggtcccatgtcaccgacaggtgtagcggcgcgggagtgatggagggcacgggagcgagcggcggaaagaggaaaaaggtggaggggagtgcgggggagctttattggggctcgggagagacggacatggcaggtgtaacaccctgaaaattcgacgacaaaaatctaaactctaaaaatacggattttcaaaaactttttaaattaattgcatcatgccgatcttattcgcctattttatttgaatttgatctcgaagtttattaatcgtgagtaaagattagttgtggataggaataaataaagtattatcgtgaccatatttggatcaattaaatttaaatatgatggaataagaattaaccctaattaaaaattcaaataaattatataaaaataaaatatgagtaatattaatctagggtgaaatcattagttgagataacacaaatattgagtaaaatgcatatatccaaaaattaggaattgtggaatcaaatttatatgggaaatacactaaaatcgggataaataggaaaagccactattcattgccccctaggtgttcggtcgcgttccctagccctagcccctcctctgccgcgttgccctcgcgccccgcgcgccgcgcgccgctccgcctcccctctgccgtcgccgtcgccatcaccgcgcgtgccgccgtcgcctcgccgcccgcccgtcgccatcgccgcctgccgccgcgccgacgtcaccgagtcgccccgagcccgcgccgacatcgccacccccgtgccacgcgtgctgtcgtcccgttgccgcgtcgcctcgagccccgcgccgccgtcccttcgccgcgtcgccgcccgtcgccgtcaagcccgcgccgcgccatgccgcgccgtcctatcgttgctgtcgcgccgtgccgtcgtgtcgccgcccatcgcatcccgccccgagccgcgcgccaccgctgtcgccgtcgccatcgacgtcccgtcgccgcgcgcgtcccatcgccgctgccgcgccgcgcgcagtctcgtcgcctcgcgccgcgagcccgccgcctcgcgccccgcgccgccgcgccgccgtcgtttcacccctccccctccttcccctctcccctataaagaccccggcccaatcccccccttctccaccccactccattccctcctcttctccctcttccccttctccacgcgccgccgtcgtcgcgccgccgcgccgccgttgtcgtgccgccgcgccgccaccttcgaagccgtcgccccggagccgccgcgccgtgcgtcgccgccttgcgccgccttcgccgtcgtcgccgccaccgccgccgccggtgagccgtctcccccccccctcacctcgcgcccaccgccgtcgccgcccggggaagcaaagagctgagagagagagaaagaaaagaaaagagaaaagagagaaaaagaaagagaggagagaaaaagagggaaaatagaaaagaagaaaaggagaaaatagaagggaaattgggggagaaattaggaggatttaggaaataaaaatggtcggggttaatcgtagattatttttggaaattcctcgagcgtaatagtatttcagtcgaaattccgagttaattataaaaatatgtttcttgatcagattagattaaaattggtagtaaattagatataattaataactaaacaattagatgaattcttatagatcattatagattatttttggtaatctctaaaagtcatcggttcacggtagaaattcggatttaattactagggattttagccgtgtattatatttaattatttagtcatagactaaattaaatcatataatatttctaggatttcgaccgatatttagcttgcgatagaaatctctaacctattatatggatataatgctcgggtagattaaattaaaaacttatgacaacaaatatttatacccgcaaaatagtttaagtcgaaattgggtttgccgtagttcgcaaatagtaaagttaataaaaaggaatcgactttcacattcgactttcatttggatttatttggatttttatttgaattctaaccgaattcaaatcaatttttgcacgtaactatagagcccgagggagttgcggatccaaccgaaggccaagacccgcaagactctgagcaaggaaagtcatcactattccttgaacatgttgatcccaattgcgaaattgttttgtttacaaataaaattgcatgcaatgatgaatatcctacttgtgattataccatgccttgattattgtttacccttaaacctttgtaaccatgtttacgtatgagtccctagtcaactatgacaattgcttagaaatgctattctagaatcatgcatactcatatttatcaaatgctatatgcttgggcaattacctttgggaaggtaattgagatgcggcatgtggagacatgagcgccacattgccatgatgttgaggacatgatttgtgaaaggagaaataaaattaaacaactgttttcgactggggtggacggaggatttgggtggtatctggaaaaggctagtaccgtccccggtcaattaaggaccgagccatgaagttaagcatgaaacgacccccgtacaaccgcacttctcgtatgggtatagacctagcggattagatagccgagcggaggcagtatccctgcatagatggttcacccctgagtgaggcaggtgcgctacggtgggacagccgttgaggtagggtcgagaggcgtgccctacatcggtgtcgccattggtaggactgccatgagtatgtgagagagagaacttaacttgaaccctaatttaatatgtgtgtgagacttctctttcccgggagcgccagaactcctctcactgctagaaacatggacgcctagagtgcatgaggatttaagttcatggagcgggtactgccaatgcgaggttatcgaaaagctttgccgtgacgtgtctcatgtgttgggacgaggctcatgtgttgggcagtcgcggagtgcgggtaaagtgtacatccactgcaatgtgagtaaaccaaatctattcgaatagccgtgctcacggttattgagcaccgggacatgtattacacttggctagactctaaattctttaacttgtgtgggatgggatattgcatgatgatttttatgctgatggagccacttcctgagaggcgggaacgtggacgtcctcagaaaaccataacgactcaatggcgggaagctatccttgggatcacaatggatggtggacagaaccgtcattgtttaatatgaacactggtattaaaacttgatcagtctatgctaggtcttaggcttgtgaaaagaattacaaaacttgctttgcgcaaaagaaccatagccatcctttgaattcctctgtcatgtgcatcattgctgtggtggcttgctgagtacggttggtactcacccttgcaaatataaaattaatcagaagcgggagatgaagcctcggaggatccctatgcctactaccaggagggagatgaagacgatggcgcttagtaggtcttagtacggtcgttgcctgtggcaatggcatgccgctgcctgaattctgctgccttatctatttctgcttttggatgtattccggaccgctcggtccgatgatttaagactacgcctgcggggttatgatgtaataattcgtattagacactcgtgtatatgcacttggtatttcagctatgaattcgtgtataccagactacttgatccagagaaatggtactgtttacacgattgattcctgttataaaaacgggggtccacagccggggtgctcctgatttcgccggcgacgtgggaggtggagagagagtgggaggggattcaaaacttgaatccaccccttgtgggctcgcggcgcgggtgggaaggcgagggcgtgggcggcgtcgtggcgacgtgggcacggggcgcggagtgggcgcgggagcagcgggatacgcggcggcgtgggtggtggtttcggcggtggttggcgcgggcgtgggcggccggaggttagggaaagggctgacaggtgggccccacctgtcagcgcccgagagggagagggaggccgggtgaacttcgggagtgggagggaggagcgggccggcgcgggaagaaatgggccggcggcccaagaaaaggaaaaaggagggaaaagaaaagataaaaaggaaaaaggattttctcagggatttaatattgcactgtgcttattttaattggttaaaattatttccaaggctctgaaaattccactaaaattcctgttagcatattttgacatgtagaacccaagaaaaattccacatgctgatttcgattattattgcatttattaatttgaggaattagctctaggttaaattgaataattttttcggacgatttattttatgaatttaaaaaaagggaggggaacttcagggcgtgacacctaagagcatttgtagtagtcctacgtggcagcttgagagcgtttataggaagtttaatggacttttagtatataatagatagaagatagattttacgatattatgatactaattttttaggccaatatatgtatgtaatttctttggctttaacctaagcagaagttaatgatagtcagaattttaaattcttgataaatctttgttatagacgcaagtattttttaccgaaggaagtaacatacttactctctccgtcccagaaaaataaatatagaactgaacatgacacattctaatacaacgaatctggactgatgtattactatgttacatttagattcatattattattatgtcgcatccactactaagttggttttttatgaaacggaagaagtaatacttaagacaaagggcttatcacttatgctaactcaagaggctttacgaaaagatttatttagaaaccacataaaattgttaaaaatgaaaaaaaaatagatgcgtaatcgatttggtatttttgttgttgttgcgtacttgttagacactgtaaccatatattgctactaacagcaaacgaaatatttgcaaataaaaaataatttatgaatacaacttttatatacatgttctaaacgattttaaacgattttaaaacaaaggttgaaaaataaactacgatggaaaaaaaaatccccaaatcaactacaaattgaagcttgaaaattcaaattttagctaatactccctctgtcccaaaatataagcattttttactctgacacggtctccgatatgatattttgaccaacaatatttataaagtcatgcatgattcctctgaatgtggacatagaaaaggtgcagcatttgtccaagatgtttggttgctcagtgggcactttacctttcatctatttaggtctgcctttgggaacaactaggccaaagataattgattttgcccccttagttgatagggttgagagaagattgtctgctacttctgctcttctgtcttatggagatagattaactatggtcaattcagttttatcttccctcccaacttactatatgtactctctttcccttccaaagtcaataattgaaaacattgatagagctagaagaaattgtttatggagaggaactgatattaattctagcaggaaatctttggttctttgggaaagggtttgtcaacctaaaagtagaggaggtctaggagtcattaacctgaggctgcataataatgctcttttaatgaaaaatctgcacaaattttataataggctctcaataccttgggttagcttgatctggtccacttattatattaacaaagttcctcatgctgatcgccctagagggtctttttggtggaaagatgttctacaatttgcagacattttcaggggattgtccacctgtaaggttggggatggaaagacttgtctgttttgggatgatttctggaataataaagtcaggtcagtaatgtacccaaggattcactcttatgctgtttctttgaaggattcagtgagtttaacctcttccaagagtatttcgcagcgttttaatctccctctgtctgagcaagccttccatgagtatgatacaatgtctgcagctgatcctttagatcaattatctgatgagaatgatgtctggtattatgtttggggaaatggtttgttctcttccaagaaaatatatgacattaatttcatgcatatacatgcgcctagttatctagcttggatgtggaagagtaagtgcgctatgaaggttaaagtttttggatggctcctgttaattgatcgactcaatacttatgacatgcttgacagaaggcattgccctcccaataattcagatctaacttgtgtcctttgctcaaactgtgcaagagaaaccacctttcatctatttttttaatgtccttttagtgctgattgctgggcacagtttggaattgtctgggatatttctcttgccttcacagatatgctgcatcaagcaatgaattcttataggtctacgcactttgtggagaaaattctttatgcagcctggaatatttggaaacagaggaacttcctgatttttcagaatttaacaccctcaatttcttcttggaaagctctctttaagagtgatctttcccttttagtttttagattaaatgtttctgagagacagtcccttttgaattggttatatcttttgtaatttattttctataataaagctatttaactgtgggggctttccctatagtgccttccctaaaaaaacaatatttataaaagtataatattttaaattaaaagagttgcgcattacgatagtttgtttaatgataaatatagtagcattaattttacatgattgatttttttttattaatagttaaatttaaaaaactttaacttatcactgtgctaaaaatatttatattttggaacggaggggtaagtaaatataagcataagcgaaaagataaaagcccattggtctgttgagggcataatgttgtcattacgacatttggctcttgacacatcatgctgaaaacgaccaacaaacaagccttgccacaactctttcgttcatcggttagcttgtcatgcgtcacccgggatcacgttcaacgtagggagccgtgtctatcattctcacgtacgatccatttgatccagtcttcacgttcgtcttctagattcgactcgactcaatgactcatccccaccactccaccagtcatcacacgctctcgtgtcctgatgccgcctcacatgcgattccttcaccaatcaccctcacaactctgcgttcttttcagaggttcggatggactgattattctcacgtaaaatggaaaatacgattaccatataattaaggggctgctatataacggaatcccgttttcgaacgagatgatttcgagtaggtatcaggtgtgatacctatcaggtattagacgattctataaaacaggatgattccgaataggtatcaggtgtgatacctattaggtatcagacgattctacacacgtttcaggtgatacctgcgaagtattatgtgaaacctatcaggtatcagatgatttcaaccacttatcgcgtgatactcacgaggtatatgtgatacctgtcatgtatcatacgatttctaccatgtatcacgtgatacttgcgaggtatcggatgatacttaccaggtatcaggtgattcctattagatatagctgggcatccccgacacgcgcagtcgcccactgcagccgtcccttgtaggcgaggacggcaacggcgagggcagaggacgggcgcggcgacggcggcggtagcgggggacagccgcggcggtggcgggggacagcgacggtagcggtgggggatgggcgcggcggcggcgattgaggcgacagggggacgggtgcggcgacggcagcggtagcgggggatagacgcggcggcggcggcagcggcgtcgacgggggacgggcacacggcggcggtggaggcgacgagggacggacgcggcagcaacgggggacgcgaatcgcgtttatgaagaggagctatcccgttgggggacggtatcccgtccctagcattcccgtataattaattcagtattaatttataaaattttgatgaataaatttgttggatttttttaagcaatttaattttcacacgaaacaccgtttagcagtttaaaaaatgtgttaatgaaaaatgatgaatagctaatccaaactactccttccgtttcacaatgtaagactttctagcattgctcacatttatatagatgctaacgaatttagacattattatatatatataaattcattagcatctatataagataatgctataaagtttccattgcgaaatggatgaagtaggtacgaagaacgcagccttcggcccgcatcaccgcggtgaaggcgaagcatgggcttttatcggcctttccaaccgtttcgtcttggaccgtcgtctgcaagccgcgagaccggcccggaaaggtggagggggccacgcacgcgccacgcgcggttcacttcacagttcacacgtcgctcgcgccgtctcagcgtggcagtttcggcgcggcgcggcgcagcgcagcgcggggagagcagcgagcacgggaaaaaaaatggtgggaaaagcagtacagtacagtaggagcgcgaaaccgaggggaaaactcgaaacgtctcccgcgctgctgctcttggatttcatcctcatcttcttcatctccttccttcctcttcccccatcgcgcgctctcgaatccggtgttccgctctccgctcctcggctcgcggcgtctcgattcggagtttggtggaagggggagagagagagagagagagagagaaccctaggcggcggcggcggcggcggcggcgacgacgtcatggagacggagcccttcgatgaggcggagctcctcgcgctcccggcttcccccgtcgcatcgcctccccgccggctcaagcggctgaagaagtcgtcccagatcgccaccgccgcccaccccgtcgtcggatccccacctccaccatctccgccgccgccgccgccgttggacgaggaaaccctagctcagttcccttccccgcccactaacccctccccacctccgccgccgccgctggatgcggatgcggctgcggaagctgctccctcccctgcactgacctctcctcctcccaacccgagctcctcgccgctgccaccgacagataccaccgaggaggaggaggaggaggaggaggatgacgggctggacccgctgttctcggagaccttcggcgccgcggggtgggacccgctggggatgccgaggatggaaggggagggcgacgaggaggagatgctgggtggagggctcatcgaggagctgcgcagggagaagtcggcgaagaagcggctcgacatggacgagggcgaagaaggcggcggcgaaatcg

SEQ ID NO: 22961 - DNA, 57241 bp, Oryza sativa
atcatttatgccgagtgcgcagccagtgtacaagcccatctcatcagtccttgagaagatccgccttcggaaactagagattctaaagaagtcggtttccctgttgtttttgtgaggttacactgagaatttcatctgcaaatatttgttaactgacactattttcttcactatgtttttcaggtcagctactcctaatgatgatgatgacgaagaagaagatgatgtctcttcagatcctgtgagtggtaccgctggcgatttaggtgcacctcaggttaaggaggtggatgcagaaggcaaagatccgaagattgtgagtctttattgtagtatctttgttcacgggtgtcatagcacttgtgaaactaaaatctgtcttctgattgtaggacgatatcgagaatgagggtggaatgaatagcggtgacgtgaaccagtgtgacagtgtacctgagaacaaggtgagcattgctttcaaccttttcacttgatttacatgcagatgctgttttgtgctgtaatgatactgttgcttgtttgcaggatgctttgaattgtgataaggatcttgataattgtggtagcaaagatctagataaggtctgtgcccttccaaattctgtagtcaacttgtcatttgtagcagaatttctgtaatagtctaattgggtgatgctttattcataaccagtagttgcttctactttgttctgctaatataaaaacaaattaattttcaacttaagcataatcatgaatgctagtaaaggtagtgggtcatttgcccatattaggaagtttacgtacagctgatgacatggttggcatttctcgttgtatagaaaacattaaatgggtttctactttctatggttataaaatttaaaatctcattcatatttgtgtgcaaggtttggcctgttaactattgaatgcttgatgctaccaggaactcttggaaaattctcaagataatcttgaggacaaggcccaatcaagtgacaatcccaataatgctgcagatgaaattcaatcacccccctcttcaagccctactgagagtaccgatgacatgtaagtacagcagtctcataaattttccatctcttaccatttacctgacctattttatccctttaaacaatattctatctgtaccaaatttatagctattgcacatataacatacagacaaatgtagaaatcttatggcatttatggtgtaaattaaaacttgtcatggctgcgccaacagtacatattcatttttctttagcctcaccatcattaaactgcctatatagcgcaaatgcaaatttatttgagatcactctaccatgaaggtgccattatttcttattattgttttactgacaacacattacccaattttctggagtaagtattggtccttcacatctgtgttctgtgagatttggcagttctttccccccttgcttatgttgatgttctgtaacttaaaattgtgttatttgacccagttcatcagaagatgaagaatacaatgataaggagaacattgctcctagcactccgaaagatgatgtgaatgttcatgaaccactccaaagagctttagcaggggattcatgcccagatgatgctatcttgaaagattttctggatgttgaagctgaggaagaggatgacagtgacgatgacatgatgaggtttaaggacaatgaagaagatgatggaagtgatgaaaatgaagtattcaatgatcttatagaagctgggtatgaagaaggagaaatagatcatgagaaacgcaatgcgctccaccaaaagtggcttcagcagcaagatgctgctgaaacaaataaatttatgcaaaagctgaaatttggtcaccaggagcaaaaaaaagtaatggatcaagatgaggatgatgctgaagactgtgaagatgaatcagaaaatgaaatgtcatatgatttgactccaactaatgtcgtgcgccagaattctgaaaaagcaaaacaaatgattgcgagaatgttcacagatgataatgatacttatgagcactctgatgatgaggaaatagaagaacatttggctcgccaacgtatctcaaagcgagaagtaagtgctaacttgttcagataatcaccaactattacacatcactatatttactttcaggggcacaatatgtacctgttttaggatgtctcatgtttgattgtctggcatggtttatatagcactgaaattgaaaattattgatgatatttgtagtccttgctatgctagtgtagaattagcttttcaccttctatgctttaccaaagtaatttaagaatgttgcaccatatcttcttgcaggttcataatagttcattcatatctccactggagaatgacagctcaagggaagtatttagtctgataaagaagctcaatattgctcctcaacccaagaggaggggaaagcaagtcacatgtaagggtgttttcttctgaatccatgcctacctttattgagaccttttttcttgattacaatcttttgtttcaatatttcttcagcaaatcatgaattgcttacggttgggagagacaacagcgcttcttcaaaggtgcattattgattcccgtttgctgttctacttcttacacatgaatgcacctgctgaaagtttttaaagtgtcgtgctgcttcacatggcaaaattgcaaaatactgaatacctgagtaacttacatgtcatcactagtcataagtcactactgtataaacgagctcttataccttttctgttgccattgctctggtatttcggacaaacagtttttcttgtgtttgctcatgaaatgacgttattgtatgttcctttcagtcatcttttctcggtcgaacagccagtggttcattggcatcttcccacagatcggcctatagaacctatgtatttggtcgtgacgacagcaatagtagcaacaagagttgcttgtctacttccgagagtaatgcagatacggtaagtttgaagggcaaggtgaccgtacatccacatgctctgagacattcttttcgctgggccggcgaaagccggccggggtatatattaagaaagagagagtttaagcaaactgtacatacaagaaaacatgctctgagacattcatttcttatcttagcattctcatgtgcttttgcattcattttgcagtatcagacgaattccagccaaccaaagaaagcaaagttcagtagttcacagtcaaaacaagcggcaacaaaaacaaattccaagggagataacagttcaggtgtttctctgattgaggtcctgcgcagatcatcctctacttcagacaaacaagagtatactcgtcaggaaagctgcgctgttatcacagaaagccaggctgcgcaccagttctcggcattcaaattatcaaggaggttttccagggtgggagcaagaaactgatatgatccctcatcctcgcttcctttctcacctgctattaccagaaagtgaaatccatcactgcgttttttttccttgagtgcctttcttcttagagtaactgttcttgtttgtgctctgtaaaatttgtatatctgattttccatatggtcttgacttcggagataacgtttacattctgtttaaagtgcatcagttcacacaaataattgtttgtgttggtatactaagggcccttttggtgcagattttcagaccttacttttacgagaaccattagaatcccagcaaaacggacaatatagccacatgttacagactatttataacttgctgttgaatgtgctcgtaaacaaatcgaaatttactgttcggcttttgatacaccttgactctcaatttattgggcttaggcgacatgaaagaaaagatctattgggcccagattgatttaagaaagcccatttaggccactggtccgcgtcaacttgcccccaaatctgggcatccgcgtcagcgctgcgcctgcgccgctgccctcctagcccgaaacagcgcagccacgcacgcgtggaatttctagggttcaaatcaaatccaacctcaccttgtcctcctctcctagtctcctcccctccccgttccccaacaagcaaccctaatccatccatggcggttaatacttcgcgcgcatagatactaatcccatccgcgcgcggcctcaacatctcaacctccggccagcctcgcaatcctgctgctatctcgggtaagaggattttattattatttttttgggggggattcaatcgatccggcattgcgttctgcgagtttttccccatttctgggtgggggaatcccgaaattgttgcggtctgaggctgaggatttttttttttggcggtggcagcggcggggaggaggtgatgagatcttcgggagcgcgtctcgcccggtcctaagatgcttgccggcggaggaagcagagttagcggcggcggcggcggcttcaacctcgcctcctacaagtacaaggaccccctcctcggacgcggcggccggagcttcctgttcggcaacacctggttcctcctctccacctacccggcgcgcctcctccacacagcggaccgccgcgcccccgccgccttcttcgcagccatcaaccggactccctgcgtgcgcacgcactgcacggggcagagcttgctgcagaggggcattgttatggctgcctgcggctatgcgtttcgacgagctgagctgggcgccgccaagcgccaacctgagaaggattcatctgtagggacccgaatctcatgcgtcgtggccatggggtcggctggcagcacgccgaggccagaggtctcgtttaggcatagaggggtggagtactgcaagaaggtcggcgtgagcttgaagtgccgcgagccgtggggacctagcagagcattttggaccaatgcgattgggccaagttacaagttgagcttctcggttgaaccatggcttcgggatttcagcacgtcttgtgtggcgccatactctgctggagccacagagcatcagttgtcacttgatgaggcagtacaggataagcagatggacaactccacagtcgggcctgatgggtatgtgtcgtaacccctgttgcaaatgccattctaaattccttatgactgtttcctcctagaatgtttgttaacttgatgttgaacaaatatcagaacgcatgtttgaaccggaatgaaatgtttcctagaggtgtttttcgggggctgaatcctgggcacgtccatgggatgggctggggttttgggtcttccaaggggccctaagtgtgataaaaagtggatttctatgatacagatcataattccatccaagtctgcactacttgctttgattgtttgcaaaacatgctcttgtataagtatatatgcatgtatcctattgcatgaatgtctcagactggatatatatgggtttgtttgccacatgctgattatactgttctccattttaatctacaatgggttcatattatacacgaatgccaccttcagtcacatattgtgtcttatcttcaccagcatctataactctacgtttaagcacagaaccaagaggtgacaatataattaaacggacttgctaaaaatatgtcgacaattttttgggctgatctcagtcggcttctctgtgcgtccgattgctctgcacgagtctttggttgtgcttgccggaccgttcgatttcttctcaaaatcatctcctataaagtaaggactgcatatgcttttgctttttaacttttccaatgtaagatttaaatttacaccccacttacatctcacttacacaccacttacatatgtaattactatgtaattttaggacttacatatgtaattttagaatttacattgtaaatacattaaatttatatatgtaatttagtaacttacaatgtaaatacatgctgactattttttggtaaaaaatatggcaccataaatatagctactccctaattaaatgaggctaatgtagggttttttataaacctttattagttgttgcttttctactatgtggttgatgtcaagcatgttagataatccaaataaatgcgaagaaaaaggaagttgagatgctgtgaaatggatcatgatagatgttggtgggagaggaaaagaactatcatgttcttaatggccatgtttccattttcctttgcatatttttactgtatctgactgaaatagaaacactgttagttacattgctgttcttcatgttaggtgttactgagtagactcaggcacgtgtattcttttcatatacgaagtagtacttatttttctggtggtttctttgcctcttctggtggttgactgtctttcccatctgcagaaaaccacgtgctcctggaccgctgaagctggtctcaggttcttgctatctgcctcaccctgctaaggaggcaactggcggtgaagatggccattttatttgcgtcgatgaacaggcaattggcgtggcagatggtgttggtggctgggcagatcatggtgttgatgctggactatatgctaaggagctaatgagtaactcaatgagtgccatcaaggatgaaccacaagggaccattgatccatcaagggttttagagaaggcttatacatgcaccaaagctaggggatcgtcaactgcatgcatcgtcgctcttaaagagcaggttaaccagctttcctttgtctgatgcttagtgtagtccccttccattgccatttttatgacttggtgaacagtagtgcacacaaaattgcaactgagttcttcactaaaatcacgttgaagttattcttgaatgtacatcttgagtctatgattctatgaatatgattctagagaacatctcatccacggaaaccacaataactggataattctttcatgtatctttctgtctagtgtagcacaatgtttcaacagaactagaagttcacagttctgatttctggaaaataacgaagcagatgtatttaaacatgcagggtatccatgctgtaaaccttggagatagtggcttcatcatagtcagagatggtcgaactgttctcagatcacctgtacaacagcatgattttaatttcacttatcagctagagagtgggggtggcagtgatcttcctagttctgctcaggtgagtaatcacccttcttgaaattttgaactgtctggtttgagcaaacatctttgaatcttcgttgaatgactcctacgttctttatcatcaataatattattgatgtctcatatttggttatgtagacattccactttccagttgctcctggcgacgttattattgctggcacagatgggcttttcgacaatttgtacagcaatgagatcagtgctatagttgttgaggctctcaggactgggctagaacctgaagccacagcaaagaaaatcgctgcccttgcccagcaaaaggcaatggataggaacaggcaatcaccctttgcagctgctgctcaagaagctgggtaccgatactttggtgggaagctggacgatatcacagttatcgtatcatacgtgacaagcgcctcagctacatgatgcgagagcctttcctttttgatgtaatgtacataaccttgtcccagattaatggagctcgtatgcaccaggagtggatggctagagtgagctggcttgctggatggtgggcaatctcctgataccagactacttcctgtaactagatgagtaccaatccagagtaccgttgcattttagattctgaattggtggtggaaaaccatgcatatttttttcctcatgtagtactacaagtaaaagataattcttcgagaccatggtggttttctttggtaagaagaatcaccacttggtcgaaaacgagttttgttgtaagcactatgcaatgttgaatcctagttaacgtcgttcttgtcttcttgttctgcttgctgtgatgtcattctatcctttagccgtgaaacatattataataaacttacttgaattgagttttcagcatctctctttagcttggtacgactcaggattcttatccacatattacaaaccatgcctagataacttatttaaaagaaaacatattaaaaactaaagccaaagaacttatttacgtttgagttttcagcatctctcgtgaacttgatatgagcatattcttgccagtagcagaaaaatgtcgtgtaatacagcgagatattaaaatgatgtttgtatttccataatattattgatcactgaaccatcaggactcaaaaactgtccattatcgcaagaagtccgcaactataataaggctcaggtattacagaaataatatcaattggagtacacacttctcggtggcttagccacttaactaatactaactagctgtaccgcttgacaatttacaggtccctcacgaaagcatgaggtgacgaaaactcgatatcacacacgatggtagctccagaaagcaatgaccaacaagctgatggtgatgggggtaacaataagcggctaaagcacatcgtctcatggtctcagtagagtagagttaacctccagttcatgttctcaatcaatcaaactaccctttgctgtcatcatttgtgtgcttatttagctggctactgctaccatggcggtcttttgacgtgtcaatcttgacgctcaaagtggctataacactagagccctcggactgcaccatctcatcctgccaaagccccaaaggttcatagtgagaaactgagaagtgagatgctagctattacaaggataactttggaacatagggtagaattcttctgatatgatcacatggcaaaatacgagtaaagaggggattggtgttcaccattagctgcgaattttccgcttccatgtcttcacagtccttcttaagcttgtcgagttctgtcatgagtgtgctgtttacggctgtcagttcagttaccttctgggacaactcctcacattcttgctggcagtgtaacaagaatacataatcaataagaaagctttgttagtcaaaaaaagaagaagaaagctttgttttccataagaaaatgtggaatttgataaatctaaacttgttctataccactaactagtcatgaaaaatggctctctcattgacctagaaaatcaaataaattgtgtcccaaggtgccagagtggatgaccgaatgtgtttgtgaaatttcagatttgtaatttatcagttcttaaaatgttataggggcagcctggacagcaaggttaacagctcaaccttccaaatataatcaagccaagagtcccggcaacagtagaaagcatctcaaaaataaaatatatctccttacccaaggtttatagatggttggtaactttccctgagcaagtattttcttacgtttgtcaggccataaaaagtaacaggatagtttggcgggtgacagaaagatgtgggtctttcctggatcataaatccaacagtggccatttgagatgtcgcaaacaggataacatactaccaagatgcagcattctcatgtggcaagaaactagtcttatctatcagagaccctacctgcttccgtagtctcgatctcctcgcagactctctgttagattgttttctcctctccctcttcagttctcgttcatcctgcaaaacaatgatatttgcttacgaagatcgtggtaagcaggaacactttgcactacttaatggtgactacaaaacgttcatgataattaactgccagcatatgctcccagtttatgggataaacataccatctgagacaaagccttgtctcgccgcaaatgcgtcccagcattcacctccacctgtcctgagggcatggcggccattgtagaattgctccaaatatccatcccgatattcaaattcggtgccgccttcacaggattctgctcagacatggcagcagcctgagatgtttcacctgaaaattgccaaaccatctcattctcacacacctcaactgacgaactaatccttgtataccaaagagcattacgactgcgaaccttctatgtctggatgacccaattttctccactttgcaggtgacaaaccctgaaaaaaaaggtcatcagaatcaactaaaataaccatctgaatacttctgaaaatagctccatatgttttgattttggcaatgctcaagaacgcaccttctcgtcagcatcatctctcctctccgatgaatcctcgctcccaccgtcgccactgtaaacaccactattaattgagagctctattcaccaaccaaacagacacgcaaatgcaaacccaagagacgtacctcccggaggagtcctcgccggaggggccaccggaagtcttcctcttgctcttcccttccgccgccgcagatggcacggcgcaaccagccatgggaggcacgctctgcacagatcccagcaaaccattctcaagaaccgtacgtcgcatggtcaccactggatagtcgaatccgcgaatcccatatcactacagcgaacaacccgaatttaaacagagagcggggtgctcggcattcaccgcggccatggacgcgtgcgcgtagtaagctccagggtggtacaacgggaacggcaccggcgcgccgtacgccgccatgagatgctgctgctgctgctgctgctagaaccctaatcaaacactcgacgaaaaccacaacgcgccgagcgcgaaatcccaaaaaaaaagggtgcgcacgtcaattcacgtacctgcggcgggggccaggcgtaagggtggccaccggcggcggcggcggcggccgcgtagtacgcctgcatcgacgccgcccactccgcgtgcgtctgcgccgcggccgcggccgccgacgatgatgccgctgggtcccgggtgtccctgtccccgtcctgccgcgctcgtcgtcggacttggacgaggacggggaggcggccgaggatgccatggcgcgcgggagacagtggggtctgcgaggcgaggctcccggcggcggcggcggcggagcagcgagacgagagcggcgggtgtgtcgtcgcgtggcggcgcgtcggtttggtttgggtgtattgccccccacgcagcgcgcgcgagccagaggggatgacacgtggacgggcgcgcggtggggggtccacgtgtccgtgtaggtggcgcacgcgcggtgcgcgagtcgggtcgcctcgcgtcgggcccacctgtctgttcggtgcgtgaggtgatgtgtcggacactgctggtttcgtgctgacctggggggagttgcacgaattgcgaggcatgaagtgggccgttcataggcctgtacgtgggccctcgattagccatgttggccaggcccgttctaagttcaacgctaactcgctaaccattttttttctttttttttgatttgttatttcacttgcgccagatttttggctattgtctttcactttttcgtccgttggattttgcatcattatttgtgttcttatatattcaacttgcgtcaaaattagatccttacaattctctctagatttacaatttttgacatgttttttttattttaaatgggttatatctattggttaaaagttctgcaagatttgaagatataaatctatcgaaagattaatagttagttttttttcactttgtacaagcattttttactcatagaaatgactactaccctcttgattttcagataagtttgaccattcatcttattaaaaaatatataattattatttattttattatgacatgatatattattaaatattttttaagcctgacttattttttatattaaaaaattaaataagataaatagttaaatatttataaaaaaattaatgacataatatattaaaaaacggaggtagtgtatgcaagaattttccgtcatacttcctgttcggataagaccacaaccatttctcaccctgaaagtaagggaagaagaaatcaacgccgaaaatcactgtcataattaatttgagaactagaatatctttatgaaaaaaagagagagttaagcaccgaaagattcaacagaaaaaaatcaagtcaaaggcgaagcggaggaaacttgcaaacaaaacacatggcacccttgcatccgtcgcgctcgtgaacgccatcacccatcagtttcctcgtccttgcctcgcatagtcgcagctcttctctctctcgctcgctcgctcgatccgagcaaggtaaccgcagctgcaagcgtgcggttcttgcggatctcgcgcgggctcggctctgcgaggaggagctcatcccccactgtcccaatatgaggtcagttcttgattctgtcttgtaaaggtgatttcctgttggatttcaggtccactcctatagtgcgggggccaattggttggtatcgctcgttcgccgcatctgaaaaatgcgtggttggcgctccaggagtaaattagtaggctgtctggatgagttgatggtgttgattccccctcctaattagaccaatggacagttttcgttgttgtttgtttctggttttaggcgttttttcgctgaatgagttggtcctagataagatgggggttggggttcttctctgaccactgcctctgagtggatcagaatcttttgctgatgaaagcaaatgcagatgtgtccttgaacaatgcgtttaggtgtccaatattcagggaatattcttgctcatgcttgggagtccggcttggatttggaaagatcaaatcgtgtagtattcaaggcaagaaaggagcgcaggataatggctcagtgatttttaaggtggttttactgattttgattcagatgcacaagtgtgggagtgccatattgctgtatggatgttaggcttgaatatgaaacattccaaccagattcaggaacgttgactgtattatgaattcttcctttctccaccaaatgaaaatcaaatatatatcttatcatggcacctgtgagcctgtaatcgccaaggagtttgtgcagatctgctcctatgatacctcgtgccagatattttatgtaattctctgcgaaacataaaagcattgtccagtactttttcatgaaagatggggaagaagacttccgattcttccattgttccctttttcttctggatgcttaaagtgcttaaagagttaaagtgaagcatgtcttttcacagtgaccaacaggttaaccaccatccaattggcttggtcctaagtttcagttccatgagagacgtcgagttaaaagctagctaatgtcacttggagccctatatactcttttactgtttcatctataaagctttaagtttttttccttattatgcgccttttcattttcttgtcatattatcatatttagagccaaaacatgcaaaaagagcaaaaaggaaatccttttgggtcatatgactactttttatatgcggagtaaatgtgattacattgacggtgattaatgttcattaactatgcagtacttttgcaaaaccctgctatataacttaagatccatgctaaggagtgaaaattagctgaataggattgaaccaaaactatctctctgtttgaaaaatatccccaggattacatgaaattcatcaataaattatccttggtttgttttttgtaaccattctctaacatatgttcttctttcagggcaaagaagatgttttttggtttttccgtttctcttatcctcatcaacctagcttccataatggagcgggctgatgagaatctccttccggcagtttacaaggaagtcagtgctgctttcaacgctggtcctactgatctggggtatcttacgtttctaatgaactttctcaagtcaatagcatctcccttggcaggtgtccttgcacttcaatatgatcgccctgcagttcttgctatagggacagtcttctgggctgtatcaacaggggctgttggtgtcagccagtattttcagcaggttgcattctggagagctgtgaatggtcttggactagccattgtaataccggcacttcaatccttcattgctgatagctacaaagatggtacacgcggagcagggtttggcttgttaagcctcattggttcaataggtggtataggtggaagtattttagcaacaatcatggctggtagggattactggggattgccaggatggaggtttgcatttctaatggttgcatttcttagcttgttaattgggcttcttgtctacttttacacggttgatcctagaaaagtgtctccaagccattttggtgatgacgaggaccaccatgagaggtacggttctcttcacgttttacaaggaactcatcaatttccttttaatggcctgaatgataatgcttaagtagttttatcatgaaggcatacgtagtaatgtagtatacttgattgtcaaatgttgatttccccccatattccaaattttgaacgttatacttgaggcttcctcagatgcgcctcctgttagctgtaaaattcctgagctaagctaacgtcctcggtgacattgacaatttgatccgacattagcttccatttagttatgtggtaatggtagtatgtgtgcattacctatgtagatataacatttcaacgtaatgtaaatgacaggtcgcatttgatcggtaatggtatttttcctccacagtccatctggaaggattcctggatagcagcaagatctgtcatgaaagtgcgaacatttcaaatcattgtcttgcagggcatagttggctcattgccatggactgctgtagttttcttcacaatgtggtttgagctcattggtatgcaaatatatagacatttatacaatatttgaaattatttccttcccgtcataagacattgacactcttgaactttatcaggttttgacaatagcagttcagcagcgctaaacagcatgtttgctatcggttgtgccagtggatcatttctaggcggagtaattgcagaccgtctgtcaaaatactatcctgattcagctcgcatcatgtgtgctcagtttagcgccttcatgggtatccctttctcttggatcctccttacagtcattcctcagtcagtcgactactggtctgcttttgctgtcactctcttcttgatggggattaccatcagctggtgcgctacttgcgcaaacaaccccatgtttgcggaggtagtccctcccaagcaccgcacgatgatctatgccttcgaccgcgcgttcgagggttcatttgcctccctggctgctcctgctgttggcatggtcactgagaagatctatggctacaacgcaaagaccgtcaatctggaaaatggatcggtagcaggggcgtatgcactctcgagggggctattgacaatgatgattgttccttttggcctgtgcttcttgttctacagcccactgtactttgtgttcaagcgcgatcgagaaaatgttagaagattgcctagtgtcaaggagcaggagctaatatgattatcaaatgcttgctcgtaaggggtgataggggtttagtgaccaacagttactacaagtatctgattttcggcaccaactgaaaatttatgttcagagttgaaatgttgcagttgagtaatacagtttccactttcttcaggcagataagaaaaccacagaaacacacgatgaattgttgtataattattatatcaagagtcaagagggaagcaaaacattgtctgtcattttcttctaacttttttgtagataaacggaaagcttttaatctttctgcttacttggctagggaattttcttgtaaacctgaactttacaaagataatcatccgttctagacattgctgacattactttctggcacacaggttatatacattcattatctacaaacaagttacattcattcatcagtactagaaccaatttgacattgtttattgtttatatttttttttgtttattgtttatacttttctagtgctgtatgtgcaaagactgagcagaaggcattcagccattttgcatgaaatagctccagcaagctgttctaatttccatgtctgttatctggaatattccgtcatctgcagttctatattcagtccaacctcagtatcaaccttttcaaactatactaatttgtgtagccgtgtaagagaagaaataaaggaaaggaataagaaaaaaaatctattaacttattaaagtaatagaaaaaaagccttcacgttcgctctcacagtttagaaattctcattttaatcggagaaaaataaaaacaaagtccatatagaaatacaattttaaaatagctaaaatttgaaattaaaaataagaaatattgaaacagaagactagagtccataccggtataaaatttagaaccaataaaaattcggaattaaaaaataagaaaaaaaataaaagtagaggttagagtccatataaaaataaaatttaaaaataatgaaagttcagaattaaaaaaataaaaaatattggaagaaaagcctagagtttgtatagaaatacaatttacaaataaagaaaattccgaattttaaaaataaaatattggaaaagaagtctagagtaaaaaaaagaaattcagatattcatatgtacacaacacaccagggtttcccttaccgccggtaaccgcggttaccgagtttaccgcgggggtacggtaatataaataccgcggtaacctccttgaattcaaataaatttaaaaaataatttaaatttttgataaattttgcacggtttttcacggttactgcgcggtaaccgtgcttaccgccggggcgcgataaccccggcctggcggtttgggaaaccctgacacacacacactaccttataggttatagaagccggtatatatgtcgatcaactgggaataataatccatgtggatatgcatatggccgtaatgatcagttgatatgatccgttggaaataatccacgtggacgtgcatatactatatgatgatcagttgaccatatgatcggttaggaataatccatgtggatatgcatactttaataatcagtttaccatactatcttggaatatataatatatacatggatatgcatattcctacgtaccttagagcacgcgcaaattgttgatcattgagaaaagttcaacttaatttctatatatactactaacatgatgccttaatataattggcactgatcgtttgattggcactagcttttgccaacctgtgatgctcatgttctcttggtccgttgatatctcggagaactaccgagagaccgagtcatgtcggcgacaggtctattccattcttcgcgcatgcctatttttcctatatagtttatacctattgaaaatattaataattcctataaagtaacacatacacaaagccacatcatcaatatttttcttatcattagattggattagtatgaagatagcagttatgtcatcaagaactacttaggatatgtttgacaggatagaaaaatagaggatcgagaagatacgtaatacaaaataagccattagcacgtgattaattgattattaactacttaaaattttaaaattagattaatataatttttttaaagtagttttctatatatttttttttacaaaatacatcatttagtaatttagaaagcgtgcacataatgagttttttcatcacgacaattcttcacgcatctatgatttttcagttaattattgagtactaacttaaatcaaataggtcattatcctctaaatggatcatcacagtaatgttgccaaatcacaagatcgcacacccaattgatcactcattatggcgtattccgacaaggagaacagataaaagaagaaataaggaaacaaaatgtgcactaacacaagaacttgggcaatgttcttgtgttgtttatcttggaatcaaaagctacaactcgctatgactcactcaccaattaccattcttaactactgttattttagggagagtgtttaacacccctcgatctctaacattccctatgcggaaacacacacattcatgcacaccactaatggctgacaattactacttctgaccactcatacttaggtgtacatgcaacgaggataatgctcagccattgcaaacatcgattggtttggcaagtaattcctttcctttgcatctggtaccagtaaaaatggccacaaattattcccatatatatataccaaaaggatatgcacccatttggctataaaaacacaaccaaatcactcccccatctctgtaccaaactcaattttagaattcagagatccaataaccaaaagcaagaacaccatgagagccccatccttcttcttcctctccctcctcctcctcctcctcctcatccacatctccatccattgcaatgctgcagattcccagctaggttcagagaaggtcaccaacctcctcttctacctgcacgacaccctcagtgggaaggatccaactgctgtcccagttgctcgtgctgagaacgcgtacccaagcctgataatccggtacccttcagcacgatctatgtggtcgatgatctgctgacagaggggcctcagagagaatccaaggtggttgggaatgcgcaggggatgtacatttcgacagccaagaaagggctcacgcttgttcttgggatcgatttcgagctcactgatggcccctacaaaggcagctcgttcgtcgtgtactcgcggaacccggtcatgcaggggaatggcagggagctcgccattgttggtggccgtggtttgttcaggatggctcgaggtttcgccttgcttcagactgtttatctggacaacgtgaacggcgatgcgatcatagagtataatgtgactctcttgcaccattgagttgtttttttttttttggaataagagttgagttgttttagttattatgcccgtgctttccgttgtttggagcacaataagtgtgatctgtggttgggtttgtcaggttatgttttccatttcttttcttttgtttgtctactctccaggagatggatatgtcatggaaattcgtagaaatgtttgcctggttgaatctccattttggatgtgtggaactgtgaataaacattatgtttgctgttttcattaaggcgcaattgtgcatctgaccctattttgaaggctaactttcaatttgatcatgttttctcaactttgctcatttgaccatgcgtttcaaaaacagagacatccattttcagtcccccccccccccccttgaaacaccgataaattctcatgttgtgcttgcgcacgaagttctctctgatcaaggccttactttactgctaacacatagcactctagtctccttttccttttggatgcagatacctgttcttccttacaagcatgccgagtaaaaaaaaacataataataatcaatggtaagctgatcttgttcttccctgattattgtgatatttgttttgctccatctcccgtatatgaaatttaacatttttcttgagaatccaatcactcccatggtagtaaacctcattgcaaattgcaaacacacttaacacaactataatttacaattgaaccagtgattcagtctagaacagagtatagcatcatcatacagagtagtaatttattattgcttatgcaaactgttcagtggtacatatagggtttattcaggcagagggcacagcattatatgttttccattcctctcacacagaatcacaggaatcaggctcctcctagacctggatctccacggtccatttgtacaactcatgtgccggcacggggacgtcgagcgcgacgagccccgtgtcggcgtcgtagctgaactccacctccacggcgtccagcgcgcaccgcgccggccgccgggaggagtaggcgccgaaccggccgcagccacgggccctaaggcgcacgacggcggcctcggcctcggcctcggcctcgcctgcggcgtcgagggcacggacgacgtcgcattcctccaccgctccgccggagttgaacatgtcgagcaggccgatcggcgcgaacgtaacgccgccgccgccgccgcccggcgccaccgtcatgacggggcagacatggaacagctcgaactccagcaccttgagcgtcaccggcagcgtcgctcccttgggcaacctgatcagctcacctgaagcaaaaatcatggcagtatggcacgtcgtcagagctcgacgatggcggcgaggacatgttctgtggctggcagagggcactgacctgatctgtgggcgtacacgacggcgtcgccggtccagcccgtgccggcgacgtcggcgatggcgtcgacgtcgtcggcgcggactgacccggtgagcgtccccggcgccgcgtcgtggacgcgcgtcttcttggtgatccggcaccagccggcgccctggcagttgaacacgcccaccacgccggtgcacttgttcacgttccatatcttgagcaagctgcaccaaattccccaatggccacatcacatcaaatcctcacctcacccggcttgaatgctcgatcgccatggcagaacggatgctgctcgcgagcttaccttgcgccgtcgcgggccgggtcgacaaagaggcagtcgcgggtggggcggccggggagccgtgcccggagcacggagccgtcggggaggacgagcttcttgagcagctcgaagttgtggttacccggcttgtcactgaaatttcagcgagacgaacagatcagatgagatcggcgtcaaaattcagaagtcacacgacgcaattctggctcaagattgcctctgcttcaggcaagccggcgtatgcgcgtgtgccgatggtgatgaccagtcaggatggcggcgatgagccaatgtttgtcacatcggtgacagactgcgcgctggttggcatgccatgaagcaccggcaatcattccagatttccgtccatggagggatcatccaccggcgacggcgaatgaatgcgagttttgagcctcacctgacgtagatcgggcagccgccgatcgcccgcgccgcgccgtggtactccgccgccgggtgcaagctctgcaagttcatgacatcaccaccaccaccatcatcatcatcttggattcaggaacagagcagtagattgagcagcaatggcgacgaagcgtatacgtggaacatgtcccagtcgggctgcatgaactcgccgaggaagagggtgttgtaggcgacggaggagatgtggatggtgtgcgacgccgggtcgagagggtagaagtcgtcggaggcgcgcacgacggcggtctgcctggcgctgtagagcatgtcggtgttgtggcacatgcaggagatgcagccgttgtcggggaagctgcgcgccacggacgcctccagcgcgcggtggaacgcgcgcgtgagcgacacgcggccgccgtgcccggcgccgagcgtctcgatgatgttctgcgcgtccaccttgacgccgtcgacgccgcacgacgccaggtaggcgtggagctcgccgtagaaggcgagcgccatgcgcgggtggacgaggccgaggccgagcacggagagggagtccatgacgatgtccggctggttccccatcacccccggcgactgcaccgggaacgccaccgcgctctcgtagtgctccatcccctccgccgccggcttcacgccgccccagtaccccgccatggcgtgccacacgtacacgtacttcaccccgtgctccttcttcgcctcctccaccaacgccttcagccccgccgccgacgccgccgtctcgccgccatccgccattgccgtcgtcgtcgtcttctggaacttggtgttctccttgatcccgatcaacctgctcgcgaacctgcaacccatcgatccacacttgttactgcacattgcaaacaggaaacagcatttgctgccaaaatcacgtactgggcgccttcttggacgacggcattgccggcatcctccttgttctcgctgccgatctgctgccacccgtcgtcgatgatcaagaaccgcggcggcgtgccgccttccgccaagctgcacaccaaacacatcccaaattcagaccaaaaccaattcaaatttcatcaaatgaaccgaagcgaacctttggaggccttgcttgacgccatcggcggtgacgtcggtgtagaaggcgtcccatgtgcaccacccgaaccagtccaagaacgacggcaactgcatgcgtagcgcacacaccaatcaatcaatcaatcaatcaatcaatcaaattcattcacatcccgccgcgcgacgcaaccgcaacgcaacggaaagcgaaagacagcgccggcgccggcgccggcgcgccgccgcaatggtgtcgctgtcgcgtcaatcaacaccggaagaattagaaaaatatctcacctttttcttctcccggtggtggaacgtctgcagatgcctctccaccaccctgcaatttctcaccgtcgtcgtcagagaaacaatcaaatttcacctggatctcaaccaaattttactactccctccatttcaaattataatttgtttaaacttttttctaagtcaaacttttataaatatgtccgagtctacagaaagatttaccagcacttacaataccaaattaatttcattaaatctaacatcgaataaaattttgattatatgcttgttttgagtttaaaatgctaagatatttttctctaaactttatcaaagcttaatactccctccatttcatgttataagacgttttgattttggttaaagtcaaacgatttcaggtttgactaagtttatagacaaatataataatatttataatgctaaataagtttcattaaatcaataattgaatatattttcataataaatttatcttggattgaaaatgttactactttcttctacaaatttaatcaaatttaaagcagtttgactttgaccaaagtcaaaacgtatttgttctaaacaaagggagtagtatatttgattagaaaaagaattcagtgaaggtgagacacgcacttgacggcttgggtgatggtgtcgaagggattggccccggcgtgcacgtacaccatgtacgtcccctgcgccgtctgcaccgccttgtcacctgctcgccgcggcgtcgcgtcgcagccacacgcatcacatcagaacggagacggagacgacgagaccgtctcgtgcgcaagcaaaagcagcacaggatttgggcagtatggcttaccgctctcgatgcagatctcgagctcgtcgcggtcgttgccctgcagcgccgcccggaactgcccctccagcagcggcagcatcacgacgtacaccgcctcgccgccgccgccgccgtcgcggctctcgaggagcatgaactgtgtctccagcgggacgtcgcggccggacgtgcccatccgctgggtcatccaccatagcttgaaccggaagcagcacatgaacctcaaatccctggtaaaaaaaaattcagccaattcaatcaattttttcttgaaaattttgttaaccccaacagtaaaaaaagagagaagagagcagcataacacaaaacactttgttattaatgaacaaataaaacagtaaacaaatgtctaatcaattttacgaaattgatattcaaattattcttttacgaaatagaaattcgaaatggagcttgaaacgggagtggcctggaagctcttagaaagctggagaagattgttgctgctactgttgcctttccgaaaaggacagaaatttctactactgtttctcagttgctgcactgcattattcttgttcttgatgtgttcttgatttttttttctttcactcaccggagggtgccgaaggtgaagacgtgaaggctcttgggctcgtcggcggtggcgccgacgaaggcgccgtcgacgagcccggcgccggaggcgtgcgtcagcgcgatgttgtccgccacgccggtgaggatggtccggccatgcgccaccagcctcccctccgccaccgttatcctcggcgtcaccgtcatcttcctccctaccctgcttctcctttgagacaccaacaaattcacactcaattaacaaactaatctttcaaaaataatcaccctgctaataactcatcatggttcatggttgagttgctaatcaagaaaatgttacctggtttatttcacgctaattagtaattagcgtggcaatatacactatactagtagtattagttgccctctcaaccaagattggggggagaggtagtgtggctgggaggtgcttatatagctggagctgtgggtgtgaggtgctctgctggggtgccacgtggcatgctcgaaatggtaaaaacttagtagagatgtttctactctggtcattttactaccaatagattcagcggtgtaaagttttagcatgtcacatcggatattatatagggaatcacatatggtgttcgggtactaataaaaaaataattacagaatacgtcggtaaaccgcgagacgaatatattaagtctaattaatccgtcattagcacatgtttactgtagcactacattgtcacttatagattcgtctcgcaaattagttgtgacggagcgtggggctcctcaccgggagaccgcgcaggcccccctttgccggttcggccgggggccctgggtgagattctaagctcctagtctgtgtgtggaaggttcgcgagaatggaaacacacaagacacgggcgatgtatacaggttcgggccgctgagaagcgtaataccctactcctgtgtttttgtggatctatgtatgaagaagctacaaaatagctggagaaccagagagctcttactctctccctctctgatcgttctggatccgaaaatcaatcctcccccttctaagtgggcaaggtcctccttttatacctcaaggggataccacatgcaccatctctctcttttttgtggggacttatcctctcttttcataaacagacggagacttgtatggttgtcgtccgaatgaccttctgatgggacagcccatacctacctccacttccgccggaagcaggcgcgacgtgggaacatggctgtctgctgacgacatgatcagtgtcagaccggtcacaaatcggtcattcttgtccaccacgcgtcagtttatcaatctgcatgttcgcccctcttcatacaatgtcttgcttgtaatggttaggatgaagcctggtatatatctgaccgggaccaacgtgccatctccaggagctaacacgccggctccggctagggacgagtgcttggaggctctcatcctgacgggatggggcgaggcgtgcgtcagaccgcctgtcgccacctaacccacgatctgatcggtctgtgactggtcacagaccggataaacgagcgtgctgcactgcgttacatgcggcgtgacgcgctcgtccaaaccgcaataaatgtggttaggtgagccccgctatgctcacctaccccatatacgcggcgcaaaacccacaaggggtcggggcgcctcggccctcggggccgagacgggagcggtccgacccctcggggagacaaagagaagggcggccgtatcaccctcgggcccgacccccccccaagggggttaggccacgtgggtgatcgtgtctgcctcaagtctctaagtcatgatactcccggtcccatgtcaccgacagtagcccccggcgttatgccagggcgatcgccctcctcgagggaagcggtcgggcgtgacgccacttcctaaggcctggtgacatggtggggccggtctaaaaatcgggacaagccggttcgtttttcctggagatatggtgatggcgctttggtcggcgagcgtaattaacgcgcgcacgagatgttccatctcgactgccacagccgcatatccacctcatgcaccgcaaacgggggaatgagattagtggaagcgtgggcgcgagaaacgagggggcaagatagtgggcgcgagaaacgaggagccgggcacagcgttggcaagggtataaagtcgccgaggaagagatttgcttccttcctctcgccattattccccttgtcttcgccgcttgcgccctaactccttgtttcctgtgccctaccttcgccacacgcgctcgctcttaaacatctcttcctccggcgtcatggcacggggctccgctttgcttgatggtagcgtgctgccgccttcccgcatcgtgagcgagaggcaggccgggctgccgcgccgcttcatgccggaatctgccaccggccgggagatagttacgctgggcgagggacgcccggcgccatgctacccggggcggtccgtcttcttcctcccttttgcaatggcagggctggttccgccattttcttctttcttcatggatgttctggagttttacgatctccagatggcgcacctcacccccaacgcggtaatgacattggccatcttcgcgcacctgtgcgagatgttcatcggggtgcgcccatcccttcggctgttccggtggttcttcaccgtacagtcggtgtcgccgccgtcggtggttggtggctgctacttccagccgcgggggctggtgttgaaccgctacattccctgcgtcctccgcaagaagtgggatgactggaagagcgactggttctacacccccctcgccgacgaagcgcgcctccgacttccgagccagcccccggcgcaggcctccagctggcgggcgccggtagatctgggagatggctatgacgccgtcctcgaccgcctggcgggcctgcgatccctggggctcacaggggccatggtgtacggcgactatcttcgtcgccggatcgcgccactccagcggcgcgcccggggtgcctgggagtacaccgggtccgaggactgtatgaggacccatcggggggtcaaatgggactgggtccccgaagacttcaaggtaatgatccaacgggtgctgaatctcagctccgcggaggcatccctcatcccccaaggagtcctccccctctgcagcgatccagatcgcgccaacatcctgaccatcatgcaggcggtcggggcgtcggaggagcgggctcctcgagaccacgatggctcgggcgggagccgcaggggggaacaatctaccccgagagggggtcgtgcttctgggccccgtgatgggggctcggggggcagccgccctgccgacgcccaagggaagagaaagcaagagggtacttcctccccatctcctccccgagggggcggggcggcgcgtgtcagcagcaggcgcccggagggggccgcgccgacgccgcagcccgagggggagaggaagaagaaacggctccgcaagatggggggacagaaccatcccggggaaacctcatttcccctccaaggtggtcgtttaaccgaccccctcgcaggttcgtcccacgcccattgtggctgtattcattcttccaacacaagttttcattcacccatcttgtttgtcttctggcttttcttctgcttcagcgagatcccgtcgcgtccctcccgccattccaagtccggccagtctgaggccgaggacccagcgaccacagaggcccggaggcgggaatctgaccggcgagaagccgcggatcgccttcgggaagccgaggaggccgctcgggaggccgcccgggctcgccagaccgaggaagccgctcgggaggaggccggactccgccgggccgaggcgacgacatcctccgaggcgacccgtgaaactgaccggcaagaggccgtggatcgccttcgagaagccgaggaagctgcccaggtggccgtccgagctcgccaagctgaagaagccgctcgggaggaggctagacttcgccaggccgaggcgacaacgacttccgaggcaactcgcggcgaggccgcgggtgcatcgcttgggcccactcccttgtgcgacgctcaggacaaaccaggtccgggggacatccccgagtccggcacgtccatcggcgggccaagccgcgcggcatcctcttcgaggcggctcttccccacgccttccgttgctccactgagcgcagaaccccttctgcgggccttggccgtcgcaaacaccacggtgttggacgggttaagtgcccaggtggaggccctgcaagcagagcgggcggagctcgacgccgcatgggcgcgtgtcgaagaggggcgacgctcggtggaggccatggtggaggtgggccgcaaggcacaccgccggcacgtctcagagctcgaagcccgtcggaaggtgctgggggagatcgccaaggaggtggaggaggagtggggggctgccctcatcgccaccaccgtgatgaacgaggcgcaggacaccctccgccttcaatacgggagctgggaggcggagctagggaagaagctcaacgccgcccagggggtccttgacgctgccgctgcccgagaacggcgggcggcggagaccgaggtggcatcccggtggcgcgaagaagcccttgaggcccgtgccatggcgctggaagagcgtgcctgtgccgtggagagggacctggcggatcgcgaggccgccgttgccatccgggaggcaacgctgactgcgcacgaggcgcctgcgccgaagaggagtccgcgctccgcctccgcgaggacgcgctcaccgagcgggagcgagctctcgaggaggccgaggccgcggcgcaacggctggcggacagcctgtccctccgcgaggcagtgcgggaggagcaggcgcgccgtaatctagaaggtgcccgcgccgagagggccgtgctgaatcagcgggccgctgagctcgaggcgcgggagagggagctggacgcgagggcgcacagcggcgaggcggccgcgggcgaaagcgacttaaccgcccgcctcgcagctgccgaacacaccatcgccgatctgcagggcgcgctagactcgtccgccggggaggtcgaggccctccgcttggcaggcgaggtagggcccggcatgcttcgggacgccgtctcccgtctagaccgcgccggccggcaggcgggcctctggggcgggcggactgcgaagtacgccgccaaccaggggggcctcgcccagcgcctctcggagatagccgggactctccaacggcttcccgaggagctcgagaggacgattaagtcatcctcgagggacctcgcccgaggagcggtggagctcgtactggcaagttaccaagccagggatcccgacttctccccatggacggcgctggacgagttccctcccgggaccgaggacggcgcgcgcgcgcaggtccgggacgccgccgaccatatcgtccacagcttcgagggttcggccccttggctcgcgttcgccctcaattccgacgaggaggacgatgacggcggagtgggcgacaatggcgacgaggctggcgacccgggtgcatcggagtgagcccctaggcccccgccaatctttaaatagtttcttcttttcttcttccgaggccttcgggcccccttcttgtatagactaatttaatctgcaatcaaataaagaggaaaattttttgtgtcaattctatttgttgtgtgtatgagacgaggatggtctgtgccgcggtccttttgtgtcttggcttgaacaagggctcgtgcccaggtcctagtcctcaaatggctcgggtcggggctagtgcctggggagatccacatgtcgagactggccaggccgggagcgtgatgaccgagggttatgggtgacccgattgtgggtttttgccgattcccccccggagttcaccacgccccggggcacggctcggttctgggccccgtttggcgattttagccgacccgagcccccgaggcaggattgaacacgagtgacctatttcaagtcaagatccttcaaaaggaaacaacagcacagatacagcctttaggaaatcgaaaatgcttttattgaaatacagatataagagaaataagaatatgcatatgtggtagtccccggccaaccctgcacgcccgaggggggtgcggggttggcccgagcccgaaacctgacacccgatccccctttaggggtagaagcgacgaaggtgttcgatgttccacgggttaggcagctctgtgccgtcgcccgtggccagccgaacggagcccggccgggggacgccgatcactcgatacggaccctcccacattggtgagagcttgctcaatccagcacgcgtttggacgcggcgtaggacgaggtcgtcgacgcagagtgatcgggcccggacgtggcgctgatggtagcgccgcaggctctgctggtagcgcgcggctcggagggccgcgcgccgccttcgctcttccaagtagtcgaggtcatctctgcgaatctgatcttgatcagcctcgcagtacatggtggcccgaggggacctcagggtgagctcggatgggagaaccgcttccgcgccgtagacgaggaagaaaggcgtttccccggttgctcggtttggcgtggttcggttcgcccagagcaccgctggcaactcctcgatccacgaatcgccgtgcttcttgaggatgttgaaggtcttggttttaaggcctctgaggatttccacattggcgcgctccacttggccgttgcttctggggtgggcaggtgaggcgaagcagagcttgatgcccatgtcttcgcagtagtcgccgaaaagttcactagtgaattgggtgccgttatccgtaataatacggttaggcactccaaaccgggctgtgatgcccttaatgaatttaagtgcggagtgcttatcgatcttgacgaccggataagcctcgggccacttagtgaacttgtcgatcgcgacatacagatactcaaacccgcccggggcccgcctaaacggtcccaggatatcgagcccccagacagcaaatggccatgaaagtggtatgatctgcagggcctgggccggctgatggatttgcttggcgtggaattgacacgctctgcatcgccggaccaggtcgaccgcatcattgagagctgtcggccaatagaaaccttgtcgaaaggctttgccaaccaaggtgcgcgaggcggagtgggatccgcattcgccttcatggatatcggcaagaagctcgacgccttgttcccgaggaatgcacttcaggaggattccgttagccgcgcgccgatagagggtcccttctaccagcacgtagcgtttggagatgcgttggacgcgttcactcccttcgcggtcctcgggtagagtcttatctgtgaggtatgcttggatctcagcgatccaagcaatcaatctaagggagctgggagcgctccccttgggtcccgaggcctggactccgacgggcatcgggggcctgtcaggcgcgtccgtctcccctaaggggtcgggtcgcgccgacggctgggcaagcctttcttcaaaggcgcccggtggggtctgggctcgcgaggaagcgagccgtgagagttcgtcggcaaccgtgttatcccgtctgggcacgtgccgaagctctatcccgtcaaaatggcgctccatacgccgtacttggcgcacgtaagcgtccatctgcgggtcagagcaccggtactccttacagacctggttaacgaccagctgggagtcgcctaacaccaggaggcggcggatccccagtccagctgccaccctgagtcccgcaaggagtccctcatactctgccatattattggtcgcccgaaagtcaaggcgaaccaaatatctgaggacgtctccgctcggcgaggtcaacgtgacccccgcaccggcgccctgaagagacagggagccgtcgaactgcatcacccagtgggcggtgtgaggcagctgcgaggggcccgagctggcctcggggactgagacgggctcaggagctggggtccactctgccacaaaatcggcgagggcctggctcttgatagcgtggcgtggttcaaagtgcaaatcaaactcagaaagttcgattgcccatttcaccacccgtccagtaccctctcgattatgcaagatttggccgagggggtaagacgtaaccaccgtgacccgatgcgcctggaaataatggcgcagtttcctcgaagccatcagaatagcgtaaagcatcttctgggcctgagggtatcgggtcttggcgtcccagagggcctcactaacaaagtagacgggccgctgcacctttcggtgaggccgatcctcttcgctaggggccacatccctggggcgctctttgtccaagcggcctcgcggggtgcactcatcttctgtgccgacgacctcggggtcggaggacgacaggggcagccttcccacagtggcctcggggccgtcctgggggtcgggggctcctggcgtcgtcggacaagcgggcaaagggccaactccggtcgtcaggggccttaggccaccgttcggctcgggggcctcttctccctgctctctcccgggtcgagtcggcacagggttagcctcggggtcagagggcgataggtgcggccttcccgcagtggccctcgggccatcctgggggtcgggggcacctggcaccgtctgacaagcgggcagagggcctgctccggtcgtcgggggccttgggccaccgttcggctcgggggcctctcctccctgctctctcccgggccaagccagcatagggtgggggtgcgcggaatgaggattgtcctcatcgcgctccacaaccaacgccgcactaaccacttgcggggtcgccgctaagtagagtagcaagggttcatttggctccggggcgaccagaactgggggagagctgagatacgccttcaactgagtgagggcacgttcagcttcctccgtccaagtaaacggcccggagcgtttgaggagcttaaataagggtagcgccttctctcccagcctcgatatgaaccgacttagggcggccatgcaactggtgacgcattgcacatccctaagcttgctggggggcgcatccgctctatagctcgtatcttctcggggttggcctcgatgcctcgggcagagaccaaaaacccgagaagcttgcccgcaggtacaccgaacacgcacttatcggggttcagttttatgcgggcggagcggagactctcaaaagtttccgcttgatccgagagtaaggtctcttggttgcgcgtctttacaaccaagtcatcgacataagcctcaacattacgtcctatttggctacccaaagaaattcgagtagtacgttgaaaagtaggacctgcattctttaacccgaagggcattgtcgtataacaataagttcctatgggggtaatgaatgcagttttttcctcatcctccctagccatgcgaatctgatggtaaccagagtatgcatctagaaaacacaaaaggtcgcaccccgctgtggagtcgacaatctgatctatgcgaggcagggggtaagggtccttaggacatgccttgttaaggtcggtgtagtcgatgcacatccgaagcttgccgttcgccttgggaacgaccaccgggttcgccagccactccggatggatgacctcgcggatgaatccggcctccagaagtcgcgccacctcctcgcggatgaaggcttgacgttccggggcctgccgccgtactttctgccggaccggccttgcgcccgaccgcacggcgagacggtgctcaatcacctccctggggaccccgggcatatccgccggtctccatgcgaagacgtcagcgtttgcccgcaggaaagagacgagcgcgtcttcctatttgccgtccagaagaccaccgatccgtgtggtcttggacgggccgtcgcccagggcaacctccttgaccgggacctcgtcgcatgtgactatccgctgcctcggggcggcgggggcggaggtgccaagcctctcgtcgcctccctcgggcttggacgcggcggtgaggtggtccgcgcgctgctccatacaagcaagcgcgactttgaggtcgccatggacagagatggggccaccggggcccggcatcttcatctggaggtaggcgtagtggactgccgccatgaatttcaccaacgcgggcctccctaggaccgcgttgtagggcagactgaggtccgccacatcaaagttcacccgctccgtgcggaagttggcggatccaccgaaggtgaccgggaggtcgatatgacctagcggccaagtgtgacccggcgtcacaccgataatcggctgggacggccggagcaccatccccggggccttgatagcgtcaaaggctgcgggggaaaggatgttgagggctgctcccccatcaatgaggacacgccccagcttcacgttgcaaacggtgggggaaaccaccattgcgatctgtcctccccgggcaacgcacggtgggtggtcggtctggtcgaaggtgagggcaacctccgaccaccgcgcccggcacgtcgcctcatgagtaggggccgcggccagaagctctcgcttcatggccttgaggctccggcgagaaacgtgagcacacgctcccccatcgacagtggcaatggtggccccaggctcttggaagcctaggtcatcatcgccgtcatcgatgtcctcggcgggggccttctgcttggcctcacttcgccgattgccggaaggaaccgccgaggacttgccctctcggcgctcctgcctcctctcctcctcccacttcctcgtccgctcagccaaacttttgactgcgcggcagtccgcgaggtcgtgaagggaggtgttgtggacgatgcaccacttgccggttgggcgctcccagtagggagcgccggcctccttctttttgtcgctcgcaggcctcccctttcgggtggcccgcgaagcgccctcgacggcgaggacatgaccctcgtcgtcggaatgggctgacctcttcttcctcctcctgtcacgccgccctgtccgagcagcggatccgggggcggccgaagctgccacaccggaaccggaggggttccaggtccatgcctcttcctttcgagccactcggtccgcgagctgaaaaagctccgcggtagtctggggctctttggaggcgattttttcgagcatgcggttgtgccgcactccccccctgaacgcgtagatcaccgcgtgtgcagggatgcatggtatggtgttgcggacttgacagaaccgctgaatgtatgagcgaagtgactcatcatcccttcgctggactgcatgtaagtctgcttcttcacctgggcgcggatatgtgccttgaaagttcatggtgaactgttggcacaaatcctcccaagagtggatggacgcgggtggcaagttcattagccaaccccgtgcctgtcccttcagggccatgggaaagaaattcgccatgaccctgtcgtcacccccggcggcctcgatcccggtcgtgtagacctggagaaactcggcggggttgacgctcccgtcatatttttcggcgatggtgggccggaaccttggggaccaacggacgttccgaaggctcgccacaaaggctctacagccgacaccaccaaccgggggcacggagggctgatccccgcgtccgtgttgatgtgacactccggacgaggaggcgccctccgttgcgtgggcagcacgtcggccattacgccggcgctcgatactgatgcgggcatccggccccccacgcagatcttcctgggtcggaggcgctgacgaaggagtagcggccgaatggcgagcaacagccgccgctcgccgcgccctccgccttgacgacacggagccggtggtagcagcgccagaggtcttggtggcggaggaccacccaccagcacctaggcgctgccgtgccgtcatgaccaagttggccacgtcgtccagccaacgttgggctggagactccgggtcagggacaatgggcggatgacgtaggagcgcgcccgcagcttggagcgcgccctggggcgtgctgccgtcgccgtagacgaggaggcgacgctccccatctcgccgcccttccccatcacccgtggatgtcgaagtcgcggatccttcgaccctctcgagcgcctcttcccgcctaggactttggcgtggagggggcggtggagtacgagctcgacggcgtgggtttggctccccgtcgtcaccgctaacactcggagagaggttgtgcgcctttgcttgttcagccattgggctgaacaggaaaagcttggcgcacacgaaagagtgcgagagcttagaagaacacacgcagaagcccctacctggcgcgccagatgacggagcgtggggctcctcaccgggagaccgcgcaggcccccctttgccggttcggccgggggccctgggtgagattctaagctcctagtctgtgtgtggaaggttcgcgagaatggaaacacacaagacacgggcgatgtatacaggttcgggccgctgagaagcgtaataccctactcctgtgtttttgtggatctatgtatgaagaagctacaaaagagctggagaaccagagagctcttactctctccctctctgatcgttctggatccgaaaatcaatcctcccccttctaagtgggcaaggtcctccttttatacctcaaggggataccacatgcaccatctctctcttttttgtggggacttatcctctcttttcataaacagacggagacttgtatggttgccgtccgaatgaccttctgatgggacagcccatacctacctccacttccgccggaagcaggcgcgacgtgggaacatggctgtctgctgacgacatgatcagtgtcagaccggtcacaaatcggtcattcttgtccaccacgcgtcagtttatcaatctgcatgttcgcccctcttcatacaatgtcttgcttgtaatggttaggatgaagcctggtatatatctgaccgggaccaacgtgccatctccaggagctaacacgccggctccggctagggacgagtgcttggaggctctcatcctgacgggatggggcgaggcgtgcgtcagaccgcctgtcgccacctaacccacgatctgatcggtctgtgactggtcacagaccggataaacgagcgcgctgcactgcgttacatgcggcgtgacgcgctcgtccaaaccgcaataaatgtggttaggtgagccccgctatgctcacctaccccatatacgcggcgcaaaacccacaaggggtcggggcgcctcggccctcggggccgagacgggagcggtccgacccctcggggagacaaagagaagggcggccgtatcaccctcgggcccgacccccccccccccccccgagggggttaggccacgtgggtgatcgtgtctgcctcaagtctctaagtcatgatactcccggtcccatgtcaccgacaagttgcaatctatacaattagttatttttgagactatatttaatacttcatacaggtgttcaaatatttgatgggataatgtgtaaagttttgggtgggatttaaacagggcctaaagtgctcactagtcactccagctttgaggtttctggacgaaaaatatcttcatttctgatctgatcagccttgattgatgatgaagaaaatgggggatttcaggagatggttggagagtaggagattgtgtgtggatgacttgtgggcccggagaggagtaggttcacgtgtaggtgatcatctaggatactggtagactagttgttggtgtctcttgaaggatccagattccagaggtgaatgttccagcattccagggtgtgatctgttccagatttttgagaattctaggtctcttgtctgtgtttgttgatttgcttctgtgtttttgctttatgtattttgtcacctatggcactaattattgatttattgtgtgttaaaaagtagtgggagtgttatctgaatttctggagtgtgaagcatgggggattttacatgaaacaagatgaacggacaacttaaacagattaacagactagcatatttagaagtcaaattactagtacatagtagaagaaatctgtattgatcaccagtaagactaatatcattcttttcccggagggatattactcaatcatgcatctttcaactatcaactcaatttctcaaggctcttatattatagcacctgaagaactcagcaatcaatcatctttcagttcaacaagtcaaaagctccgtttgcaatgcacgaatatcactcaaattggtaagagttctcgtagaaatggaagaaaaatataacttgtattactgacgtatagtgtacttctaagatcttaaacatcatgttcggagtgttacagttcattgatcctctaatttcagctaattaactttagttacaaaccgatcctttaatttgtttcctggaaagctggaatcgaattccatccatgcataacagtccgtcgcacctttaatttcaagaatatctttagacaaatactttgaagaatatgatactttatgtctgtatttcctcatatatcaaaattaattgcctttttgtttgttagcttatctcgaagtgcttatcttatgcttccaggagtgagaattggcagcttctagaatgctgcaatcatacatttgctcgtgaaaagaattcaacttttcttcacctattgagggtctgtttagatccttgacaaaatttttcaccatctcacattgaatgtttggacatatgcatggagtatttaatataggaaaaaaataattatgtagattgcgtgtaaattgcgagacgaatattttaagcctaattgttacatgatctgacaatgtgatactatagtaaacatttgctaatgataattaggctttataaatttatgtcgcagtttacaagcggaatctgtaatttattttgttattagtctatatttaatattttaaatgtacccgtatatctgagatgacacatcaaaactttttacccctggtctaaacacagtctgagttgtatgcaagtgccaagagcttaaaccggcctatcgattttacagttgaagatacgctagcacatccaactcataactggtatacaaaagcaaattcgatctattcatctagacaagagttatgtcagacaccactgaagtgcatggttatgctatgtcagacaaacgatgaaacaagacaagctaaatggacacatgcaaataggttagtggacgttaccagtagcactccatgattggcttcaaggtttgagctttgctaagttaaatcattgtccatctctgattctctgtcagctcaacaccatgaatccatgattgagggcaatgttgcagataagtaatgttgctgtttactgcaactgaagaaatactactgctattgagctgtggttaaaaaaaaatccttccaaaacaaagccatttataccccctccgttttaaaatgtttgataccgttgactttttagtacgtgtttgaccattcgtcttattcaaaaaatttaagtaattatttgttcttttcatatcatttgattcattgttaaatatattgtcatgtacacatatagttttacatatttcacattcttttttaaataagacgaacggtcaaacatgtactaaaaagtcaatggtataaaacattttgaaacggaacgagtattatttttgcatgtgagcatagcaaagttagcaacacgtggaaactggaaagtgaggttggattaaccaagcgtgaccgggccaggcacgagttgggcccgtgttcaagaatccaacggtgtgccggatccacgtcaggctgggcacaggatgggcctgaatcggttccatcccagcaaaagtagttgtgatgaaacacacagctgatcagctgaacactttgggttttttttttatataagggtgttttttacccgatctcgttcttacgaagatttaaactcaggtcaggactagcttatcaaaaatgacctaatctaaaattcactcatataaagatttgaattcagaactagtagtactactcaggacatctacagatcttgctcgtgtcgtgcacgccatggttgattgcttcatagctgcgtgattattcagggccaacttataattaagatgccgttaattgatagaaatactgaatttacttataatgtcaataacggtaatgcagtgtattattcgtccggtgttaattttcgcagttgaacatattagcattaccatctctatgttaaggagtgtagtagagtatcattgcacatgttctagtaggatgattagtgaagaaaaagacgagcaaactgtacatgctctctgctcgtgctgcttcgagaaatctaccaacctaattaagctcgtctaaattactactctagtgtacttaacttgaaagcttgttgcgctgtgatttacctttttggcatgatatatccctaccccgacattaatggaacaacgtagacgtgtctagattcgggccacattcagttgtctcctagctagtccagggccaaatcccgggtcctgttgctaacaaggggtctacctgttgtttgatctttggattagagctgaattgaaccagcccattttaaatcaaatagattaatatgaaactagtttataatgtttttatgccaacgctagcttatggtttcatttcggccccgatgctcccgcgggcatggggggagatggatgaggaagacgggagaggagagaaataattagtttaaatcatatccctccatcgtaataccgaaaatcttaatcccaacctaagttagatctcatagcagtatggagagctatttttgctgatgtggcatattagtcaaaaatatttttagaaaacttgtgaagcccacatgtcactagccacaccacagcacaccttcttcctctgttccaatctcctttcttctgtggaataagttcatcggaggtccctcaacttaacagcgatatttttttagtcccttaaccacaaaaccagaaatcttcacccctaaactataaaaaaaaccgtttaatttgggtcccaaaaataaataaaaaagtaggtggggcccacatgtcagtttcgttgccgcacgccgccgcggcctcccctgctccaaccgcgcgctgacgcctctaccgctcccgccgtcgcggcggcggccgccactcctgccacgcgccgccacgaccaccgctgctcccgccgcacgccgccgctgctcccgccgcgggccgactcctcccccgctcctaccgtcacccatgttccccgtcgtcgcctaggccactgcttctcccaccgcacgttgccacggccgccgttcccctccccccctggagccgccgctcccaccacgcgccgccacgaccgccgatgctcctaccgcatgccgatgccatcgccgccgctcccacttttgcccattctccctgctgttacagaggcaaaaaaggtaagagtacagtgagaaatttgtgtcggcgagatcctccaacgcggcgcttattgccgggttgctcaagatgttctccgtttcctgcagcagcgacagtatactcactctcatcactcgtcttctgatctggaggcagtcctccttgtttctctggaccgtctccaccgcatgcttgatcttcagagccatctccgtgatatgcttcatgctactcactggatccgccatcttaattctcaaacacaacataatcaatcgtttagacaagtagttatatatatgcttgaaattgtgaggcagtagctacgttggattagaactccgacgaggagctctccgtctccggaggcggcggctagtgaagcttattgaagtattcttctccgtcaccgactacctcgtcggccgctcgcccgccgcactgctccggccgcgcccggagtcggtgctcgctcgccgctgcagccgcgcttgaccgctgacgccgccgctccgcctactccggccgcgcgccgcctgcgcccagagccgttgctcgcccaccgccgcggccgcgctcgcccgctaacgccgcgcgctgacgccgatgctccgcctgctccgcccgcgcgccgcccgcctgctccacccgctcccgcctccgaatggggagaggcggcgccggccgccgctcctgccgttgcggcctcatgggcgatcgggccgggcgcctctctccccttctctggcgccggccgcctcctctccccctctcccgcttcttcccagcgcgccgcagctcccgctccgccgtcggccgccatttgctcgcctgcgcgtgcgaactgagaagttgagaagagcagagaaaaagaaaagaaaaaagagatgtggggcccacatcattttctctcagtgagatatgggccctcacatatttattttattatttttgctgactaggatgccacgtcatcaaaaccagccatctatactgtcttgggacccaaattagacggttttgtatagtttaggggtgaagatttctggttttgtggttaagggaacttagaaaatctcgctgttaagttgagggacctctggtgaacttattccttcttctgttcctcagttcccaacctcctccatgccgggccgcaccctaggactcctctcggagtctccacttccgactggcccaaatcaagcccatcttcacttgactcatgtcagccgaaatgatgagaaagaggagccaattttcttgggactacgggcagatttggattcgagccaaattttatccagcaaagttttgatatactccctccatctagtttgatagtcatatttcatcttggcacatggaccaaggataagtaattctacttatcatctatttaaacatgctactagtcattcctcgtaaacaaacgattcattaatatttacatttctcgatgtccatgtagccaatcttgtgtggaagaatggagtcacgcattaaatccgagaaattcattaagatgataggttattggattgaaatatgcctatcaaaaataaatttttcagatttggaaatatgactatcaaaagtagatggagggagtatttacttaaacagcatagtaccatcttgatgtttggattggtgtctgattttttccccattaataccattagtggtgttaaattttgctcacattagttctaaatagttgtaccagtagttgatataccctattaaatttgatactccctccattttaaaatataataacttctagcatttaaattttatcttaaaatataaaaacgtctccatctacattcttttatcaactaatcatagacttccatcattcaaattccatacatatttccttttcttaatcaatcacaatattccctcatttaatccaatcatttgtttcttaatatcaatgtacagccctaaaacttcttacattttgaaatggagttagtagacctgttttggtatatactggtaaggtatcaaaccaaacaaaattttctaagacattttgttgttttggtatatattggtatcaaaccaaacaagttcaatgcaagctactaccgtaacaggtcacaacttccagagttcagattcagatacacagaatttcagattcagatacactggatgacaacaggatgaacgagttgagaatttcacgccgcttgtattatggtacgtacaaaactacaaacaattgtaccaataattctggtctagtaaactgtaagcacaccatctgcttccccatcccgccctcttttgggtacatacatatctgccgcctgactgacaaatataatcgctgctggtaagcacaaaaccacaaatgctatctatacaaagccactaagttactgtgtgaaaaaataatgtaacagccagcacacagcaaagaaaaaacgtaagcgtagtttttttctctgtccagtctattgcgtgtcgtcactgatggatccgtccttttgaagcttcagactgaggttactgaacctttgtcttgagtactgcctagatgccttcctccagtcagtgccggccttcatcatgacggcaaactcgtcgtagcttattttcccatcctgagaaaagaataaatgaaaagaaaacattgcattgttgttaggatgaccatatcgacaagttcaatcacacggaatttgaacaggtcatactttgctaatgttactttcaactaacaattgcactagaatcatctccagtaagcctaccccagttgtttgtttgttatgtcatttgttttatgtcgtctaattagactatccttgtccatccggttacaacttattatatgatagtataggtcaatgataacattcaccaaccctttaattaaataaaccctgccttgcagccaaaggtagaaacatttgaaccctggctaccaggtaatcaagtatgtggcactattcagcttctagcaaatgatattcatagatttcactagctgtgggcttataacttttatataattgaagtcattgcatagataccaagaacaatgtcatgcaatataatggcctgctaaggaaagattaagctgaccttgtctgtatctacatcacggatgatgctattaataatgtcttcatcattgccatctatttcatcaaccaaggcctctctaagctcttcaatttctatgtaaccactcttattttggtcaaaatatgagaaagccttctggatatgttcatcattgcctattttcctcacatggatagacacagcaacaaattcttgatagtccaggatcccatttttgtcaatatcagcctgcaaagcaatgagcgaacatcaatatgtatcgccaagaaccagaaccagtcctttttattctagtttagaccatttttaatgataactcacagcatccatcaatatcttaagatctgaatcaggcatctgattcccaagtttacgtatgccagccttgaaatcctcaaaggtcagctggccattcttgctcacatccattttatcaaacatgtcctttatgtcagctgcttcctctgcagacaaatgctcagcaatgacctgcaattaagcacaaataagctaactacaagaaaaggagaaaaatccttatgcacatctcgtgtttagaatttaggaagcaaattatatgtgatctctatgtagaagtttttattcaataagaataataatctattttggtgctaacatattataaatgctaccttaagggctttcttctttaacttgttcatcgcagcaaattgctgcagtctagctcggacagcatcaccaagaggaatgtcaggcatctttttagaatcatgtaaccatggatgttctgtacatgcaacgaaaatcagagaaaaacaatgagaaaaaaatgtctgagccatgaaaaatgttaatcatggtgccattaaaaaacattctggataaaaacacagtaaaaaaaagggtacagctagccatttttcggagaacttttctgagattagccctgcatgatggtccctgaataataaatagccctgggctaattttatatcttcttataataatgtgagttcattactcatcaatcacatcatagataatatatagtacagacatatccttcatatattccactaaagtaggagtgagatagcattatgtatgctgctacgcgttaggacaggtgattggcgatgcttaccaagtacttgttctgcagtaagccttgtcatgggatttgggtccaacatccgcttaacaagatctttagctggctcagataccctgggccatggttctcttttgaaatctaccacagagcgtataattgcctgcgctactccctgctcggtttctgcatggcaccacaataatatgataagaatggtgttctataacttccccgcaacacatgcagtctagtcaagagaaagaacacacctgcccaaaatggtggtacaccgcaaagaagtatgtaaagtatcactcctgcactccagacatcaacttcagggccatagtgtcgctttaaaacctctggagccatgtaatatggactgcctacaatttcagtgaaccgctcacctgcatattgaatccatcattagaaatcaacaagcattcagttttgctgaaaagaatgctgcatgtgcctatgaagtaagctccatttgcagtgaattgaagcaaagtacaatggggcaatcccatttgctcttcttctacttgttttgtccaagtacaatagattcagttccatttattctaaagttatgtacttgagcatcagtctgcagagcataccaggcctgaagaacacagatagcccaaaatcaattgccttcagaggagaactatccttcttgttagcatataggaagttttctggtttaaggtcgcggtgcatgacaccatgcctgtggcacatctgttcagtagagaggacaacaatacatgtcagatgtcacaaaagcaagtccaatatagcaagaacttaatatgaaaagcacatgatgaagaactgctagcatacattctagaatcagcgtgattatacgtttacaaatagaactgctgccaaaatataccatactcgcagtacaaaatgcgcttcactagtacatggactcctttgtcaatacattatcactctggctaaacaatgatgggtgactctaacaagcaccaaggtttaacagactgttgaaccctagcaaattcaacaattaaattttgctcagaatcttaccagatacccagttggatgctaccatgatttctaattcctcactacataaaagaccagatcatggccaattcatgaacataacagctagtagtagcaattatcctatttgaggcataaccaccaatttctctcatctgaaccaaatttatttacgaacataacaacagatgctagaaattaattaagcaaataacaaggtaaaaaaaaatagaacaggactctgtccagtccacagtccacacggagacacgcgttcacctgaaccacctcgacgatggtgcgcgtgacggcggcggcggcgcgctcggtgtagtggccccgcgcgacgatcctgtcgaagagctcgccgccctcgcagagctccatgacgaggtgcacgttgtcctcgtcctcgtaggcggcgcggaggctgacgatgttcggatgcgacggcatgtggcgcatgatctccacctcgcgccgcacgtcctccacgtccaccggcgtccgcagcttccgcttcgatatcgacttgcacgcgtacctgtcccccgtctccgcctccgtgcacaggtacgtgatcccgaactcgccgcgccccagctcgccgccgagctcgtaccgcgcgccgaggtcccgccccgtcgggtcccgcagcaccatcagcccgggcctccccgccgccgcccccgccgacgacggcgcgcggttgtacgcgacggtgaaggggttcgccttcttctgcttccccctcctcctcctcttcccgccctcctccgccgtcgccggcgtgccgcagcagttgcccatggcggcgtgcggcggcggcgaatcgagcttggattcaattcaacaaaggaggcgaggcgattcgattcgattcgagagagagaagagaggaaaataaatggatttgggaaaaaaaattctgtgtgcttcgccgtgtgagttgggtcgcagagtccacgaattctggatgcgttctagaagaggggggcaaataacctagtaaaacctttgcaaaccaaaaggatatatagttttttctatcttgagaaaaaagttttagtaaaaaattttggggaaattttgtgggaatacaagagattttagcggagtttagtaaacgcgattaggataatccggtacagatagatggaggagtagttggtgtttgtttgcttcttctagagatgagtgagtcagtgagagcagatgccgttggacagttattgtctaaggagtatggtgtccggtcttttttcacataatactataatttcagattatataattttcacaaatatcaatttctactttttaaggagtacatgccaagttgccaatttgattttagtgtttgggtattagcggaacagcttattaacgattaaataattagttatattttcttagtgatacaaaagcaaatacttaaaaataaacatgagaaaaaacctaaaattaactctaagtttaaatttaattttaaagtttagcttatgttggtaatgtaaaggctaaacggtggggctgaacagggttttagaagtaaagaattaaaggttttctttccccgaaaaagataaaggggttttaaaattcggttcttgattgagtttagatttcttggaatataaaagatatatgcaggacaatgtgaagaggactttgacgtttgaaacctcgcacggacgacttgtggagctcaaatgcgacggcgacaagcggcaaagaaaaaaaaaacacaccagcttggaaagttggtttggtaagcaggacaatgacaccccagtaaattacaaatggagagaaaaaaattacagtttaggccgagtttagttccaaattttttcttcaaactttcaactttttcattacatcaaaactttcctacacataaacttctaatcttttcatcacatcgttccaatttcaaccaaacttccaattttaacgtcaactaaacacaccctaagcgtcctgtattgagaatttggaattcagtagagaattgattggtacagtactggaacctagtcatcgattattctaatccctggccattgattgactagctcgtggcgttgcttgacaggatcagcaacctggggaagaagaggatgatagaaactgaagcttcggttcagacttgacctgtcaggatcaactaactagaaggaaattgcatgttcagttcagacttcagggtttactctttcaatgagaagacttgagaactgaagagtttattactgtattttctttttttttcgtttctgtggggtttaagccttcatagttcagaccagtccagaacttcaaatttcatcaggttcagtagcaaatccgcagagaaaaaaagaggagagaatgtattcatcttatgtttgtacgagtagtagtatagatcaaggatgagtttattcataatattttttgtgttttggaatctaccataaatcgtaagcacgtgcatggaatccatggaatgtttcttttttattttctatcagcagcactggaacctcttttcttttcttttttgttggcgctattgctattctatttttctgacaggaaactgaaaccaattgcgtatccctcttccagaagagaggtgcaggctcaggcctatcaacacatgctgctttcaatcctctacaccacaaccacaagacgtcaagattgaagaacgaaggcgatcaaatagttcagggtttactcttacaatgagaagacttgaaaactctaagagttcactgtggggtttaaggctttaagccttcagaattcagaccaaaacttcaattttcagattcagtagcaagtcctcatcaagaaaaaagaaagaatttatccagctttaaaatgtttatagggtaaaattagtatctactagtaggatttggatcagctgcagtagtagtactgactgcaacttatgcagtcatagcagctaccgtttgatctgaatcagatggcactgattaggtagagcactgtagcaaaagtactgtagaataaaatattactatgattatgtagtttgataactgtagcggcaaaactggaccgttgatcatcaaaatgaacggctgaagatacgtgcagtcctaagttgcagtcgtagttaccactgcagcaggttatccagtaggatgattctcgatgcaagagattgcactatttaggtacttcactagcaggaactattcttttgcaaagagcttattgaactccaaacatgatctcaatccctactagtagtagtgtacttcctactctcccaaaaaaactcaatttaggattgggataggacataatacgatgaatctggacatgcttctgactagattcgttatattagactatggttgcgattctctcggttgggaactcattcccttagcacaaaaaaggtccattagcgcgtgattaattaagtattagctttttttctaaaaatagatcaatataatttttaagcaactttcgtataaaaacttttttaaaaaacgtaccatttagcaatttgaaaagcgtgcacgcagaaaaagagggaagtgagttgggaaccatgagtaccgaactcagcctatgtatcatcctaatcctaggttaggtttttttagacgaagagagtactactcaaggatcaatttattcatctaattctgtgtttttgggttctaccataaatcaaaagcacgtgcataaaatccatggaatgtttctttttcttttctatcaccactgaaatttccacttttcttttctttgtcttggcgctattgctacttcctccatttcacaatgtaagttattctagtatttcccacattcatattgatgttaatgaatctaatgtgagaaatgctagaatgacttacattgtgaaacggagagagtattatattttatgactggaaactgaaaccaattgcgtatccctcttccagaagaaaagagtaggcgcaggtataaagcatgcgactttcagttattctagaccacaaagacgtcaagattgaagaacaaattaaggcgatcaaataatatatgttctttttcaagctgctgaagatgcatgtacccaatgggttcatggaattgtttgccttcttggctcttgccctgttctttccatcttgcggattatgttgtaagcttctaaacgtttgcaaaaccctttctatgtgtatataagattcttagaacactttctaaaaacaactaataaaatttgtaacaatgaactcgttcttttgcaccgtccgatattatcacaacaacaacaacaacaacaacaacaacaacaacaacaacaacaacaataataataattcataaatatgttctgatattcagttgaaaagaaggggacttcgttttcctttaattaattagtatttgcttgacaacaactaaagaagtaaagagggtcaagaacaattaaatgtggccggccggcgagcgggcatgagcatgtagacgatctcaaccttacgaggcggatctagaggtggtattgggaccacccaaaaaagcattagcccaatacagatatacatatgtgaaaagattttttttggaaaaaataactcccttattagtatattaagatgtaaatttgaacaatttatacttatatttagaatatttaaaaaaacatataagttggatcacccattttgaaaattctagatatgccacttacgttttttttttcgaacggtcaggccgttgccgatgttttatattaagaagaagatatcctattttaaagagaaaacgagatcaaacctcacagtgctcagttaattagggacaactgagcgaaaaccacaactacaacatcacaccaacaactaacctatcctaagctaccacgacggagcccgacacaaggcatcggccaagcttgccatttgagacaacacaacagcctacatatgttatcgttatcaagcttgccacccaagtgacacagcagcttcgacgccacttacgtcctaaaccttgtggagaataagataaccatgcagattgagcagaaagcgagcaaaaacgaaatcaaaggggttaatttccgaccccttctgcatctgacaacggctcggctgctctctgtcttcgccttcagaaaaacgatgtttgcctcgcaagcattgcatgtttttttacgcttcgtcggcagaaaaatgttgacatttcagggaatcaaggactgcatttttcttcttaaggtcctgaagctcaactgttgatcgatcgagtagttcaccgtgtgtgcatcaaagcatgcacgacaaaggagaagagacagagagaggtgtgtgggtgtggctgagcgagagacatgcaccgaaatttaactctccgaacccctctctgaagtttactttttcttttttgtatgctgggttctactgccataaaggaataaataaatcataagaatgttatataaaattcatacaaatgttccttttatcctttctactagcacttaaaagtctgaaactattgtttttccttttgttggcggtgtcattgttatgttttctgtcggcaaactgaaaactgattcatatattcctctttcagaagaaaagcagtaaagcacaggcgcaggcattaccaacatgctgcattttaagcttctagatcacaggagcgtgagaaagaaagaggtcgaaggggatcggagttcaaaactccgaccccctttggatatgaccagagctctgctctccggcttcggcttcagaaatgaatgtttgcacgcatgcatggtaatcctaattatgcttgattggaaagaaaatgttgagatctccgagaatgaacaaggaaaaaggactgaacttttgtttctaaggtggttatcgatcaaattatccccccaaaagaagaggtgccgatcggaaagagaagtacctagcagctaaaactggaacttccattttatatttttcttggaggtgtcaccgttctatcttttgacggcaaaactgaaaccggcataccagcatgctgcatttcaatcttctaaaccgaaaaatggtggtgctgcatgtaccaaatggctcataaactgtttgcacttcgttagcagaaacatgttgagatttcagagaatgaacatggaaaatgaaaaggactgttctgaacaatcaatcgattagttcagcatgtgtgcccatgttaggttcgttgtgaatgcatgagaatgagaagagagatgtgtggatgtggctgagagagaaacatgcactgaagtagtgaaggaaaaaaacaggtgaagggggtcggaattttaatctcctaatccctccttttatttttttttaaaaaaaattgggttctaccataaatcataagacacatcgcataaaattcataagaatctttttttccctcttttctactacgagcaagtttaatagtacagcccactactagctccaattcatctatagccgatctaatagccaattcatacaatagttgcttactatactattaatatatggtcccacctgttatacacacattgcgtcttagagtccgtgttgcagcccgctgctcttctctctcatcttttatctcattaaaatatatttatagttggctaatagtctgctattgtaccagctctactagcactgaaaccagtttttctttcttttctttttttttgttgttggcggtgtcaccattatattctctgacggcaaactgaaaccggcgtgcaggttgcatattcttctcccaggagaaaattgaagggcgcaggaatacaaacatgttagctgcattttcaatcttctagaccacaggatggtgaaactatacaaattaagatgctgatgcatgcatgcatccattggttcatgaactgttcactctagaagaagacgatatactagctcagagccacaggagtctcaggtgaggtcagatctctgacctctgaagagaacaaaccaagaaatttccactgctgatgcgcctccttggctttggctttgtcttgtcctgaattcctgatgatgacctatatatatggtggttgctatcgattctcattcgctgttctagatgaaatatctgaaccagtttatctccaagatgtgcaaaatgatcagataaattgctatctgggccgcgcattgatgatccaaccgtgaaatgttcgagcggcccatgaaggcccaagtttgcgatccaaacttgcatcagctctgctcagtggatgttatgtatgtaggagtaactctgtaacagttaaacagtggctaagaaaatctcaaatctgagatctcatctgagtgatatttagctcatgagttattacaagcatgtctagtacttattcatgcacggattagatcagatcagattacaccatgcgcaaaagccaaatcactcttctcccgcgtcaacaccatgcatgttcgatcatgcaccgatcgcgacgaactcacgccatgtagcggcgtcgtcgtcgccgccgctgccacttaggatatcctgcaatggatcgaaccgagatgaacaaacaattcagtaaatgcaaactaatgcgccatgagaccaatctaatcaacttttttttaattattacttgctgcagtcggtggcggcgccgacggggatggcgagtccgagcttgcagagcgccgggaggcgccgcgcgcggtcggggagcacgccgaacgacggcccggactgctccaggcacctgcacagcgcgcgccgcgcctccgccgtgcccgccatcccgcgcagcgccctcgcgccgccgcagcaccgatcgccggccgcgccgcgccgcccagcaggaacggcccgcacggcgccagcgcgctcaccgcgtcgccgcacgacaccgtcgccgcgcccccggcgcccgccgccaccaccacgacagccacaaacaccgcgatccccaccgccgtcacgccgcggctgcgacgagcgctcgccatcgtgcgctcgcggtgacggccgatcgattgaacaaacgcgttgcgtgtgagtgtgtgtgtgagtgctgagctcgaggttggcaatggcggccatttttgtaggtgggggaggtcaaggaggttggtgatgcgcctgaatgctttcccgcgactttaccatgctcgtcgccatttccggcaagctgaacaactctgcaggcgcgtattgaatcgaccggatggcgagcggctaaacgccatgcgtcgcctgcgaggtccatgtgattgtgcattcagttcacttgatctttatgttgcattcaatccgtatatccaaaagggaatatcaaaccataatgccccttgccacaattttttgtcatctgcattttttttccaacaactatactagtccgcatgccctttttgaatgatctccaactattttaaacattataaattcctgcccatagtttgtgaatctatagttgtacaacctagagaataatttgagagtcaaaagctcaaaaacacaactttatcatatgagaaaatccagaaaataccaccgataaacatccaaattcaagaaatgccatcgatgaacatatattcctaaaaatgtcattgtacaatcgtctttgttccataaatatcatcgtcattagattttcattaacagcactccgttcagtgctataaaaagatcattttaaccctacgaattgttgaaagctgattaaaacttttgttcttttccattgggttgcacaggccatccctgggccaggccaggttctgacattgcccacaagcagcccattagctgtctcggcccagatcttccaacgcctgaactgcatggacagttgggtacacaggtcagcgctccgaagaagaaaatactttccttcacgttggcgcccaaaggtcgtcatcatcatcgatccaaaccgctttattccctctcgtagccatcgtgcatgcatgccattgccatgccagccaatcccttcttcttcgcgctagatctccattatttttctcatctcaacctaacaacttcttcctcttcctcgctatcttttctcgcacgggaatccggatgagacctgtcgcctgagctgagggtgagctcggtgtgtacgttgtcggggacgatgaggatcatggtgcgcacgctgcgcggggaccgggtggcgctcgacgtggacggcgccacgacgacggtggcgcaggtcaagggcatggtcatggcccgggagcgcatcgcggtggccatgcagcggctgttcttcgccggccggtgcctcgacgacgaccaccgcacgctcgcggactacggcgtgcgtcacgactccgtcgtcttcctcagcctccgcctcgccaccgacgcctatcagtacgtgcaaatttcacaacgacgacggcgagcattcttacgattttgttttgacgaaccgatcgatcgatcgatctatggcaggacggagatgcataatgtgcggttgatgcagccggagacggcgacggcgaagcaagaaatgcatcagcagcagcagcagcagttgcatgtccatgtcgccgccgacgacgaggagaaggcgatcaagaggaagccggtgtcgcggcgcgcgctccgcaagatcctgtcgcggctgcaggtggacgcgtggacgagccagcacgacgccaagttcctcgacctgctgctgcgccacacgggcggcggcggcggcgcgaggaacgtgggcgagctcaccggcgaggactggtcatccatccgcgccgagctgaacgccgccaccgggtccggcttccccgtggaggagctccagcggcggctgggcgagttccggcgggagttcgaggcggcgagccggatcaagaaccacccccggttcagctacgaccctcgccgccgcgtggtcgtcgccaagcaggccgactggaagaactacatactggtgcgccgccattgctgcatccttccgaatcgcgaatgtcttcttctcggtgagctgttcttacctcgatcgtttgttttggcggtttcaggagaatccggaggcggcggcgtacgaggggaggagcccgcggcatctgggccggctccgagcaatcttctccggcgacggcggcggcggcggcggaggaggagccaagtgccgcgagacgaaggcgaggagttgcctgaggaagctgctgcggaattttaggctgcgattcaagctgtagatagtttaaatttctgcaatatttgtctcaatttgatcgaggcgcacgaaattgttggttagttttagagcattcaattgagatcttacagtagttggagacacgactctctgagctgaagcaacgcatcttcagtcgcttgtaaagggtgctctgctgtttttgaattggctaaatgctactaatcggactgacattagtag

SEQ ID NO: 22962 - DNA, 709 bp, Oryza sativa
ttcctgcagcccgtcagagggcgacaggcgcggccttcccgcagtggccccggggccatcctgggggtcgggggcgccgggcaccgtcggacaagcaggcggagggccagctccggccgtcgggggcctcgggccgccgttcggctcgggggcctctcctgcctgctctctcccgggtcgagtcgacgcagggtggggatgcgcggagtgagggttgtcctcgtcgcgctccacgaccaacgccgcgctgaccacctgcggggttgccgccatgtaaagtagcaacggctcatctggctccggggcgaccaggactgggggagaactaaggtacgccttcaactgagtgagggcccgctcagcctcctccgtccaggtaaagggggtcaaatgggattgggtccctgaagacttcaagatggtgatccaacgggtgctgaatctcagctccttggaggcatccctcatcccccaaggtgtcctccccctctgcagcgatccagagcgcgccaacatcctgaccatcatgcaggcggtcggggcgtcaggggagcgggctcctcgaggccacgatggcgcgggcgggagccgcaggggggaacaatctaccccgggagggggtcgtgcttctgggccccgtgacgggggcccggggggcagccgccctgccgacgcccgggggaagaggaaacaggaggataccccctcc

SEQ ID NO: 22963 - DNA, 846 bp, Oryza sativa
accacatttattgcggtttggctaagcgtgtcacgccgcatgtaacgcagtgcagtgcactcgtttatccggtctgtgaccagtcacagaccggtcagatcgtgggttaggtggcgacaggcgatctgatgcacgcctcgccccatcccgtcaggacgagggcttctaggcgctcgtccccagctggagctagcgtgttacctcccagagatggcacgttagtcctggtcagatatatgccaggcttcatcctaaaccattataggcaagatgttgtgtgaagaagggcgagcatgtagattgctaagctgacacgtggtggacaagaatgaccgacgtgactagtctgatactggtcatgtcgtcagcagacagccacgattccacgtcgcacctgctcccggcgaaagtggaggtagttgtgggccgtctcatcagaaggtgactcggacggcaactatacaaatctccgtccatttatgaaaagggggggtaagtccccacaaaaaaagagagaaatggtgcatgtggtatccccttaagatataaaaggaggaccttgcccactgagaggggggactggacttttccagattagaaacctagaacaagggagaggctggctgatactttgtagctccttcatacacagatctcccaaaacacaggagtagggtattacgcttctcagcggcccgaacctgtatacatcgcccgtgtcttgtgtgatttcactctcgcgaactttccacagaccaagagcttagaacctcacccagggcccccggccaaaccggcaaaggggggcctgcgcggtctcccggtgaggagccccacgctccgtca

SEQ ID NO: 22964 - DNA, 7113 bp, Oryza sativa
taatcatttgcttgctggtttaatcaatggttcagtgaatccctcaaaaaaagaaaaaggaaaatgatttagtgaatcgtttatttgaagacaaaaacgacacaagaaaatttggcagaatgaggcatcatcaacaaattatttacgacagaaatatgaacattagatccaccagttatctgtcaaaaaaaagtatgatttgatacttacagtcccagtcaacatattgacaactatgttgggcagcagttttatcaggtaggtacaggtaaaaaataaaaaatggaggcctgatgtccctattttacatcttcctagaaaaatcaggtaagctcaaattgcagcacaactgcatgactgcctaaaaatatgtttttttttaaaaaaaaagaaagtttaaaggatgccaccatgtgcaactgcacttcatgttcttttccagaactggtattctggaacaactttctctcaagtttcaactggctttaaggttggaacaatccctgttttcctccatattagagcaatcatcatccagaaaagagttatcaacagataatttcgtcatatgcatagactttgtaaaagctccacctccagttcttcatcatcaagttatgtcatgtctgagcattgtgtgaggcgccaattttccgaaaggttcctagcatgtgatgtcgaagaattatctttatcaggcaatattcaagtctttatatctaactggaaagtcttccattaggtagcgattatcagctttgggaagtgacaatggcaaggtctcttcgtccacagaatctcggtatttcaatggaacgacttcaatcgaaaacctattttggctggccgactttgaacgacttgtgggtaaagatggtccagtacctatttggaaaaatctcattagacatgatgacatagtagtatctatgaaaatgtgtaaaatgacagattgtggcatactgtcagtcatgtcctttgtcttgtggaggagaaatgtcccagaaaggatggtcacaaaaccacacagctccgtgacaatttgtgttggattttgtcgatcccaatcctgcacgtaataaactatgctatcacaaattgaggaaataaactttccataaggcatcaattgtttcttgaagacagcaacattgtgaaagaaaattaaggtgcgtagtgcacggtaacaacattgtgcaaaattataatcacagcagcatagttagcggagcaggacacatgtagaactacacattaagccaaaaaaaaaaattgttcatagctttctgcaacaagaaagttgagtgtataagggctgaatgcctaatggaagtgatagaaaaagcttaccttaaacattatcacactggctaaaattgttagtgaagtaaacatcacgtaatatattggtgagacaactgctgtattaaaggtgtccaatgcctgcaagtcacagagataaaagaattactattgcgttaatgtaataagcccttatgtgatatgttacaataatggtagctcaataagctacatgttctgtactattgcccagagtgacatttcaatgccccagtgacgagccaggaaagttttacagcctgaagccctggaaaaatctaactacgctgagtatatgctgcaattctattttcaatccctacaatgatattaaaattctattgcacattcaccaacgatcccgggtggctccaccactgctatgccctacatattatttgagctagtgaagattcttttaaggacaggtgcgatgaagttgtatgaatgagacaagctgttagaagatcccttaaactcaagttaaatctcttcatgtaccttatttagatagtttatctgggtgctcacacaggtggctacaattagggcaaaagcccatgtctgaggatagaataactggttcactcctgagaatgttaacttcaatgcaatgccgagagcttttacactcatcacctgttaaattctcaccatcagatagaacatggaatttagttgaaacaacagtagaaaaaacaacaaaattgattatgattgggtcatatatttggacaggaagcgtacagtgagagatcctagaagagaacagactccgatgtacaccatgatgtttgtttgtccatgttgagggacaacaaaatatataagcaccagtgctgcggcaactactatagcagcgtagcaaagaaaacctggaaacaaagggaaaacaataatgaatcagacattcagtctagcccgtggaacttacagtaaggctgctgagggctatgttatgaacatattttaatacagtaaatacctggttcagttgcaagatcccaaacttcccttacagaatcgatgttgcgctcctgtggagcatggagtacaattgtgatagatccaactacacaaagaacacaaccaagtatgccaaaggtgtgtagtttctcctgcagaatggcgtgtgcaagtgcagcactgcacaaattgacaaaagattatggttttgatttagcaactagatagcaaaaacaaattttagcaagtttcttatttgattcatctgaaattacctgatgattatactgagtgccccaagaggagtaacaagaatagcaggagcaaatgcataagcagcaaaatttgcaatttctcccacaatcactgttcacaaaggtcatgtaagatgccattagtcaagtttctttccttagtgacattttttgtctaaaaacaaatgaaacagtaacttcagtatattagaaaatacacatttctgttcacttccaaccaataaattccaccaaatatcttactgaaagaataacaaggaaaaacaacagccctaggagcagacagtagtaagagatattcatgctaaggagccatattcaggtgacaggaaacactttgctccgtacaatcacttttcatgccccagttaagctcaaaggttctactaatatctagtcacatacttgtatcaatgtaattatctagaatatcgttttggcttcattgaattcagccccaattaaaaatgtttagtttctcctaatacaaagtaactgtatttatcctgattctcaagacacagaaacatcttattacaggtcttagggagttgacaacttgacatcaacacgagtttacatgaccaactaaccaggtaacagacaataaagatctcatcataatcaaagtgacatcaataaggaaaaaataattgcaggataatgtttgagcagagcaagctatatgttaagatcaaaggggaaaaaactgataaatccaatgatagaaaaaaaatattgtgcacataatgtgacagaaaagaaaggaacattttcaagaagtacaaaatattgtataatttaaaaaggaatcaaatgtggcttactagaaatcatgcctatccaccatagaggctccattaagtaagaaaatcctccatatcctgtttaatgcaaataaagaaaacatgtgacctcctgcattgaaacttgtagagcttgcaacacaatagcttatgaaatatcacacgaataatgaaagtgcattgatctgacatcaatcatttcaggtaagtgcataaggacatagatcaggttgagatgtaagtgcatgttttgttcatacgttaccactaggctgtcctaaagtaagctattatagagtaaagtatcatagtagttggttggtttgataaaatattgcacatgtgacatcgctatcatggaagtgaaccactagccagccaaaaagatgtaatttcgtcctggcatactgaagaaccatatcggttagccactaatcgcagaagcaccacaaccacctagcaatagaaacaacaacccgaaatttgacttgactttactctttccgcaaaccgaatcaaacaaaatccacagtaatcatccatgactcgatcagatacagcttacgatccagaaattcaaaataagcaaagcattggtaccacaagcattgaacatcatcttgtataaatatttaataatggaggacaattgcaaaaggccaaggataccaccacaaaagacaacttttttccggactcactcatcttagttccaataaaaaaaaatctcacaagtaacaaatgccgtatcaaatgaagcaagaaaaaaaaattcttcagagagtcaactgatcctccttgcaagtaaagtaaagatccttagactcgattagaactacttttgcaggtagaactttccagcttccacgcccaaatcattgcaatccttttcacccgcgagaaaagaaaaaagaggaacaaatccatccaatcgcgaagcaaaagatgtctctgacaagattcactacttgaatcaaagctatatttttcacatcagcagaatctacccgccaaaacggcgtcacctgtgcccccaaaaattttcaccttttcccagcctctctctcctctgacgagtgacaaccaaatcaagattctaaagaaaaatttccaaaaaatatttctactcccatgagaaatccccttgactcaatcagactatcaatttactacccaagaacaacaacctcgccaaataaaaaaaataaaaaaccaaagcagaaacagatccctctctctcccaccgagcaaaccaacaaagcaaggaaagaaagctaaccggaaaccgcgtcgccatggaaagcaagatcctccgctcgattccactgcccacgaatccaacccaacccaacccaactcaacccagcgaggaaaccgcgtagaccctaccctccccaaccaccgccaccgacgaacctcacaccggcgcgcggggggagatccaaacacccagagagcacgcgcgcgcgggcggccgcgaactcaccagcgcggacgccggagtcggcggccctcctgagccccatcttcttgacgatgaagctcgccccgatgaaggcgctcgacgacaccgcgaggaccagccccttggcgttgtcggtggacatccccgcgagccccgccgccgcagccgccgacgcgggcgccgccatcgctgccgcagccaccgccgcaacctacacttcgcccccgccactgcacggttactactccaacgccgccgccgccgacgaggaggtcatggaggtggaggaatcggaagcgggagggaaaggtagaagaagaagaagaagaaggtgagaagaagtgggaattttaaggggagggggtgtttttgcgacggggtcctcgaggattcgctttattaccaaatcctattcttttttgggttagacaagtagtatccgtttttagaacggtttacctaaatattaaaaaaaaacttgtctaactcttctagtttttgttggattaggcattgcattctcatctcagatctactatatgtgttgttcttgttgtaaaaaatactatccttttataaattattaaattattgctcgtgttcgcaaataaatacttgctatagtttattttatataagtactcgtacaaacgaagacaccaaaaccacattgggaattgtttatgtaagtgttcgtaaaagactcttgtatgtatgtttaaaattacttatatttgaaatcaaaagtgtaaatttctatgaggcagcttcaagcttatcaaatttcatttattcacctatatgtctgcagcgcggtatataattctatctttaattattgtcataataaaatctgtctaattcttattccttgtttatttttcaaaaagaaaatatacatatcttatttaactcatataactgtttcctacacattattcgtcatctcaattaatcaatcacaacattctcttctttaattcatccgtctattttcgcatcttaacatatcatcaccatttctcattcaaaccttaatttatacttaaaactccttaaaaatactcatgtctcgaaaacggagtgaggctgtgtttgcaactcctttttcccaacccatctccctcgttttccgcgcgcacgttttttaaacagttaaacggtgtgttttttacaaaaagtttttatacgaaagttgcttaaaaaatcaaattaatctattttttaaaaaaaatagccaatacttaattaataacgcgctaatggaccgctccattttccgtgcggagagaataagttctcaaccaccccatgcgaacacagcctgagtacatgacatagaagcactattcgtatcatacacgctacatatgcatccggaattctaggaggaactgtggtaaacctaattattgggattggtcaccatctagtagtacttaatatgactagcacatgttcacttcaccggtgggactttactactacgtgaaattcctcctcctttcacgttaaataaaccctttacaattatcgccacgttctcctatcttatattagcaaaagttattatacattgcattagagagaaaaaaaagtaccacgaataacaaagtgagtttgttaagtttcttgtgatgcaatcagtctatccggattcaagttattgagttgatacggatgttcgcatttacagattattgtttttcagtggtaaacgacgtaaccatcgacaacgagacacccataatgacgtcattaatcttaaaatatgctgaccaatttttcgagcgcattcgtaaattttaggatataatatttcgttctttccaagattagagtgtgtgtgtgtgtgttttaacatatatgagtgagtgtgcgaacgtgagtgcgtgcgtatatgtacgtgttttttattaatactgtgaataagtagtataacgagtcctaatttcacaataccgagactcccaagggaccaaaacgcaaagagccccccgaaattccaggtgaatcgaaataaatgtgtttcggatggcagggcgtgtcagaacccacccaaccacgcggctgtcgcgtcgtccgatccgtctgtccatcaccgcatcggacggtggaggcttctcccaggagaggccggggtggcgttggtacgtggggacggttggtctggatttttcacattttggtccttttaaaaaacttatttcacaaatagacccctaaaaaaacttatcccagaaatggtcctttttggggc

SEQ ID NO: 22965 - DNA, 13511 bp, Oryza sativa
gccagcatggctggcgccgccgcctccatacctgtttccctgtatggagttgcaacggtgtcatttttattttattttttcggatgttttttcacactcaggatcacgatacaaccaaccacaaaaaaaaattaaactcgaactaccacttagctaagtctgaaaatatctagcataccacttagtctactttgcaccttcactaaaattagaccataactcttttagtaaaaccctttgatcagcatgttaaacataatgcactctaccactatatgaaattacttaatctaattcaaaatataaccacatgaaatgacatatataagttaaacagtacatagagatgcaattttttttatttttatttcatttttttgatattttttcacacttaggagaacataggaaccaaccgtataaaaaataaactcaaacggacaaaatatgtgatatgtagaatttttcaaaactctaccgaaatggacaaaatatgtcatctattaaaataggcataactttctcatacggactcggaatcaggcaaataatatatgcacggacatctacagaaaaagttacatccgattctccccgctttgtcgggttcggcgatattaaaacctccaaattccgcttgcaagattgtgttttcgaggagagaagtttttcggtggagctttgaaaaattccatatgccacatatttcgtccgtttgagtttattttttacatggttggttcttgtgagttcctaagtgtgaaaaaaatatcaaaaaaataaaataaaaataaaaaagttgcacatctctctcctctgcactagttcggagagaggagaggagaggaaaaattctacatgtcacatattacgtttatttgagttcaatttttctatggttggttcttgtgtgtccctaagcgtgaaaaaaatatcaaacaaataaaacaaaaattaaaaaattcggaggggggggggcgccagccactctggcgcactccccttagccacctcagcatcgccccgccacgtcggcagggggacggcgccaaagaggctggcgccgtcctgttgaacaacggcgccagccactctggcgccccaaaaaggaccatttttgggataagtttttctaggggtctacttgcgaaataagttttttaaaaggaccaaaatgtgaaaaatccaggacggttggttgggttgggacgggttcgggagcacgtggaatatgcccttgccctcctgtagttctgtactaccggatgaaacggagcaaggaatccgccacgctggcgcctcctctccattttcatggtggctctcactctccaagcgaaaatggatcggaattacgaacgctgatggcatgatcgtagctaggcccggtttattccctaagataaacttttcaccctgtcatgtcatattaaatgttcgaatacataagagtattgtaaaaaaactaattacacaaattacgtataaattatgagacggatattttaagcttaattgcgtcataatttgacaatgtggtgctacattaaacatttgctaatgatgaattaattaagcttaataaatccgtctcacattttacaggcgctctgtaatttgttttttattagactacgtttaatacttcaaatgtgtgtgtctgtatatccgatgtgatatgccaaaacttttcatctcgcaaactaaacaaggccctactaccttcatgtcaaaatataaaaacttattatcggattgaatattttgtagtataaaatatctagatagaaagtctatccaaatacgttgtattaagaaacgtctcattcggtactagattcttatatgttgagacagagggagtacgtaaaaaaaacagtagcgaaagagaaactcttactattcccactatcctagttcatacgtaaaaagacactttttagaaaacaaaggtattactagtattgaagaaataaaatgtctcaatttacaaccgaggatagttaagagagtagaaataaatttattttgtgataaattttaaattgtaggaaacttattttgcaggatggagggagtccttatcagatgcaaccaaaactaaaatttaaaatgaagttgatttgggggtccttttctttgtagtttattttttagcattggcttttaaactgatagtaacacaacttctaccgataatttacttcacttgctagtcgtaactcaaatgatcagaacatctgtctattttcttgtgtcttattggtgatgtagtttgtgtaagtaacaagttgtctctgtttcatgagaagccattattatcatgctgtgtaacttcagccccgttcttttctccaataaaaattgtataaatttggatattcatggcacgcttttcaaaattactaaacgctgccgtttcgtgcaaaatttttatatatggaagttgctctaaaatatcaaataaatatatttttcaagtttataataattaaaactcaattaaccatacgttaataccatctcattttgtataaaacatttcatctttattacgagtttcaaacaccatcttcatttcctaatggataatcatccatttataagtcatgggtttggtcttatacctacagaccttccatgattttgatattagaattatgtttgatgtacaattcacatactctctgttcaagaaaaaaaatccaacccttatatcctgaggtaattttagttgtgagaaaaaaaatactacataacccctcgttaatagaaaatgaatatgttggatgcgtaggtgagcggtacagaaggaataaaagttcttgatcaatgaatcaatagtaggtaaaaatgtagaagtttaaattttaattttaggattgagtctatctgagacacaaggagtactataacagctggtttaatttggtactacaataaagagagtccacgggattttagaggattgtttctattacaaatctgaacggcttgatggtttttactaagtccacattgtgcatttttcagatagtactccgctgacttaaaaaaaggacaaaatgcagtgcaagccagccaaacaccgaaacacgtatagtactgtagaagtatttatatttctgaccaaatacgtccatgtcgtgttctgaatttaggacgtgggagcctctatattgcctgtctgcctgacatagattttcagccaaagccaaaaataagaagattaaaaaaaaaaactctttgttcagttgtgccaacttacacacctagaaaacggagagaaattaattaattaattaatgctatgtcctactcctacagttgactgttgtcaatgtcactccgttgtcctgaaccaatttttttaagaacaatttgtcctcaactttggcccgtgagtgacacagaagcagagggacagttattatagttgcatttgctccaaagcaagtactacaccaagcaaagtcagagtgtttacagttcataatatctgtttttgtttcctcctcgtttaagccagggctgataaaccgtgaaataattataaaaacttctaaaacagtatgtgttattagtggtttaaaaatcaatttttaaaaacacaaggataaaaatactctaaagtcaacttgttttaaacttcattttcaaggtgacaaccaacagactaacaagctattaaggtaatattgttatcgttttgcatacaactaactataagtcataacgcttactaacgataaaaaaaaatgatgataaaacttttataatgtgttctgaacgacttaaaaattcaatgctaaaaaataaactaggataaaaaaaatcaaaatcaactatagaaatattttttaatattaaattctttgttgcagttgataagttaaatagcaaacggtacaattcacagctagaaatgcgaaagctgccgctactgttagctttggctacttgccagttgccactagaaagctgctcactcagcaagacagcaacagcttatcttgtctccttgctcatctcatccctcaccttccccttcaaatgctttgcattacatatttacatcaacattccatagtggcaaaattgcaaaaaaaaacaaacaaacaaacaagcaaaaaactctagagagtaggagtagaatctagaatctctctctcaagtactccctccgtactcgtaaagaagttgttttagacagtgacacggtctccaaaacacaactttgatttcttgtttctataaaatatatttattgaaaagtgatatatgtatacttttatgaaagtatttttcaagacaaatctattcatataacttttacatgttcaaacttaacaatttgatagttattcatgatttatattcctaaggtttgacttaaaccttatcctaaatgactttctttatgagtacggagggagtagttatttaattattcagataattcaggggatattttagacggtttcatatttcattttcttttagaaaaaaatggtttcatatttcggggctgattaagtagaaaaatcccgtagtataggaggtaaatagattatacatatttctttctaacgtgaagatgcatagatatactatttctttacttatttataagatacggtatagttggactcatgtaactaatcattactcaatcgttacaggatcaccataaagtataataaagtataagcatatactcttcgtctcaaattaaaaaaacccaacctagtattagatgtaatgttttctagttaacagtacgatgaatctggacatacttctgttcagattcaactagaaaacatctcatccaatactatgttaggttttttttttggacggagggagtgtggagtacctgattacttggttagtggtttacaataaggctggccgtatttagtttgttgggtgtaaaaattttgacgtatgcggacgtatatttgaagtattaaatgtagactaataacaaaacaaattataaattccgcctataaactgcgagataaatttattaagcctaattaatccgtcattagcaaatgtttattgtagcatcacattgtcaaatcatggcgtaattaggctcaaaagattcatctcgcaatttacatgcaaattgtgcaattggttttttcgtccacatttaatgctctatgcatgtttccaaatatttgatgtgacgtttttggctaaaattttttggaatctaagcacacctagtgtttagttcccttcaaatttccaaaaaatccatcacatcaaatgtttggacacatgcatggagcattaaatgtagacgaaaaaaaccaattacacagtttgtatgtaaattgcgagacgaatattttgagcctaattgcaccatgatttgacaatgtggtgctacagtaactatttgctaaggacggattaattatgcttaatagattcgtctagcagtttatatgcggaatctataatttattttgttattagtatacgtttaatactttaaatgtatgtctgtatacataaaatttttttttgacaaggaactaatcacggcctaagttgtaaacatgaggcccagcttggcatggtacaaacaattttagcttttggaactcacacgaagatgtgacaaaagttgttgggtacaggccaaggaatgcacggtgacatgtctttgatgtcagctttgtgtcttgggctgaaaacaccctacaaatgcaatgtacagcctgtactatattggagtactctgaaagtctccattcctactttgctctagtagcctaggatcatgtcataaaatttgaacttgaaagagtgaccttaaaatttgactctagcagctgcattttgtctctaatacgcaattaagtttgattgattttacaccagctggcaaattatacataggactttcatcttctcaatataaaccatccaaatctaatttgtcttgatgtccatccactatatatcattcaattgtctgcatcaggtatattcccattgtattagataacgtgtctttaagagacggctggattgaggtatgatctattcatttcaaatctcctgacaatatgcctagaaaataactataaactcaagtatgatccattcatttcaaattacatgccgttctagttttgtcctaagttaaatatttgtatctttcaccatattctagacacgtgatttaacatcgtgagatttatattttagatttaacataagaaatactttcataacatataattcacgtgttattaaactacacgattttttaaaaatgatagttaaaggtaaaaaatatttaacttgagataaaactgaaacaacagacaattttaatcagcgaaagtagctgaattggaagttctatggggagtaggagtaggctctaaagaaggcactcctgactgagtagtcacatttcaatcattagccttgctaaagttgctagctagggtacctggatatattaacaagggatttactaattaatcacctcacttagctaggtagcattcatagcaaaaccatcattatttttgccgccacccaatgatgaagggaggtcagggggaattgttgaccagcatgcatatatacccagctcgcctttggaggctgaacatgcaatgcggcgacatggggccgaaatgaggtatgatttatttttttagataatagaagctttattgatctcagtcatctgaagatactttcggcctctgcaccacgatagtgcacacagccaacaaactccaacatactcaaaacaagagagaaaaaaaaacagcatgcaagatcaatgccctataacccgaagactaggtcgccacccatatatcggggtaaaaaactccttgaccacttgctccaaatatagacaagccgaagtgacaaagtcctgcaaattgggtttctagagaataacccatgatcggagccaatgtgtaatcaagaaaatagcctgcaaaggagaagaaacagctttcctatcaaaaaccacatcattctcatcattccttgagagctaaattgcccagcaagttgttgccgcccctagtaagactagaggtctaaactctttggtatgtcataaaacccactgcccaaacatatgtgacacgttcctaggcgaacaaatgtttgaagcaatctggattagagaccaaaccgaccgtgctaggcgacattcaaaaaataagtgttttatcgtttcttctttgtggcaaaaacaacagatcttactctctttccatttccgcttagccaggttaacttttgttaacaccactcctcgacgtagataccacaaaaagatctttactttaagaggcatttttaacttccaaatagttttgttaatattgggagctcccgtatgagccaaagcaagataatgagatttaaccaagaatcttccagctggtgttagattccatttaaactcatcttgctcatgtgacaaaactatattagcgatgcgtgggaatagatgattccatgccactaatttagagccaataatatccctgcgccaagtgaaatttcatgaggtatgatttaataatggatggtcacctagctaattatgcaactttatatctatatctataccttattaaaaaataggtaaagcttctgaaatattttttgtccgtgtccgtctttttttccaactgtttttttccatcacgcttcggtttggtattcttcgatctcatctgatctattgcacgccgccgccggaccaaaacctagcattgtcgccacatcatctccccgtgtgttttatccccctattgaattttgtggatttgttccaattttgagaaaaacggaaagagaagatcgaatggataaaaagccctcaaccaattttgatagattaagaagaaattggctggatttgatggggatgaacggctccggcatatatgcaagagactatctaaaggtcggagatggcagtcggctgtgtgagttgggcctatggctccacttgtgggctggaccgaagagaggtaggtcatgcggagggaagtaacggaataggctggggctaggaaggaaagaatggactttcatcccaaaaccaagaagaatttttattagctttttcaattataatgtatagccatcctaatgttttaatttattgctcagtttctaatagctattgtatcactgacaaaacgtttttatccgttgcaacgcacgagcttttttagttagataacaaaagcccataggagttctgatcaaagttttaacaacggcttattctttctaggtaaaggacaaggccataaaggttgatctactccttgtatcctagattttaattgaagtgtgcaccatggacttgttttggataacagatagtactcgtatttcatttgtagggaacatgcatgcgcatcgatcttgcatgcaatttatgagtggaacactttttttttaacacagtacaggcgcacactcatccttctgaactcacacacacaaacactctacccctatgaacatctccgagagactagactggtatatattgagattgatgaagtgtttatgggtgtcttgctctcgacggacacgtcgcctccaagaaaaatgcttcgtagaggcatttttctaatgccatagaaaacaattttaaaatacatttacaacactatatcatttaaaaaatatgtaatgcgtgccttattgtgaattaatatctacaaacgaaaaatatccgtcttgtggcatttcaatagaggcgattttttcatgtctataagataaatccctctatgtctcgtggtattttaatagagacattttttatgtctataagagggtagatgcattttctaaagatattaaatttcaccataatcatatcaaaccaatgttgaaaaaagagcataaactatttattcttgctactgtcaatccttgaactcaagatcttttaggcaactcattattatcttcaatgcgttgaccaacttaacctcatgtcaatacttgtaaggttatggcgtgtgttacttatatttattctcttagtatacagtattattcttttttagaagtgtctctgcagagtttaaaatatctcaagaaaatgtctttacatatcaggcatattttaaagtggtgaaagaatacctctacaagagaaaatttaacaaaatatactaaaaatatctctagaataaaagttttttaaggcaattcttgaaagtgcctctgaaaattgtctttacactgtaaaactcctaattttatagacaatttgtaaaatgcctctgtgtgaggttttttgttgtagtgcaaaataattagtcataaatatgaatacgcatgtcaagttagcacttaaatctggttgggtaggttccaccataaggaattgttaacaccaaaaattggtatggtcttttagtggattcagttatcgaaaaaagccaattggtagaacaaagtttatcaagatcaagctgaattcaaagctgaattcaaagaggaatcgtgaagaccatagcaatacagtttcgtatttccttaattaatatatctcttagataggtaggattagttatgctccttttcttgttaggaaatattatttcatgttcgatatagacttgtacctcctcgagggtataaatatgtacacctggagttttttaatatcatccacagatcaatacaattatatttcggaaccggcaacctttcgacgggttcttgtttttgggcggggctgcatcgattaagttcatcttcggtgagaaaccaagttcagggccttgctctcaagttgggcttcatcgtttcaatctccagtgaggaaagtaagttccgtcaacttcgcttgtatcaatttggctagaactttctcggttatgtccaatattctattcaagttgatgcaagcattgcctatcagatatatcgactctatctttaactgcatcgttgtttagagttgtattggattaattaggacttcctcggttaggtccgatattctgactatcttggtatttctctaatcacattgttgttttagattgtttcaatatatccatcacaattgtgtagatctatcagctaaataggtttttcttattatcttcaatcttatattatctcggttaggtccgatctattagattgctgctaataagtttgattctactaagtcaataggctattatacaacgttttatcggagttctagtcgatgagttaccattgctagctatgggctttagctataagatatatcggttagttagccgatgtatatatacacactatatcagtatcggccaattggtttattggttcaatcctttctattatccttgttagttgcaagatcaaactaaatgacacacctgaacctcatcaaaatttaggacttgcaccagagctaaggaaatctcttgaccttcgtgtgtggcaccagattttgcatcaacaggaacctagctaactaattgagttacgctcactgtgcaaatggaacacgttattaacattagtagttattgacttactgcaacatctatttacattttgagccattgcatgattatattatatatataataactcttatacaacaagtatcaaatatattaaccatcattgcaatgtcgtttttataccaatattttccatgggacgtacgtgcaattaatcgacgaaagaggcaggcttctactcaccaccaaatatttgtcacatatcaaatcaagaaacaacgaaaaagagagcagttttatgcacagttcatgaatttggatcacaaagtagttattgcaactttcttcattccattgagaactataggtatatatatgcataagagtagtatttttgccattgggatgtatgattaaaacttggtatccacgcaagaatttaattgtaccaaaccgcttctggttatcaaacatggcaatacataaatattttttcattgtagtataatcatgtaagatcttgttctgaagatttaattacaacgaacacaatggtgtaatcggattatagatcggataaataatttgagagaaaacttattaagaagggggaaatgcatgcatatgtaatagaaaaaagacttagcatgtgtactggcttctggcgttgcgtgataaggcaatttcgagaggcctctctgattattttttgcgaatttgtaagctatcgtgaagaaaggaagattatacagattcttactaatttatcatagatgaaaaatctctatgtttgatgtggtattttaagtagttttcttgtttctaatcaaactgggactctaactcgtagtcatccgtcctataacctctgtaataattggttgtatcttcttttaagtaaagaccggaatgaattccattattaaaaaaaaaacttggatatgtatagatattttgttttatgccatcgtttgtgctacagtagcatagtatgctactgttatatcctccaccatggtatagaacacatgcaaactataaaacataaagaaaatgttacatctttttttgtctcttgcgagcttgattctatcaaatgtggttaataccacaacttatacatgacatctgattgcatgttttataccccaaaactgaatgacttggtgaatttggaccacagcttgtgacaacagctaagggggtgtttgggaattagagactaaatttagtccttgtcacaaaacataagtcccaaacataagttctatgtttttatgagagggactaaatttagttcctagttctcaaacacccccttagctgttgtcacatgtcctcaccaaatgcctgccacaccatcaaacaaccaattaacttcataactattatgtgtgcctgtaattaatgttgttctcacaggaaagctcaattccatgcagacaattgtactacacagagtccaagtcttcaagatttttagtgagtcatctactggaccagcaatgccgtggcttctgagcctttcatgccatagacttggtcacttggacaaggcccctcaatcctcatgcaatggtccattattcttctgaatttatcctggacaataatatgctcagatccctggaacttggataaatccaagtatatttcttaaaaaaactacatttttcttctcaaataccctgattttctttccaaggcctaaaatctttaggcatattgacggagcgtggggctcctcaccgggagaccgcgcaggcccccctttgccggttcggccgggggccctgggtgagattctaagctcctagtctgtggaaagttcgcgagaatggaaaaagcacaagacacgggcgatgtatacaggttcgggccgctgagaagcgtaataccctactcctgtgttctggtggatcaatgtatgaagaagctccaaagagctggagagccagagagctcttactctagaaaccctcttctcccttttttcctctcgtgggatctattctccaaaacctcctctcctcccgtcccctatcctaagtgggcaaggtcctccttttatctctccaggggataccacatgcaccacttctacctatctctcttttgtgtggggacttatcctctctttactcaaacttggcttgccttctctagaaagctaaaaacactgcttgtttttgagtgtggccacgcgtcctcactcgtctgacctcggggatcaccttgtcatctcttcataaatgggcggagacttgcaatggctgctgtccgaatgaccttctgatgggatggcccatacctacctctactccgccggaagcaggtgcaacgtgggaacacggttgtctgccgacgacatgaccagtgtcagatcggtcacaaatcggtcattcttgtccaccacgcgtcagtctagcaatctgcatgttcgcccttcttcatacaatatcttgcttgtaatggttaggatgaagcctggcatatatctgtccgggaccaacgtgccatctccaggagctaacacgccggctccggctagggacgagtgcttggaggctctcatcctgacgggatggggcgaggcgtgcgtcagaccgcctgtcgccacctaacccacgatctgaccggcctgtgactggtcacagaccggatagacgagcgcgctgcactgcgttatatgcggtgtgacgcgctcgtccaaaccgcaataaatgcggttaggtgagccccgttgtgctcacctaacccatacacgcggcgcaaaacccacaaggggtcggggcgcctcacccctcgggggcgaaacgggagcggtccgacccctcggggagacaaagaggggggcggccacatcaccctcgggcccgacccccccgagggggtcaggccacgtgggtgattgctcctgcccaagcctctagtcatgatactcccggtcccatgtcaccgacacatatggacaaaaaatacgggaaggcgtgtcaa

SEQ ID NO: 22966 - DNA, 12031 bp, Oryza sativa
tccgactctatcagatgactacaacgttgatgtacgcgccgtcagcagcgtgcagtacgaatcctcacgccgtctcgcaatgtgttgctacgttgttttggtcgtacgccggttggatggatgggtcgtacgtatagcatgattcttttaatatataacactattaacttttagacatgataagatgagtaatcaaatatatgctcatatttaaaagtcaaatagccttgtatatttttttaaaaaagaggaaacatgcttttgttcaaattaattgtactagaaaacatcacatcttatgctaggttgattttttatgagacggagagagtaatactgtttatcctatacaagttgctgacaacgatacaaagacaaaggtagtgataaataccaaactagcgatatggggtccttatgcttgcaattgctgctagcatcgcagcgaaggatccaaatcactgaccaattcaaacagtacgttcttactgtagcaacagggtgttgatgctggcatgttgctgtgagacaaagctgtactttgctcattctactgtaccagttcaatctaagccgttgatcatctcatgtcctggacggtagagaatgttcccccaatgcaccatttactgttggcctactccctccgtcccataatataagggattttaagtttttacttgcactgtttgatcattcatcttattcaaaaaaattttagaattattatttattttctttgtgacttactttattatctaaaatactttaagcacaacttttcgttttttatatttgcacaatttttttttgaataagacgagtggtcaaatattgtaagccaaaactcaaaatcccttatattatgggacggagggagtatatatgttgtcatggaatggggatcacattcatggatttgtttgatttgtatcaatcatgcatgagatgacttgtcacggtcgtacgtgcaaatgtgtaatggagaatcatattagatcacctttagtacacacacaggaatttaagtgccatgtacttagaatccctatggtttttaaaagggcaagaaagtttcgtaattgtttctctgatggcactagtcatatgtccatacgttgcaacaggattttcagaacgtgatttaatttgatatgagaaacatggttcaattttttccaccctatttttttttcggttggtttcagtttgtcttttcactggtttttttttaatatgtaggataggaggagggaaggggagaaggacaactgcttttacctagtagagaaaggattgaagcacttacactacaaagagataacatgtggtaaaacttcaaaaatttaattcccttgcaagttcctattctctatttttgaggagtcctaaacattgtaatccattgtatggaccaactattactaaagaaagacaattggacttacttttttctatgagaagtcatgtatttcgaggaaaaaacaagccattctgacatttttgagttggcaagagaaaagttatatcctcaatgattgggtctctacttctataaataaacaagtagtagtagtagtaacttcttttgagtcaaaccatcaaaaggttccagctcccactgaattgccaaatctttttcttataaaaatgccccaaaaacatgagtgttccacctgttaagcttttttacttgctaatgtcggatcgatttatttacagaaaagatttttttatgtatattttggaaacgtgacacgaataatccgtttagaacaaggccttgccactttgtgcaactgtacaatcagccatcatgtccttccaaaatttttatcggtgttgcatcctacatatatagattctgctcgatttcattcgtgctagtttcagttagcaccatgataactagatgatgcctcatacgcgttgctgcgtgacttggttaacatcaatttgttagataggaggtacaatctcaagaagaaacagaagaaacaaatagctttcttggaaaaattctttttagcatctctatccaaaatttgtagataatttaggtagcacatgtcaactaaaggggcgtttagccataaagctcttttatacggattgacgggctggatacatgtaaatgtatgtggagatgggccaatgtgttcatgtgggctacatttggcactgaggaggcaaagagacttactcggtgactaatgggttgggcttatatgctggattccatctaacgtctgagaagcgatctaacgcattcatccaacggttcacaatttgatgatgacatggacagtggcgtagctaggaatttttcgttggatagtcctatttcccatgacgggggataaaaaaaatttaggtgtgaccaagtacccagtagatagaaaaagaatgatgaaaaacaagttatactacaatatttacaaaatttgtccatagtcgtgccaacttatactacaattttaatatcaccatactatctaatatgcatttacaaaatttgttaaagaccgcctaattcaaataaaccatcaaaacataaacaccatgacagaaaaaaaagacagctagctctaatctaatcgtataaacaaactcaaaacttgacaaaaatgcaataacaaatatataacactctagagttgtcaggctaactaacaagtttaagaagcatgatatatcagtaagtatagttcgttttgcaaatgatccatgaattgtaaagactgaataagagcaaatcaatttaagagtataaatctcaaaggtaaatacgaaatgctttagcaaactttgtggccaaagaaatttattttgatagtggggattaaggtctctaggctagaatctagggtagtcctgtgcccatatagaccaccagctagctacgcccctgaacgtggaagcacgaggtttgagcttttggccttaacttcatagtaaagaaagaagagattacatactctagatatcccacatgcctatgtttgaattgttggaatctactaaaaggcatacctagtaactaaaataaatatttcccccatcccaaaatataaaacttttagccatcaggatttgtcccaaaatatactccctccgtcccaaaatataagcatttttggatctgaacacggtctccaagatgctattttgatcaacaatatctacaaaagtaaaatgtcttgaataaaaaagttgcatattatgatagttcgtttaatgataaatatagtaacatcaaatttacatgattaatctttttaaatttttcactattaatagtcaaaatttaaaaagtttgacttggcactattttaaaaatacttatattttgggatggcgggagtaacaacttttccgccaacattcccttcccaaccaatcacaaccctcaaccattcactttttccacctacctccactactcatccaaatacaaccctacaccatttacttctacctactttcttaataaccgtgtttaattctaaaacttcttatattttgggataaaggttgtacttgttaaacactctctagcttactactactatcaactactgctgctgctggagtactactacacccatgctcaatgtgtagcaactcaatgtgtctagaatcttatcacatcaagctaactacacccatgagaaacaatgcagaggcagccaagacaatctgtagcattctcttcctttttgtgaaaaccagtgctgaacatctcattcagtcatctttactctttaccagaaagtagcagtactacatgcacaacagcatgcacagagtaaggcagattccatctttccaagcaacatcaaacatctttggcagaaagccatcagaaaaaaagcaatccctgaatcatctgttgggctctgcataactgcattgctgctgttgctgttgctgtcacacacatcctccctccaaaaaccattcaattgctcatgctgctgctcctgcacatgcctgtctatggattccagcttcccttttgcttttcaatcacactaacaatgcaacagcaatcctttcttttttgttactacaaaatttttgattggttggtccaactccagtgcaacaccttgcagcttatgttgctgttaggcaggtcagatgcgtgaacattcttcctagggtggtgtatcactgtatcctacagcctttgtccctttttaacactggttgtatatagtaattagttgcctgtcatttgggataaacagtgcacactattaagtaatcagcacatcatcactgcataattattgccatctgatctgaagcttcaggggaaccatatccctgaatttcccaacagctgcagatttcaagtaggtactctagattaggatgctacatcctactacaccctagctacacaacctttgtccctcaactttggctctatggccctgtttagtacacactaaacttcccccaaacttccaactttccatcacatcagatcatatccaaaactttcctactcacataaactcctaactttttttttccaaactaccaactttccccaaacttctccccaattccaagaactaaacatagcctataatagagaggcagtggatcaagcctactccctccgtccctaaaaaaaggttaacatagtacaagatgtaacatttccgagtactatggatctggacagaggatggagtgagtaccattttgcataaacagtgaaaactaatcatcatattatcactgcatcattattgccatcttgtctgaaactctgaatcttcggggtggcaaccatatctgaatcctcccaacagctgcacatttcaagcaggtagatgaggatgcttcaccctccatgagtgaccacttgtcatacaaacacaaattgtagctatcaccattcatctcatatatatatatatataggaggaaagtagaccgagtaatggtagtagcagtagatacatcaagaacacatagacacatacacatcaaaaaaaagatttgcaacctcgttgcaaaccatggaggagttcaccttcttcccagcagcgacgtcgcctcgccgcgatcatcggctcggcctcgtcggctcgcctccaccgctgctgttcgccgccgtcatcgaggtcgacgacggagatgatggagaggaggaggagaagatggacttgctgtgggaggacttcaacgaggagctggctcgcgcgccgccggtgtgccctctgagcccgctcaacatcaagggcggagggctgacggcgacgacggcgatggccaaggacgacggcggcggcggcgagaagcaggcgaggcgcatgtactccggcagcgtggtgcggcggcgccggagatggagcctgctgctgatgctcaggctgctcaagaacctcttcttggccaagaacacgaggaacaacccaagaactgcacccatctgaagcttttccgaaacgatcagtcgatcagattttttctggaggtttcagaaatcaagaaatccgagagctgatgatgatcttgatcacgatgatgatgatgaggatgagttatatacacgagtgtaaaatagtaatgtgcatatatttgatatctattagtactacatgtttgatgtttctgtcacaggacagagtaacccaaggaggtaaatttcctctcttttgctgaagtgtgtgttcttcttattatctatatatatatatagtttcctatataattatctgtttctgttcttcactctgattcttcttatgttatatcagttatcacaatgtatattggcatctcaatcatcaaaaattttatttctgaatcaagttcaacaagccctggctatttctcagtatagtactgattgagatcaatcattggttccatctgaattttgcttcatcatataaagatatctgaattttgtttgtaaaattttactgtacacctgttcctacagctgcatttggtttgttgtcaccaaccttgtagatgcagatgccttgccatcaaaacctaccgaaatgagggagctattaaatgtcaaggagcaggccaagttttctggtgaattcaccagaaatctctatgtgaggcagtgccagatgattccaagtcttcagcttcataaatgttgcaactaaacatcacagccaaaacagaccaggatcagggtacaatcatttgtgctgcatcttcaggaattctaacattagtaatctcaatgccctatctgatcccacagtttgcatttataatctttctcttctagtaataagatcataattttaaaaatgtccagacataaatacttctgtaatctgtactgtactgtactgtacttctgtaatctgtactgcatttcagttgatcagtgactgaaaaattttcaaactctcacctaacacatcatatagatatctactatttgatttagcagttgtgcttactttgttataatgaccagtactacaagtaagtcaatcatcgtagtcatagtacatatcaaacctagaaaggtcatctgaataggacttcctgattgggatttctccattgttcactggagtagaaaggaagaagaaggcctcaggctgggcgaggcgccgacacgtgtcgtctcgtggcaatctgcggtatctcagatctgtatataggcctgtaacaaattgaagcaacagtgaggtcaggtgagctaggcaaaggaagagctgtgagatggattcagctacctctaccggttggtctcaaacagcaggaattggttgtgtactctttcttgtacactgtcagaaaatcttggcaacaatctgcacttgcctgtcgggcatattcatgcaagaaggggaaacaaattattctcacatcataagctaatcatgctataacatgactagcagcagagatctagaacaaatgaacaattgctgtagcatgaaactgaacctgaaactgaatcaggattgttctactagcataaacaaatctgaaaccgaatcataattgctgcaagcataaagtttcagggtttagagaacaggatcacataagcaccagttcagtaacagtttcccagaaagaggcaacaatcagaaactcttttttctaagctataagatcagaacatttcttagctaacgactaattttcatcaaagcttcagttgcacactagagccacatgtgtgtgcaaccaccatcccaagtaaaagctgatcagatatggtgaagcatatcacaccatctggttttcagatctcaggccagtatactttgatgataatctgaatgaaatcaactacctatgacatatatcatgaaacataacagtaaaaatattatacagccacaaaaaaaaatgcaagttacattttagcattacaatggctgcacgtccgcaacaatagtacactccttaaccaatacaaccaggtctaaactagtcattcaacaacccaaccggaacaatagttcacttatgaactaggcacttattttgtttttttttatagaaaccaacatataaatagttttttaactgccaactacagcctcagatcaatggaattgaagcctccaacatgccgacatagcaatgttacttcgggtcagaacggagtttgtgcggagtaatttctgggacaactctgtagatgtgcacttttatgttatccttctggacaagctcgaagacacacacatcaaacttctccagattgttgccaacagcaaatttgccccagccaccactgaaagaaccaacagaacgatcactgtagtagacatagttaacttcccaagccttcccttgtggatcccagagtgtgatccttttgttggtatggggaagacactcacggacaaattcacatgggatattctgcaatataagaaaatgagttttggtttagatataagaaaacaagtagggaggttgagtaaacatatacagatagtgagcctttttgtaaaaaaaatgtattgccccgagggtaaggcataattggggaaatcggaagtttatctaagaaagatagttgaaaaatactaaacttggctcatttatgatggtattaaccgaatgcttgaaaattactactacagactgttgcttatttatagatcgctctctgctgtatgcagaaactttgtaataaggctatgtcaagatgggatgttcaaattagaacatccaaaactctcaaactatagcagcagcgccattgtgcaaattataatcatgcatgaaagaatcctctcatgcacatattttttttaagataaaatgtctcatgcacatagaaaaagggaaagtgctggatgaggattaacacacggaagtaacattaccatgaaaaatccaacatagacatatgactccatcattatttgcacggcaaaaggattcttagatttaaactctcttgccctttgaagagcatggtccttctctgcttcagttaccggacgcctctgtgatattactgttagttgtctttgaccctttgaaacacctgaaaagtgcaacacagtcaaattgtctacagaagtaatttattagcactacatttaggggacaataacttacatctaccacgccgagacacctcaccagacagaaagcgcatcaggaatggtggatttggtgacttgctagaagaattatcttcatctgagctgcatgatgaacctataatgtgcaaaagtaatttttttgggaaatcatatgaatccttaggattctgaacaagtatgatggaaataaataaataagcaacctctaaccaagagattagaaatatgtctttttgcaattactttgcatggtttggcaccgcgtagcttatggctatgcatggaacaaatcaggaatacaactaaacaagttctataaacgaaatggatgtggcaagtcatttgtgccgttatgcagacctccctggtcccccaacagttcaaaataattgactattaatagtcatcatctaagctgactatgccaaatatgtgtataacactttcagaaatatagaaatgttttacctctggtactgttatggcttgtcgatgttaccttggacttgccagcagaagctcctgcacgttttctcctagaactttcgcaaacattagcctcagatgacttcttaaatacaaccaccctatcttccataaggtaatctacatctctagttctctttcctgtgattccattattttccttcagggcgggagccattttctctgttgtgatagctgcggtgaccatgcccccttcatcactttctgttttaatgatcacatttttggaagggtgagcagagaaagttgatatcttgtcaatgcctgaaggttcaaagactgtcactgagaattgtgaccgtttatcataagtgaatactaaaaattgaccacactgaattgagttatctctgacaaattctttccatccatgcacaaagaagaatccctcagagtctgaagtcagctctgcactccatttatttccacttcgatcaaccagagaaaccatcccagtaggttgattctgaaggcattggttgaatgatgatgggattttctgcattgtaccaaagtataaaatatgttaatttatttttctacactacttgttaacattgtgaactactcatacgatgcaatgtcagttcaaaaacaaatatatcagacaaatacaatatgccacgtcatgtaatttttctataaggcatcaaattgtaaagaccagcaaagcagtcctgacatcatagcctcaaaaatgcaaaattacagaacatacgtgatgtatgactggaaaaactaaatgcttagaccaactaagatcaaaccttatcctgattaattgaattccttcttttcccacaccaaaaaataaaaatgaaaagtaagactcaaaccctctgaaagataatccaacccattagcagaggcccatgttgtgtaagtttttagccgctgagttgaaaaatgaaaggacatcataggcaattttattgtaacacagtgctttctactattctttggccacataaatgtgaaaatgaactaagcaagtttggcagctagccagctactttgggaaaaccacgaaaatagtaaatgtagtcgtcatgaacttctaacaataactgattgtgtgaccaatacacctgagtgttagacaaacctggatttggtagtgggagtgattactctatgtttttctaaagaacgctatgagaacacataccaccaccaaacaaggttaatcaagatgttgtttgctgactatgaaaaaccaactgtgcagtgcaaatgaagagctacatatcaaaatcaatactttaatacgctcgtgtgaacaatgaaagtgtataaggttactaacgaatcaaagcaagctagtcacactagggaatatacataaccaccacaaaaactcggacatttatttgaaagtgtttatagttaccctgcaatcatacagccacctttcgactaaaacacatacttccaaataattaatctagcgaacacaatccacatccgtgggattcgcaaaaaggggggacaagcatatagctaccctgcaaccaaacaaccgccttggggaaaacacatactcctaaatcattaatctagcgaacacaatccatatccgtgggattcacacaaaggggggggggggggaagtatttagctacccacagccaccttggggataaaacacattcctaaataattaatctacacggacacaatccacatctgtgcgattcaaaaaaggggaaaaaagtgcagatatctaccttgcaacctaacaaccaccttggagtaaaacacatactcctaaatcattagtctagcgaacacaatccgcatccgtgggatttacaaaaagggaaaaaatacatatagctacggctacccacaaccaccttggggctaaaacacacactcctaaatcattaatctagcgaacgcaatccacatatgtgggattcacaaaaaggaggaaaaacatatagctacccacggccaccttggggatagaacacattcctaaataattaatctacacagacacaatccacatatgtgggattcaaaaaaaaaagggaaacaggtgcatatagctaccctaaaatcaaataaccagatttgggctaaaacacattctcctaaatcattaatctagcgaacacaatccgcatccgtgggattcacaaaaaaggaaaaaaaatgtatatagctacccacaaccaccttggggctaaaacacatactcctaaatcattaatctagcgaacacaatctgcatccgtgggattcacaaaaagggaaaaagtgcatccggtctacgggtatcacctgaggacgcgagaccttggggttaaaacacatactacttaattattaatctacgaaaacacaatccacatctatcggagttgcaaaaaaggaaaaaaaatgcatgtagctaccctgcaatcaaaagtcaccatggggctaaaacacatactactaaatcattaatcttcacgaacacaatccacatacagctacctacagccaccttgaggctgaaacacacactgcaggttatgtttggttcatggccatttctagccttgccaattttgggcaatggcaatgccatttttttttggcaaaaattggctagtgtttgtttggtttgctaccaaagttgcatcttgacatattcaactcagccaaataatttggcaaggcaaatttttggccataaaccaaacaaataataaaaattttgtcagtcccaattttttttttcggtttggctgagattggctacaaaccaaacatgcatatcccaatcaactagcacaatcagcatctaatgaacagattaaaagtagcacaagtgaacacaacattattactaccctctaatcaatcaaccattcataacaaactgaacaacaacaacaacaacaacaacacaaacggagaaagagagacaaaaaagggattaaagagacatc

SEQ ID NO: 22967 - DNA, 13499 bp, Oryza sativa
atccttttccttccccttccccttccccttccccatccggccaccttgcttttccctaaccaccatgacctcctactccgattcttgggccccccccccccccccgaccgaacaaccaaagccgaaatagaatccaagaaaaaggaaggaagaaaagagagcgcaagctcgccccgcccggccgggtgaacaaaaagaaaaaaaaaatcaaaccggcgaggaggcgggtggcgggtcgggagagggaagacgagcagcagcggcggcggcggcggaggaggaggagaagcaatggaagcgaaatgcctaccgctgtgctgcgatgcgaggggaagaggaaaataggaaacaagcgagcaaggagagagagagagagggttttggaagagagaggggggaggggagtgtcagcactggaaaagtggaaatttccagaagggcctgagatatcacctgcgcggcggggtggggcccacctgcagtcacacacacttccatctcttttttttccctcatttttttactttctattgctcgcgtccaatcaataactctctctccttcagtccaattctcgcactctgcttctctgttggccctgttcgtttccttctaaactgacaggataaacttttggattaaaatggcatgttttttaaactactaaacggtatattttgtgcggaaactttctatataaaaattgttctaaaatatcagattaaaccattttttaagtttgtaataattaaaactcaattaatcacacgttattgccacctcattttacgtgaaaaacttaatttttatcttcaggagattcaaacacaacttaatttttatctttaggagattcaaacactaccttgatagtacccacagccactttggagataaaaacacatactcctcattcgttgatctacacgaacacaatccacatctatgggattagaaaaaaaaggaaaaaattgcatatagcttccctgcaatcaaacaatcaccttggcgccaaaacacaatctcctaaatcattaatctaacaaacacaatccgcatccgtgggatacacaaaatgggaaaaagtgtagatagatacccataggcaccttagggctaaaacacatactcctaaatcattaatctttgcgaacacaatccgcatatgtgagttttacaaaaagggaaaaaaatatatagctacccaccgccaccttagggctaaaacacatactcctaaatcattaatcttcgcgaacacaatccgcatatgtgagtttcacaaaaaggggaaaaaaaacatatagctacccaccgccaccttagggctaaaacacatagggtatgtttggttcgtggccatttctagccttgccaattttgggcaatggcagtgctttttttttagcaaaaattgtctagtctttgtttggtttgctaccaaagttgcatcttgacatattgaactgagccaaataatttggcaaggcaacttttttttgccacaaaccaaacaaataacaaatattttggcagtcccaattttgtttgcttggctgagagtgggtacaaaccaaacacatcaataataatatattgaaccacaacgacacaaacagataaagagagacagaaagggattcaagagaaatcaccatccgctccatagattgcagcgtgagaagcacacggaagaagctcctcccaaagtagctcatgtcgccctccttctccttccccttctccatccagccaccttgctcttccccaaccaccatgaccaccctctcctcctccctcctgctccgcccaacctccctgttcttgcgccgatccataccttcctctcctccttccactcgctacaaccaatctactaccacaactagatcaaagattgcaagattgcaaggaaaccaagaacaagaacggcaagaaccttctccagcaatagaggaagggtttattaatagcccctggctgcggtagggaccagacacattgcaggcagaggcagcctccaggggatgcgagtgtgtgcgggttggctgccgctcgccgctgaaatgcgcgcacacacacaacacactagcacagcaaaaaaaagctatcgtttttgtcttaaagctgacacttttgtcctctccctcatcactccacctgagagtgaggggcaaacaaattggtcagtcttgtcaggagcagtagtaggatacggaggggatagaaaggccctgacatgatggtcctctttctgtgcattgtgcatgtgtgcgctgcaggggaaattgggcagattttgtagtggtttctcacttgaattgtatcccttttctcagagcagaagaagaacatgatggcattggatgacattgttgttcttctgcttgaacacctgcagatgactaggagtaagagtacatgtcgcaatcttgggagatttaggggtggtattggcactggtgttggtgttgggttcattttcttttattataaacaacacattcatatatattgtttttagttgtaacatatgctacattcgcgttattactatacacatatgcaacttatatttagtcgcaacatgtgctacactaacggtatcgcacatacacaacctagatatatttgtatactctacatatatttgtatttggttgtgataatcgtcagagttgggaaagagaatccgggaataatgtcattttcgatgtttagaggtggtatgtgtattggtgttggccgtattttcttttccactcatgctgcatatggacatatgtacgcgtctataaatattttcctttaagagggcacatttacgggcgcatgcaacacaagtagcaccaccacactcattccacatccgcgcacacacatagatcctttcacacacaagcgaggaggcattgcattttagggtgcacgcgacacatgcaacactaaccagacacattccaaatgcacgcacacacattgacatccttcacactcagaacgaggagagattgcttttcagggtgtatatgacacacgcaacaccaccagactcatcccacatgtgtgcgcacacatggacatccttttacacacgagcgaggagagattgcattgcagggtgcatgcgacacacacaacaccattaaactcattccacatgtataaacactactccctctgtcccaaaatataacaacttttagccctcaagatttgtcccaaaatataacaacttctccaccaacattctcttcccaaccaatcacagctctccaccgttcactttttccacctaactccactactcaaccaatcacaaccctccaccattcacttctacctactttcttaataatcgtgtctaactctaaaaatgcttataatctgggacggagggagtacatcttttttacacatgagcgaggagatattgaagggctaatgcccttagtgcactgaaatgcatagtaaattgaaacacaagtgtgtataattgtgcctaattggtggtaaccttaccaggaaataggaaaagactagtggtaaacataatgttgggaattgaacttgtgccaaccagctctcaccaccgagatccaaccactaagctatggcttagtcctcacatctacaaacattttattgtgatgattgcgaacatttgagttgaatgagagaaaatatggggcttgggggtgtttaaaattttgcatgatatggtgtggtgctattatgatgtttattgatactagcacaaaatgtttatgttttagttaaaaagatggcaaaatttgctacgagaccctcaaaatttgtgttatttgctgatagacagcataaaaacacgtcgcggctaaaagacactttaaaaaactagtaatttgccggaggacactttcggtggttcaattgaatagagagattctttaaaaagacaagaatgcccctagggtcaaaaagcttttgagctgagactagaacgaagatggaatataatgtatgctagtgatgtacttggggatgatggcaaatttatattgcataatttctaaatttttactctaacatcatgtttgaagcatgtggtcttaggggcattctcgtctttattaagaatttatcaatttaattgaggccaaagtgtcctatagcaaaatatcagtttttaaggatgtcttttagtcgtgatacatttttttgatgtctatcagcaaattacacaaaatttgggtgtcttgtagcaaaatttgccaaattttttttgtctcattttaagttttatatccaaataatcagattatatatattgctctaacataaaaaaatattgtcaatactccgatcacagtatccatacctgtatggttcgtttggaggatataaggatcaattgatatgaggatgcaagaatctgtaaggagagtaagggacacatagatttttgtataggtccggaccctctaattatgggtaataaccctatccctgttggccaagatcgctgttaccgctatatataaatgtctcgtgagtacaaaggggaggaaaactcacacatttatttgaaatgcatatctcatttttgcgtagctaactaacccattggaagatagcatctttattcctacacataaacagaaccagtttagaatccttctacaatccatacaagattctcctggatgcaataaatagccaccttgggggtaaaacacattcctaaatcatgaatcttcacgaacacaatccacatatgctggattcaaaaaaaggggaaaaagtgcatatagctacccagcaatcaaacaaccgccttgggactaaaacacatactccgaaatcattaatttagcgagcacaatccacatatgtgggattcacaaaaaagggggggaacacatagctacccatagccaccttggggataaaaacattcataaataattaatctacacggacacaatcacatgtgtgggattcacaaaaagggaaaaaagtgcatatagctaccctacaaccaaacaaccaccttggggctaaaacacatactcctaaatctagcgaacacaatccgcatccgtgtgattcacaaaataggaaaaatgcatatagctacccatagccacctcctaaatcattaatctagcgaacacaatccgcatccgtgggattcacgaaaaagggaaaagtgcagatagctacccatagccactttggggctaaaacacatactcctaaatcgttaatctacacgaacacaatccacatcaaaaagggaaaaagttgcatatcgctaccctgcaatcaaacagtcaccttggggctaaaacacattctcctaaatcattaatctagcgaacacaatccgcatccgtgggattcacaaaatgggaaaaagtgcatatactcctaaaacattaatcttcgcgaacacaatctgcatatgtaagtttcacaaaaggggaaaaaaaagcttatagcttatagattggtctcatttaaatttttatatccaaataatcagattgtatatattgttctaacatcaaaaaaatattgtcaatgagttatactccgatcatagtatccattcctatatggtttgtttggaggatatagggattggttgatatgaggatgcatgaatctgtaaagaaagtaagggagacgacatagatttttgtacaggtccggaccctctaattatgggtaataactctattcctgttgggcaagatcggtggtataattatatatcaatctctcatgagtacaaaggggaggaaaacttaatctagtatgctagtgtatcagtgtaaagcttgggcatggtggtcgacaactagctgttgttggcttcctcgtgtagtgactcgacaaaattgagggtagcttgtattgtgttggtttctatgtcttgtccttatcctctcttagaggtgttatattcatacctttaggtgcccattgtcaaagtagtagtagcgatgcaaatatggatacgatctgagtagttctggttaggcctaagtaggatttttgccatatacatcaggcttgtttccgtacaggactaggtatatggtggtcccactgagctaggtacacatgtatatggtatttgaaagtggatcaaggccccaaatgattttggtgattaataacaatacgattatagatgactaacaaataatttgagtatgtgtgaaggaatgttagttcttggtaaagagtatttcaatgcaaaacccgatgatagtgacaaaacgatgtgatgtggcatatgagcaaatggtataatataaattttaatttgtttgcatcattaggaaagccgtactataaaggggatgatgcattgaaattgaggaatgatttgggtgctcaaaaatcaactttccaaagtatttctcctcgaattttcagttcttgagttcttcggacttgtccgaaatgtgttttcggaattcccgaaagttgcctgagctgagaaaacggtactggtcattttcagacttgtacaaaaatcactttcagaatttccaaaaatggctgtgaagtcaaactcggttctggaaagttttgtacttcccgaaaatcatttttggaattatcaaaaatggctaagcaaccaaaatggttctaaatgtttttggacttgtccgaaaactattttcggaatttctgaaaatggccgtgcagccaaacatggttctggatgttttcagatttgtccgaaaatcattttcagaatttccgaaaatgtctatgcaagcaattttggttcttactagtacaaaaatgatttttttggacaaacaccctaataggttacagatggcccataagtgtctgcatctgtaaaaatcgaccccaattttcacatatggctccttaatagacccgcacgcaaaaatgaatttttctaaacggacaacttaaaacgtctgcactcaaaaataagggtattttcgcatgtggggatcttcactcacccgcatgcaaaaaaaaacccctcttcccattctcttttttctcccctcccctctctctcttgtggcctcacccactcctctcctctctcccactccacacccactcttccactcccggctcctcttctcccctctcctccctctcgacgacgagcactggccgcggtggtggcgacggcggcggtggcgggcgagggtgccgaggggtgtgggcgctggcgtgcggcagcctcatccattctccgcacccctcgtgcgtggggcaccctccggcggtggggggcgtgggatctggcggtccccgcacgaatctgccggcggcaccctcagaagcgactgccgcgacggagggtggcaactgcggcaacatcgagggctggcggcggatctggtgactgcgtcgacgacgggcgtgggcaacggcgaaggcggcaaccccctcggccatcaccacatgaaatggaatagattccactagtgaaaggaggagtgctttatgcgacctctcgaggaaagggttagtgaagatccagctctttgtgagctcctcaatggagactagaaactccccaaggattccaacttcaggaacacttcatcttgcaagaacctcagtgaaatccctctctccctcctctagctttagttgtttgtgccgctacaagtctagttgttgtttgtgctagttcttcattcttatgggtagctagatctagcatttctttactcatgtgcatactttatgattttcggattttctgaaaagtcttgcttccgcatttacttaagtttttaaattagcctatttacccccctccctctctaagcgtaagtgaccctttcagtatcccatatccaggacactgacaattatattgatggccgatttgtattttaaattattttgtataaggttggcttagatctatcaatgatatatactatgtagaatcaattctaaaagttagttggatgtcttctcgaaatccatacaatccacacccaatggtccccatagtcgcaccaaaacctactgcgtgagagcagatctagttcaggcacagtgcatgtggcctcgtgatgattttcaacagttgtatggatctgttatttaagacgggcgactattgcggtcttcaaagccactgtgcaattagttgtttttctataggacaagtcacaactagagtgaccgaaggagagcttttgctgatttattttatggttaattggatctgtgtcattgtaaatttgacatattagaaaaatatcattactatctgtgatatcagctgggtgtcattgaaattttgtgaaattctaaccatgccattgccgtccagttttctgtcgtggccatcaatttctatcagtcctcccctttctcactcttctctccctgctaccaatctgccgccggtgtgggcaacatcctttcctcattgacccccgcaggtgcggcctcatcatgctacggaggaggcttctcttgccacccctcgctgttgtcctcactcatagcgttggcggtggcctgcactgtcttggagaggaactgacaaggagagtgtgtgaggccatgaaggaggctgcagtgaggtcggccatgcgggtgtggaggagcagcgatgggaggagtaggaggatggggaggatgccgacggtggggaagatagggaggatacggaggtaggggaaggggagggtgagaagagtgggaaggaggcggaggaagtggcgaaatctaccattggagacacgagcccgactgatgttgtgccccgttgaccttgaactcatcatctttgcctctaaggtccacgtcgtgaccgctgtgcattcattgttccatgccacacagcttcaatcgaatctgggttgagttggtttggagctgaaggggagcaagcgctaggatgggaggtgggtgttggccacaatgaggagctcgtcggcgctaggaggggctccatgtccaccgcgcactcggacagctgcttccagccgacgcgagctagtctgtcgctcctgcatatcctcattggcaaggattggagggagggcgtggggtttgggaggacgatggaggcgatgaacctgcccccatcgttgtcgccgccatcgccaatggcttcgtcgtcggtggcctagaggcgcgacttcctcgctagacgccgcatctgaaacgaggtggagagatatggtaagaaagaagaggggaggatggagaaagaagatggaattgacatgtgagtcccacgtctaggggttttttttgtctatatgatgacggaaaacatgatggtgatgacatggtcttaattttgtgtaaattcgaatgacatgaatacgaatagacgaattataagtagtatttatctgatcagcatatttgtactggaatgttccaattaatcctttattttatgggacaattgatcgtatctttttttaaactaaaccggcaggaatttcctgccgattatattttcaataagcagcagtcgatcatatctaaagaggcagcagtcgatcatatctgttgaattggaactatccagatttaagctaatgcagggaaggtctcctctgcagtacaagagcctgaggcccctgagcctcccccatttatcgagtcgtgtaagagcaagtttaacagtatagccactgttagctctaaatcatatatagccaaagtaatagctaatttatataatagttgctcactatactattaatatctggtcccatctgtcatacacatattacgtcttagagtccatactgcagctggctacagatctgtagcccgctgctcttttctctcttcctttatctttttaaaatatgtttatagttagcttatagtctgctattattttatctctttaaaatatatttatagctggcttatattgtaactgctctaagacgaacgaacagagggtaaggatataaagtcccagacatgatggtcctatttgggcagtgcgcagcagagcttatccatatccatgtgctgctgcggcgaatcagtagatttctctcttttcttttctttctccttggattttgcctcttctttccgggagcagagcatggacatcatcattctcattggacacatgagattgtcacaatctgcaaggttcatctgcctagatttgccaaacctttttgtccaagctcaccaaagattttgccatcaaaatcaaagctacaatttagccacaaagtaaaaccatgccatactttttaagaccagttagagcatctccaacggtctccttatccctctctttaagttaaattttggaaattttggctcaatttcaccctccaacagactggctattgggctggccaaagtcctccttccactagccaaatttggccagccaaaatagcctagccaatcgtgggccccacgccaacaacatccctctcctctttctctctccgccaaccgtcgtcgtcgagatgccatcgctggtgctgtcgaggtcgtcgttgccggacgccgccgtcgccagccgtcgtcggcgctgtcgccgtcgccagccgtcgtcgcgtcgtcgccagatccgctgttgccgaacaccgccgtcatcgtgccgttgccagatccgcgaggtcgtcgttgagcctcgctagccgtcgtcggcgccatcgtcaaccgtcatctccgaggtcgtcattgccggacgccgcaccatcaccagccgtcgtcgatgccgtcgccagccgttgtcggcgccgtcgccagatccgtcgccagccgaggtcatcgtcgcctgccgtcgtcatcgccatgccccggcggattcagccggtgcggcatgtagtagaggacgccgccatctcactcctgtcatcgtgttcgccgcccgagccgattggccaccccgcatccacgcgagctcgccccgagcggtggcggcggcggcggcagcacctgctgcgagctgagcagagtgggtttggggaaagggggagagatgaggaagaagaaagggttgtaaagactgacacgtgggtcccactatcataggctcataatagagaggatgaatagagaggctgttggagtaaataagagtttgactggctaaattagatagagagttggccaaattgatatttggagagttagatttgaagagactgtaggagatgctcttaggcatggatcctcagtttgcagtgaagtaatcttacccacacttatagttgtcaaccaaacacacgtttaatatgatcaaactcgtctaaccacaagggtggctatcaacaaacagcctcacgtactactagcaactgtgcaaaaatctgacagtgttcaaaaagttaaatgagatgcaccggtgctataaaaagtgaatgaatggaataatggcttaaaatcccttccatgacaattctcctaaaaagacaaagagctacaataattatgaagactatttcttttaaaaaaaataatacaactcttttagcaaaactgcagcggcactacaattttaactttgcgggtctaaggtgcaacccggacctaccagataaacaaattttcagtttttttataacaaaacgttcaactattattgtaataatcttttggactgcctattaatattaggtcctctttgtttagacttataagccaacttataagtcgaaaagtctaaacctaaacaaacaagcagcttttccgtttggcttgtttgaagccacaagccactttaacactattaagccaaaagctaggttggagaagcttttttggcttatgtgaggtatttttggcttatgtgaggtagatgtatgactcaaccactaaacttaggacattaaatccattgtcttataaatcatataagccaataagctgacttaaaagtctaggccaataagcctaagcctaaacaaaagagggtcttagattcggagctttaaatcttatggaattttcaaccaacagatacattccgttttaaataaaataaaaaaagagacctaataaaaattcctcaatctaagaaaaaaatctatactcctttaaaaaaaatagcagtggtggtagttagcggtgaatgtgccaccacccatgccaccaactctctaccttttagaatgaagaaatgacacgtggggttccaccaacaactccctacttcttttgagtgaagaaaggatatgtgtggccgaatgacccacatatccaccaccccacccaccaccatctctatttttttatgaagaaaaagtgatattgtgaggccatatgcacatatgttatttacaaatatgtagaatttaatagtacggaaaataatgataataataggttaacgattattttcatcaattagatcctgtttcaatgcatggacaatatgctatgctagtagttataaaatctaattttggtgtattgtaattaagtagtgctatgtaactaagtgtaattgcaagttggatttataggagcacgaatcttgatacaagatcctacggacgaaaaatcaaaagataagagttcaaaaatctatcgcaagtgaaatagtaaaaccttaatttcttttgtggaattgtagcaaatcgataattttggtgacatggttgtcggttcatccgttcccaggcttaattccatggaataagttcactttaggtccctcaatttgtcctcaagtctgattttcatcctcagtccagaaaaccggaatgcatcccccaacttacaaaaccatacagacgaggtctctcagtagtattgtgcccggtttttagatggcgtggcgcctacatggctcctttgactaggtcgtcgtcccatgcgacattgacgtgatgtttacgtggcaattcgatctcggaaaataataaaaatagtgggacccacatgtcagttacacacaaaataataaaaaaaagatgggggtccatatggtcccatacgtcatcctcactccttcctcttcactttatcccccctcactcccatgcactgcaaggagaagggcgagcggcagcggccggatcagaggggtggcgagtggagcagatgggtggtgggcgaagcaggggcggcagctggaacagaggggcagtgggcggaccaacagcgggcggggggcgagcacctataagttgttcgtcgcttgggccatcgggcgggagagcttgggacaacggtgctctgttagcctctgtggccctcctcgctccccaaccccatcggtgacgccgagttggccgaccaccgcagcgccgccctcataacagtcatggtttcctcacctcgccaaggtcactgcccgccatcggttcgttatgcctgatgcttaactagctcgcctgctacgttgtctccttgccacccacttgcccatccgccacacacccttctcgttctacaaaccaggccgatgcctctccactgccgtccccggcaaggagctctgttgtacgtctctctcggcatcgatgccgccatctccc

SEQ ID NO: 22968 - DNA, 11414 bp, Oryza sativa
tcgctgttgacccccattaggagcgagggggagggagatagagagaggggggtgaggtggaggtagtgggacccattgacatgtgggtcccactatgtttatcttcttgtttgactgacatatggccccacatattttgttgtaatttttaatttttcaattttattttttccatatcagattgctacgtcaatgctacgtaggacgaagacatagttaaaaggtccacgtaagcaccacgttagccagaatcggggtcaatactgctgagggatctcgtttgcactggttttataagttgggcgatacattatatccggttttttcgaccgaggacgaaaatcagaccggcaacaaattaagagacctaaagtgaacttattccattccaggccatcccacgtgttttgatgggcctcaattttcatccatccacgaataattggcgttgtatttgctaatggccctaggcctgtgtggatcgtccattttgctttcactctaggcccattacgtcgaaactaactcactgcccggacgaccgggtttttccaggctctgggtagccgtacgtgtcaaacaggcagcaacctggtgaaagtcctaaaatttaaacgattttattcgtgtataactacatgagtaaaatcccatatattttaaaatagagacagtagctttaatgccatcacccatcataatcacgtttggcaatataggcaggggtgaaccataagccatgcaccatggtctttcgtcctgcgaatcagccatgattcggggtttagattcattcgttcctgaatgtagattaataaaatgtactaccttcgttttctcaaaacatgaactaaatctttactattataaaaaatgaagatgtttttgccggttatttggtacgttattcgtgtatgagtcggtttttaaattcgttcgcttttagaaatacagatccgtatttgagttgagttttaactttattcgtttttgaaaatacagaaaggctcatataagaaatctctttaaaaaaactcgcatgctaacttgtcataattttctagaaaatatatatccaagcgaattctcacaataaattttacattgaacaataataagattaaaatagccttcactcgttgcaacgcacagacattttttctagtctttgaaatatgtttgattattcattttctaaaaatatttatataaatagacaaatatattaagtatgtttaaagtagctttggttatagctcaagttgcactcttttcactagctaagtaattgtgttgatcaaagtttgataaaataaaattcaaacacaccctatattaaaaaagcagaggtattgtattgccaatatacattaatctatattgccgatggtcttatttttagtacaaatattcaccatacaacaccgccacaatctatattgacttctgttgcgaaatgacggcggtgttgctcccatgttttcccagcctcactttgatttttcccatagtccacacaactcatcaccgtctttcactggtaacaccaaaggcaacaaacaaaaaccacaatttacatgggtataaggtcattatttagcatttgttggctagcttgttgctacactcatgcccttatataggtgtgtttggcaacattttggataattttttgttggtttgtttgttcataataaaggttatggtaaataaaaataaggttgcatatctagcccctagatttcaattaccagaaaagttgcttcgttataggggtgaaagtgaatcggataatatctaatccactccactccaaatccgtccgaagtgaggatatagtaagggtttatagatattcggcggatacgaatttggctatggatacggagctagacgtggtgttggcgatatcctgcagatctggtggagggtttggtagataacccgactttctcatctcatggaaccactctatttgacccatttcacataagacagaccatctattagttgacctaataacctatctctctcacacacaggacgaaccaatgcaagctgctaggcaggtttgccgtcacactcccatgcgcacacaagcggcgaagcaggaatgcgggtacgacgcgtcattgcctgtggctctcaacgttgacgcctcctctggtcgtccccatcttctactccccgcagcaccgcctgctttgagtttgctttaaattttggtgatatggtataaccgctattccgatctgttttcacccctaattcattatcaaagtttacaagtgcacacattattcctacagcggaatgctacgtgaggtcaccttgggtatggaagtgtgtgaggtggtgtgacgagtttaatgtgtaataggcactaataaaatttgatgactatagacacgaaacatctttactactttaaaaggacataatgatgatggtgaactccactttatacattgttgaaattacccacatttctcatcctagcctatatatcaacaaaattgctcacctttgtcatctcactcctgacttctatcatagccacaaaccccaaatctccccctttcctcatcattttctctcctaccaacctccatgtcacttgctttctcgctgcttgctcccatcatgatctctgctcctcctactcaacatgttggcacttgatgctcaatgtcccttgcccctcccgtcatgacattcacgtactttcctcctgctcatatcctactcagcacatgagtaagggggttcacacctatctctttgctggcaaagaagaccgctattgagtggagtactagttagctacaacattgccacatctcttcctccatatatgctacatggtccatccttacgtgactatgattctacttagatttattttttaaaaaacatattgtgtatatatatccttttgtcctcacttaggtaccatctagtgccaagccttgggtccttatagatatcatgatattatttcacccagccacatcggagccatattatttgcttgccgcacaacatgttaaattcactcgtgcgcatatgcatctacctgaaagggtcaattcggcctagaggctaatttaaaactttatgcggaagctaaaactgatataaggtcggaaagtctgatccacagtcagactatccgaaaatatcagatagtctgatgttggatcagactgtctgatccaccaatgaagcacaacaagtagatctatcacacaaacaagagtaaagcacaaatagcgactagatctatagcggcacaattaagcaaagctaaaaggaggatgaagggagatcaccaatgatgaagttcacgaagttgttcccggagttcaaatccttgaggggattctactctccgttgaggagctcactaagagccgggtctttgctaaccctttcctcaagaggttgcactaaccactccttccactaaggggtatctctttcctttgcggaggcgagatccggccttcacaaacttctcccggccaaccacacgtagatcggtgccttgggagtgacacctagccgtctaggagttctcaacctccaagagtaacaaacaccacacaactcttggtcaaaccctagtgctcaagatcgagtgaaacacacactaggccctcaaacaccaaatccacaaccaccaagatccaccacacaaagaacaaggagggatttgagagagggaggaagagctcaaagatccaaagcaccttagcactaagctcaacccaaagtgaatgagaatgaaatgagttgggtcaccctagaaaagggttaggtggggggtatttatagatgccccaaaatgtggccgttggaggggaatctttcagcccacgtcggatagtccgatacaagatcggatagtctgatattttaaacctccaaggcaacgagaaacagagaatgaagttccatgaaattttggactttccgagacattggactatctaatgttaaattggagtatctaatattttagaagtaaaaacttcgtcctcaaacagagacttaagttctatgaaatttcggagtctttgtatcatcggactatctgatccgacatcggatactccgatacttagaaaaactcattcgataggattttttcaaatcaagacagttctgtgaaaaattggatagtccgatacatcggatagtctgatttcaaatcggatagtctgatgttgctcaagtaaaaatgcaataactttttactccgaactccgatttcgaagatcttggactctatggaaagctagtttcgtgggctatcaaacccaacataaaacatggtccaaaaccttcaagagattttgaaaaacttgcaaaaaaacccggtgtaagtgttgtgacgagtgaaacaactcgggattgaaattttggcttaggtttttcaactcacacaaagatgaagcattttgagcactagtgttctaccaattatatgcatgtggtatccctcttaatagtacggcattcctacgacacaatgcaaggtaaaagatacaatataacatttgatcattgccgcattgcatcttgatgtcgcattcatggggtatgcatctcattacaacatgtcgaggacataacaaccttcacatttgcttgaataaaagtgttagtcctctctaatcgcattgtaatcaatcatcaaaattattaggggtctagatgcactttcactaccaaactagatttgttgctaaattgaattgttatgtcattatatatgtagattttatcttcatagggcctataaaacacccttatacaagatttttttctagttattcaaaataacatgtttcgcttgaatagggtattgtcggcgtagagttagaaactagggatggatgatgcacttatataaaaaagtgggttgagattcctttcagcgaatggggtactggcataataccttatcgtgtttttaatttcattaaactaaaaaaataggcttaacttttactcctacataagaaaaaatgtatatgtaagcaatgacatatatataagaaccaatttactatgcttgaaattacaatggtgttgtttcacttttcctggctgcagcagcagtgactgtcggctgtaaccattgaaaatggctgctaacggcaacaactctaagctactaaaacaaccatcactattgatcactaccaatatccatacctctcgccataacataatccgacttcattaaatttttcttatttcacctatataagataaacacaaatatatatatattcctacaccccatgtctaaagtctgatcttagatcattgcatcaatcttgatctcaccaacctccatgagagagaagagatcaaagccctcaatagtctttggtatcctaaccccattcatcatcacgtgcaattaaccaacccatccgcgccaaattacagaaaagcccctccatttctcaccttctcgcccaccctcccgtccatgtccatggtggtcgagcaccaccggcgcggccaccgcgagctcctcctccccctctaatggcgcagtacaggcagtcgggcggcttcttcgactaccgcggcggccaccaccacgcgctcccggagtaccaccggcccctcccgcacgcctccaagccgtcccggatccgccgccccgggaagcccgcgcgccgccgctcgccggccgcggccgccgccgtcgcgtccgcgctcctcctcgccggcgtgttcctcctctcgcgccgcctctcccgccaacccgcaggttcgagatggctttgacgccgcagcttccccccaccgtggtggtgtgatccttttctttctttctctttttcttttttttttccttttcaagaagaagagagaaaaaaagtttgatgtgttcgggggctcggtgcgcatagagagttctcgatccgatttcgtgtctcaacgtgatctcgtgtgcatttttcgcagagatcagccaagatttgggcggcggcggggaggggttaccggagtggaaccggagcaaggagctcaagttcggccatggcggtggaggccggagcgcgcaggattcgaggtactgggaccgggacgatcggaggcgggacgaggactactcggaggacgagaaggagaagatctcgggtgcaagtggaaataatgccggtgtcagtgataaggttgtgacctctgatcctgctgttgaggagaaagggttgaccatggataccggcggtgccgccgataaggaggctgctgaggtagctgaaggtgggaaaggagggaccttgtacaatgaagggggcaggaaagagctcgagcagtatgaggcggctgcgatgggagctgcgggtactgggatcagggaggttgatccggatgatgagtatgacgatggcattgatgcacaggacgatcttgatgatgctcagtcgcattcatctgatggcgggaggaagcttggcgacagtagtcatgagagcaccgagagtaaggaaaatatagctcatgatagcaccggcaataaggaaagcatcgccttagagagacgcacggaaacaggtgcgggtattagtgatggtgtcgatgttattgatgctgctaatgtgaaccaaaagaaggtttcggcgactggtgataagaaacacgcgtcaaaaaagaaatcaaagcgcaagaagactggtgagtttgttcttccccaaatttaagtgctagagtcaggcgatttgaattcagaaacctgatttcttgtttagcttagtggacatattgatcctgctactgagaataactaagctttctgcattttatttctgtttcaatagccttctgtagtgtttagaggtaattctagcttgcttctatgatatcagaaacaccaattatggaatctggttgtaagaaggtactaactatgtgctattcatgttcgatagacataaatcagttagtcttggacattttagagtgccaactaatctgttagttccacaacattagtatcctttaaaatgaagattgagatgttagtagcacagcagcatcatgttgtatttatgtagtgcttgatttacaatgtttatcaatatgatctattgatttctacgtttgataatttggtatcacataaaatactcttggtatctagcctttgttattatggatggttttctaatctgttggataaacataaatcaggttcaacttgtgaaatgaggtttctgaactccactgctcaactcgtagagcctgctaaaaatgagaaatttgctagttttaatttggaatatgtggaagttgaagacaaacctcttggatcagagtattgggagccaagatttgctggccaccagagtttacaagaaagagaggaatcatacttagctcatgaccaacaattaaattgtgcttttgttaagggtcccaatggtacaagcactggttttgatatctcagaggaaaacagaaagtacatgagcaaatgccacattgcagtatcttcctgcatctttggaaattctgatcgtctgaagactccttttgggaaaacagtatgttctttttctgtaccaacaaactcctgaaaaaattatgatacccctaatcctgcatgagttacaaccaatgtaactcttgtcaatgtatttattttggttctcttgtatattttggcaatcgcaaaattagcgttctttgcatgatttgtcttagaaccttataatctcagtagcttcatttttaccataggtacttattggctctgttagtaggcaatgaaacataaaccttatataataggcctgtgaaatgcaactgaaccttctgcaatgttagtttggatatacatgaatatataacctcaatctccatacttaggttaaacaattgctgacctttccattctgttgttccaatgctccctgaatctttttaaatgcttcagaagttgatggaaatctggtaatatttaagaaataacttcatatgatatctgtctacgcagattacaagtctatcaaagaagacagtatgctttgctatgtttttggatgaaatcacattacgaactttggaatctgaaggccaaaaaatggatagttcaggtttcatcggtatatggaagatcatattgattaagaatatgccttataatgacatgcggagagtcggcaaaataccgaaatttctggcacatcgtcttttcccatcatcaaggtaaaaatgaatgttcttatatatggtggttgtacttttttttttccacattgaatccacactgtcatgtttatgggccaatatcattcttaatcctcagctgaactgagctagtaactcccctcccccaagataaatcaccttgggaaatccaagcagtttaccagctggttactattttttttatcaaaaatattggccaacactaactgccagaaaataccagtagtttccagtcataaaccggtgccaccaggtggaaatctgttttcacattctgccctgtccctatcagtatgcacattcctgactgcctcgctactagtagcaatcaatcctgattccttcaattcagctgtatctgtgttgatgctttgctggtctcagataggttgagctcacgtggaggcatatgattcagtagtactgtttatgtttttttctgattcgttctttccaactgcattagaatcactagcacaaatgaccttaattcccacatgtatttattgcccttttcaagttaagaaaaacaaattgagaagtcctccttatttcaatatttagggtgttttcatataatcatttgctgtgccacattatatgtagagaaacacacagcaactcccaatatattatgctgtctgtcctaaaagtgtgcatgaatgtgaaaacatgacatcttgatgttaggtgaatgtgctcatttgaacaagtattgcttatacttgctccttcaatttattgtgcttgttttaccaacctgtttttgcatgcctaaagacattactacttgtgtcaggttctcaatctggttagacagcaaattgcgattacaaaatgatcctatccttatcctagagtattttctttggcggcatggctatgaatatgctatttccaatcattatgatcgacactgtgtttgggaggaagtggcacagaacaaaaggctgaacaagttcaaccatacaataattgatcagcagtttgagttttaccaagcagatggactgacaaagttcaacccatcggatcccaacaagctgctaccaagctgtatgcattcttgcctgctagtttattgctagtgtatgagctattttgatctaagtttttcttcttctttttttttttggttaactttgtacagatgtccctgaaggttctttcatcgtgagggaacacacaccaatgtccaacttattttcatgcctatggttcaatgaggttgatcgattcacacctcgtgaccagctcagctttgcatatacatatttgaagcttagaagaatgaacccggagaagccatttcgccttaatatgtttaaggtgggtacagttgaccatctagctagctagtttgaccgcaaccatactaaatctaatttacatgctattctcgttcaggattgtgagaggcggtcaatagcaaagttattccatcatcgatcagaagagagacgcagcagtccacaactaacaagatgacagagattctttcggaatgggtggtgcaaggatattttaggattttacctttgatatagcacaggatggcacaggactattcagtgtcaagatttatgcccctgctgaggaatttaagcctaaaggtcgcaagcgattctactcctttactctatgatcctgcagaccagttcctgccgcctttctattttgcacttgacaaaggcggattagggaactatggccgtttgattttcgtaaattcttctgctctcggtaaagttttgttcattcttttggggtgatctgggacaagtggggcatgaactcccagaactagtttagcactgtgtattatcatatggttgttaaaagaactaccaagtgaagacatgattccgatgtaatcctcaatggtcttgttgaaatgtaatactacaacaggaaacaaaaccttctgtaatttctctgtgatagcaaactagcaatttttttttgtctgaatttgtggaatctccaggcttcccttgtgcttttgctagatcagaactgagaatgaataagtgatcatctgtttgttttttgttccatgtactacagcttgctgcaattgagcattccttcaacaatgaagaagtgaccatctgattgtgttttgtgctctgaacttcaattcacctcttaactgaacatagtttactcctgcatcaactgcaatgtagatgtgaaattgcatctggtgtttcatctcttttagcagatataaaacaaatctaaacttcagatgctttattgatcagtatgtcacactgaaacaagttacaaaccaaaggagaaattaaagtataaaaggaaaccaaatataattaaacaccttcataaacacatactcacacattgcaagaagctctaaaccctcaacaaaacaactcaaattgatcagtcaaattagcatccaccccaggttacatacataccctgctggtttccagattgctcaaggtcaattaacttttcagagattagctaacatctaaaaattcagcccagtgtgagggccttatctctgaagatgccaagcatctcattcctgcccttgatcacctcatcaaacacttcatccaaaacacaatcaaacatctccacaccttccctgagctcacctgatcttgttcttagaagctcaacatggtcatcttcttgttcttgtttgccatttttggtctcttcttctccttccatcttggtgttgatcatcatggacttcaccaccatggccaccctctcgtgctcggcgacgcccggccgcctcgggaaccggtcggtgatcacggagagggattctcgccatggctggagctcggggaccgggacggcggcggcgcggccaagggtgcagtggccgtcgtcgacgtcggcggcgagggggacgatgggtgaggtgagggcctggagcacgaacatcgacacgacggccatggtgatcttggcgacgagcatgacgaccaccatgccgccggcgtcgtcgtccccggcgccgccgccgccgctggagctagacatgatcttcctccctagccgctccgcctcgctcaccgccgccctcacgtcggacagcctgtggcggatggcgcccgcgtcgtcgccgcccggctcctccttcagccaccaaccgccggcgccgccgccgttcttcgcggcggcgc

SEQ ID NO: 22969 - DNA, 12904 bp, Oryza sativa
cgccggcgccggcgcagccgacctgcgcggcgaagtcgacgaccatgcagtagcggtgcagccgcgacacggcggacttgaacgcgttgcagaagtcgagcagcgccgccgtctcctgcatgtagtgctcgaaccagcacccgccgccgtcgccgcctccgccgccgccgccgtaggagacggcgctgcccaccggcacgtcggccttcttgaacatgaccagaagctcccgctgcatccgcttcaccagcctcatggcgtcggcgcaccacctcatcgacaccgccccaccgccgccgccgccgccatcgccgtcgtcctcctcacgaagcagcgtgctctccagctgcgcgaggccgtccaccagcgaggcgcaaaaggcggcggtgtcgccgtcgagcagctggcatcgccggcgagcaccaccaggccttaggcatctcatcgtcgtcacgcatgcaacacaagaattaaatcaaatctcaagaaccaaggatcaaacaagaaatggtgaattgggcatcacttttatgttgtgcaaatacaacaatataataatgatctagtgcaatttgttcatttgcatggaagcaaagttgggtttcttggaggagtaggcaagattaattttttcaaaggaaagaaggggaggagtgaagcaagaggataactaggtatgcatactattccatgcatacacctagctttaccttaccttgcttaattagcacttgtgctcttttgatttggcattcttgttcttggagtttggagattggagacaactcaccaaccaaccaaccaaccaaccatcctttggggcttttagctatgccaggtctttgatttggatgtagtggcaaactggcaactactaataacttatagattgacttgtaaggatggatggatgcatggggccggccctttggtgccttgcagggaagaaatggtataatttttactctcttaggggaagtgttttaagctcttgagggcatgtgtccttgttttcttacgtggttcaagtaattaacaaaaacttaaaataagatttagacaacgtactttctccgtttcatattataaaactttctaggattgtacatatgtctagattcattaacatatatatgaatgtgggcaatactagaaagtcttataacctgaaacagaggtagtacattattatgatacgaatattagggaatgatctaatatcaaataattacaaggggtgagacttcgaacccaaatcgtctagcccaacacgtcttgtggagctagccggaagacccctgagcgtttctcaacatactttattatgccatgtgtactttcacttgcaaaattaaatttgatctatatgtgtatgtgaacgaaatttgatctatagatcagagggaagaaagaaagtgcagcagttgcattcacaattggatctgtttcatgcactcctatacgacatatgcattggcattgcatgtactttatactttaatttgttgcaacgcattttaggtttcggtactggacaaaactgaggtgggatgtcatgtgtgatgatttatattttgattgtacaatggagtacactaaaagtactccaattaatccagctgacatgattatttgaggacagttagttcatcattctttccaaaagcacattcaccataatcacatctctaaaggcatccctatttttttttcagattattcgtcggattattaaaaacagattatttgctctctaaaagcattcttctgcagtattaactgcttagataacttatttttaactatttattaagtttgtttctcataatgtttaatttatccctatgatcaaatacacaatttgtggtaataatctgctctataatcaaatgactaatacatttggaaatctgaattttatcacaatagagttggtcaattttatcacaatagagttggtcagtcatgtcagttttgttaataatttaagatgtataggacacatcatcgtatatacctcggctgaaaatgtggtagctaggtagaagtattcagggtttaaaaagcaagtcacagttagttaataataaaagtctaaaaaaatatgatagttcagatcggcatgacttaatatgctctggggtgagacaaaaataaaagtctcctctttggactgcttctataattctcattaattactaacagtaaaaactttctttcacgccacaaccattaaataagctccgtaagataagaaaagaaaaacaaagtgaaaggaaaagaaatggaaacggtcagagcacgcttaccggtaatcacaagtcactggcgtcctaagcttaatttgctcagctctgacctttcttatgcagccgtgcatccaaaccgtgcggcaagaaaacaaactatgcggccatgtagcgatgttgaccttgccacgggattcacgggatgtggttgttatagtgaatacacacttggttctactccctccgtcccataataagcacagttgtaagttttaattccaactttgaccattcatcttatttgaaatatttttataattagtatttttattgttattagatgataaaatataaataggactttatgcatgacttaacttttaaatttttttcataaaattatcaaataagacggatagtcaaatgttgggcacgaaaacttatggctgcacttataatggaacggagggagtagtaaagtataaaaattctaattctatttatgtcctaagttgttgtctcaagtttggtcagacaactaagcaactagccaagtttcttatagcggaaccagttcgtccgaatttaagttctagagttaacacggatgctcatatttacgactaattatttttttagtggtaggcgacgtactcatcaccaacgaggtgcccatggtgattttgtcaacctcaaaatatatgtcagtccagttttttggaggtgcttatagaagtaggatgcgcgtgtgcgtgttcatagatacgagcgtacgtgtattgttagcatctacttttataccgtgtttctaataaaaggaaaataataataataatatttacagtatcaaatgagcatcattacatccatttgaaatatatattttcatgatttacttccttgattatgttagatgttcatactcttctcaacaaaattaaagaattggatccttagtttaacttagaaaaaaatatagaatcccttaaattttaggaaaaaggaagtatctaccaatagctaatcaaaatatggaaggagctcgaagcagcttctaggcacgcctccgcaccctcgccttatggccggagatgctacgaattcagacctgaacgcgggtgttcatgcccttgccgtcgccatgagcccataacagtaggaagatgggagatttgataaagagacacgagagaagtcgttgctatgggattcgtgaggacaagtgtctcatgcaggaagcgaggtccttcgatgagtaattctttctgtacaaccctttaattttaactagaaaaagtgtccgtacgttgtaacgggaagaaaaaaaggaaaatctcgctggcagattcggtcgtctggagcagagaaacgtgagccgtcttccatttcgaaggtagagtaagcagagcgcaactgattggtgacactgaagatgatatatgttttttcatgatttcacatgtgttatgtcttggatgcaactcatattccgcttattgttgtgctctttttcaaggatttgtgttttgtcacatcctgatttgagtttaagggattttgtaaattatttaataaattatttcaaaatttatattaagtttcattaatttacaagtgaagtttaatatgagaaatataatttcctaattaaaacatggttgtgtttaatcattaataaattctccatgattaattatactctttgaaatttttcaattattaattttaacaatacaaagaacattttcaataattatttaagcaattattaatcattaaatgatctagataaatatttttttaaatacgttgagtatccaactattttcatgatttttcttgaaattattagaacattgaaagtgtttttgaaaattcaaagttcatttcagtgattaatttaaatgaaaaagtagttaaaatcgtctcgtcttggaccaattcgagtaaagtctgctttccgtctctctctctctctagcaggctttacctcctctccggtgaagtctaatctgtctcctccttttatcggcctgtttgctttcttcctttccccttcggcccagcagcagcagagcaagtctagatagcgtttggtgaaaaaaaaagtctagatagcgttcctcggtctctcctctctctgtcgcccagggcccatgtgccacagtcttcttcctacacctccagaccgaacccccgtgcccatgcgaagcccgcgctgcctctccttccaatcccacctaccgagggatgaaactgttcggatagattccgtccgtctggaccattttttggattcgaataatttcggtcggaactatccagaaattttcggattcggaaacgaatttggattattttctcggaaacgaaaacgaatacagtaagggtactatccgtcggaatcggaaaacggtcagaaactatccggaatttttttcggatatcctcagacattgataaaattttagaaaaaacacgtatatatacataactttttcatacggaatcagatgaagacaaactttatatcaacattgtagatctcgatgagatctacaactttcttattgactattttattatttgagatcatttaagggtctaaatattcattataatatatcatattaatttttacaaaatctcagatctacaattcaaacaacatctgatggagatgtgttctatatcaaagttgtagagctcaacgggatctaccactttgtagtttataacatttgtatttgaaagcatttaaagcataaaacaaatattgcaagtttcgaagatgtaaagtaaaataaataacatctccaatttatacaatggcaagtaagttatacatcaagtaaaagttcttgagaattgaaaatgataatcatatttgcatatggatctcttagaggaacaaccatgaaaatcgattttcgcatacggttgtgagaccgtctacaaaattgatgatataaatgttggagatgttgaatgatatctcttccttgatcaagaaactcaatttgaggggctttttatataccagtaaatattcgccaccgtattcgttctgtctcgtattcgctccgtatctgtattcgataatattcgatttcatttccgtattcgagttttcgattccgattccgattctgaaaaaaaatatgaaaacaaatatgataaaactagtttccgtccgtttccgatccgttttcatccctacacctaccctttgctctctttttccaaattggatggaaaaatgggttcccctcaatctcctctaccctttcctcgaaatagacgaaaattatgtaagactaatgaaaagttatcaattttttttaagtagtaagatttgaatttccaaacgtttggcttatggatcttcgtgccattaaagatatcaacctactgtcccatccgttcaaaacctcagctgaaaaatcagagtcatcaagatttaaatcaatacccctcgaatttgcaattctgaaattcctgataaatggtggaaggttactgctcacttccttttcgctgccctttggcccaactgattataaagtcttgaggaacattcccttgttatttacatatcatctaaatagttgtgattttttttaaaagaagtcaacaaaatagatcaattcaggcattcagctagtgacaaactacaaaacggacaggaatagcgtctgcaagggttcataacaattcaaatcttctagtactacacattactgctcgttgacatgtgggcctgaggatatgtgagggccacatgtcagtaagcaatactgcaaaggaccctctcacttggttcataaagggtattaaagtggggtctaaattgtaggcatgtcctaaattggaattttcttttattttttgtacttgtgttttttttatctttttaaaaaaatcccaaccaaaacttattttcagaatatgaaccttttgcataccaacccgtctgacgtgacaaaacaatattgacacaccacacattgcaaatgtgacatctttatcctgctacgccagctagaccggcgtgaccaaataacgctgccacgctagccagagtggcgtgtcagtgttgttttgccatgtcagtccggctggcgtgataaaaagtttagattctaaaaataagtttgggaagggtttattttaaaataaaaaattcaaaaagtttttttttaaaaaaatctctaaacggagtagtttaaacactccatgcatggatacctctgaacattttactcggaaaaaaattcctaacattgagtgcgtcgtagacgggggcggagaggctcggctaattaatgcgtagtgtctcggtttgacattccccataagaaaatatatctgacaatatacatatgtaactcaagataattgcatgtaccaacgggtttagacagtaccggctgaatgcaatgtcctgtagtcctcttcttcatcttacccattatgaagttgcccgccaccatcgtcatcttcttacccataaaaataaatacacttataaagaaacacaagtaatatagtagtgaaatcatgggtgcataatttcaaatcttaatatccataatattacacactatgggtgggtttttaatggcaatttagtgtgatcgatacatgatatacagctggtttcggtctcttaaagtatgtgctaggacacgtattcgtggggtctaagtgtgtggtacgtgccatagaatagaaaaaagaagtaaactgaggtgaaaacctataattaattacggttaaacacagttttttcgtatctgggtaagatggatgctctcgaccattgggattgacctgcaaatcttttctcatcgacgatctgatccagagtatagtcagctactcctaagtaaacctgtcttcaatttccggagtggtacatacttcagcgcgtgacgtcgatcgatggatcccaggctgctcagagccgcacgccgcggcgacttcgcggggctcgaggctctacttctgggcgccgccgccgccgccgcgccaaaccaagtcgccatcgacgtcgtcgtcgtgcatcatcatggcgccgccgcggcccccgggcaacaagcgcctgaggcggcgccggtgccccacctcctggacgcggcggcgacgacgccgcagggggactccgcgctgcacgtggtggcggcctccggcgacggcgaagggttcctgcgctgcgcgcgcgcgatctaccgtcacgccgcgcgcctcctggaccgccccagcgcgagcggcggcggcggcgacacgccgctgcaccgcgccgccagggcgggcaacgcggcgatggtagggtgcctcctcgacatggccaggcaggaggaggaggagctcgccggcggcacgggcggctcaagggtagccgaggtgctggagaagaggaacgctcgtcaggagacagcactccacgacgccgtcaggctgggcgacgagcagctcgtccgccacctgatgtcggtgcacccgcggctcgcccgtgttccggcgccgggcggcgggatgtcgccgttgtaccttgcggtgtccttgcggcatgaccgcatcgcggaggccctgcaccagcaaggcggcgacgaggtctcgtattctggaccggccggccaaactgccctacacgctgctgtcctacgcagcgcaggtaattaagttcaataaatcaaagatataaccgatcaatcaaagatactcctccgtcacaattctactgctcttgaagaggtagcattaggtaaaaaaaatttagtctaaaatctgtacctcatagtaccttataatagctaagtaccaaaaaataccaaatttataatagaaaaaatggtatctcttggtaccttctcaaaaaccgtaaaattgcttcttaaaataaacgtagttatgagttttcgtatccaactttaatcgtctgtcttatttaaatttttttaaaagaactaaaaaaataagtcacgcataaattactatttatgttttatgatctaataataacaaaaatactaatcataaataaattttaaataagatgaacgatcaaagttggacatgagaacttatggttgtacttattttggacggaggaagtatatatgaatataatgttttctcatcatataattattagttcagtgaaatttactcataatataaattcaagaaatgacagaaaagatactggaatggaacaaggggctcgccggcgaagccgacgcgtccagcagcacagcgctccacttcgcagcagcctcaccggagaacaacccagagaccgacagtagttcactcctccgccgctgtctccgctcgccgtcgagccacggccgccggacacccacccagcttctcctcgaggccgacccctccttacccttccgcccggacggcgacggcgagtaccccatccacgtcgccgccgccgccggcaacctgaggctcgtggccctcctcctcgatgagcactgctgcccggagtgcgccggcctccgcgacgcccgcgggaggactttcctccacgtcgccgccgaccggggcaggcaggaggtcgtgggattcgccgccgacgacaagcgggcggtggcggcgtcgatcctcaacgcgcaggacgacgacggcaacaccgccctgcacctggcggtcgtggccggggacctgggatcgttctggtgcttgctgcggaatcgcgaggttcgcctggatcttgcaaacaacgacggcctcactccggttgacctctccaggagtaccgttcctgcggggctttactacaaaacggtaaatctagactagttttttgaacattttcacttcaccgtttctaacgtgttaaagagtaaaccaaaataattttatacacttttaattgagaaaattgattatgattctaggagtgttggggtggggtgggtggtggtatattagccccgtttggtaggcattttgtcgaacatatatttttttttgaacgactagcacaaaccggtgcgaaattctattgatagagcaggaaaaaaaaagtacaagattataaccctggagagtcgtaaccaggaaaagaaaaaaaatagcaccacccacacgacgacatcgccaacacacacgccgcctttgccagatgacacagcagccaccacagctgccaccgccgtcgccaactgccgtcggccaattgccgccgccgccgtcgccacaccgtcgccgccgtcgccgactgctcccatcctccagatccagccgagaggcgtggatctgggggcatcgctgccgtcgccgccaggcatcgagccgccggccacagtagctgcgcctccgagcctaccgcggccgcccgcgcctgctccgccgtcacgcctgacgccgccgcccggccgcccgtgcctgcgccaccgtcgcgtttgccaccgcctgtcgcggccgccagcgcccacgcctcgccgacgccgtgcccgcgcctccgcgaccggatccagctgcgagcgcgccagatccggtggtggtgacgccggatccgccgccatgcgcctcgacgccggcgccgctccggtcggccaccgcctttgcgtccacccgcgccaggagctcgggagatggccaccgcgagccccgccgccgccgtcctcgcgagccgccggctttgccggccgctcgctcaggcgacggcaaggcagaggaaggggcggggaagggcggcggcggcggctagggttccgccgcccgagtcgcccgacgcgggggccaggagagagttgctggggattgatgtcgaacacatagttggagtcgccctgccgctgccgctgccgccgccgctgccgctcaacccgcgcgccacgcccgcccctcccgtgcgcagtgggccgccgccgcggccactgtcgcacgcccggccactgccgctgctgcccgcgcgcctcccgtgcgccgcgggccgccgtcgcatgaaagtaacgtaactaaagacatgaatgacgattcagatttaactcaagaaagatccagctgctaatgttttctaggtgatgtggttcaattaattcatgttgagattattttttctccaacatatatacaatatctgtactgattgtagtaattttgttcatgcagagcgcacgaacttggatcctctggtctctggtagaaagcaacgcactcggcagcaacttccggcgcaacgatcacttcgaggaggagtacgtccccaagaaagacgagagcgccgagtcaaagaagatgacggagtcgacgcagatgctgggcgtcggcgccgtcctcgtcgccgccgtcacgttcgcggtggccttctcccctccgggcggctacggcggcgacggcggcggcgcgccggcgctggcggggcagtaccccttcgacgcgttcatgtacgcggtggcgatagccttcgcctactccatgctcgccacgtttagcctgatgtactccagcacggcggcggtggactggaagctccgccgcgcgtacttcgagcggtcgctggcgtggatgcggcagtcgacgaggagcttgctggtggccttcgcgctcggggtgtacctggtgctggccccggtgtcccgcaccacggcgatcggcatcatggtgagcgcctccggcacgctgttcctcaggaacagggaggtgctgcggatgctgatgtgcgcgtacgtgctgcacaagaggatggggatcatggtgctggcgaggattggtgtcccaatggccgtcgtcctactgcagtccagccttatcttcgtggttatctttggtgcacccttgtgtcctccgttatgccttctggttttcgttgggaagctagtgcatgaggatgtctcgttcctaagatatgtaaatggaaaggttggttcattaccttttcaataaaacttcagagtaatagtttaacctgttagagtttgtgtcaaatatgtattcatagtcagttacagtttagaatttgaaattgtaataggtataagttagagttagagttagaattggactctatcctaggctctatctaaatagagtggcacacctattataaccgcatgacaaattagcatagcgagaaggaacggttgccgacgacgtccggtcgttgtaatatgttggatgggggaggagtgactgtaattagtgtcccagagatatatgctttggttgaactccgttatcaaatatcatgcatcggtgtcgtcatcgtatttagatgtcctatagtatttcttgcgcatttgattcttgatgatgttttcgggccggttttataacactatgaaatgaatatgcgaatgtctgattccggattcagaacattattctttcattgtagaacctttatccgcataaacattcaacgtttagaaactttctacatagaaattttcaatgtaggaactttctacactgatgtcgaaagttactagtaacatgttttgcttacaaacttactactccctccatcccaaaagataattacagattattcaggtataaagtttctgtgcagaaaatattaatataaactaacctctcaattcaaccaatttattttccaaactcgagtagctatgtacatacttctaacttctaaggatgagagaaacctcaaacatattgtatgtttattacgattcatagcactgaaatatatcatattttgtattatgtttgtttattttgggacttaaagagtagaggggtatgtgggagaaatgggacccagagtacccaccaccatctactcgcggggcacttctctgtttgggcatggcccttagtaggctgctcataggcagttcattccccgggcgtggccccacgtgggttgagcccggggcacttttttccccactggctgtacttggtacacttctctgctcgggaattcaccctgtgagttgtttcagctgactaagggacttaccatttttcagttgattggttattacacctctaattccaaatataagttagtctagagactaaagatgtctataacaattaaaaaaagataaactatttgttacaaatacgttttagattttgaatagattaatgcatgaatacatgtgtttcatatatgtattcaaattcatatgagtaaattttacaaaactacatacattttagccaaattatcacaaaactacatatttaacatgatgaattacaaaactacctatttaggagtagcacttaatttatcccggaattataaatttaggtaaaatatcacaaaactataagttttatatcaacttttaatcacaaaacttatatatataaatcaaacatagcattagtgctaaggatttggaccaaaaattttgtagtttgtgattattttattattaaatatgtagttttgcgatacttagcctaaagcctatagttttatgataagtttattgctaaattctgcagttttctaatatactagatgcacttttaaaccccaccttgcccactccacaaggagtctaaatacactttcgatggcccggggagggctatcgtggtgttcctactagcctaaacatgaagacgtgtttcatggggtcccacatctccgccagatgcggtgccaggtggccgagcatgtccatcgcatttattatggattt

SEQ ID NO: 22970 - DNA, 10685 bp, Oryza sativa
ttcctgcagcccagttgcatgcgtgtattatggaggtaggtgaaattgaatgattgagagttgtggttggttgtgaaagtaggtagagaaattaaatgagagggttatgattggtagagaagttagttatattttgggataaatttgaaatgctaaagttgctatattttgggattcattatattttaggataaatttgaaagaaaaaagtccgaattacgtctaaagttttgcgacagtccaaattacctacctacactaaaaaccggatgttggagcacaaaaaaaaaataaaagaaattgtagggcttacatgtcatatctcttttttgggtgatcaaactccccctttgcagagggccctataggcagtgaccaagtgaccaacgttggagctcgagcttgctcaggaagcgcgaggggggggggggggggggtggacactggaagcaaagactagtggcgaagctcaagctcgcttatatatgttacatggtctagaccatggctccctacgacctatacaagaaaatggtctagggcacagtttaggccctaaatgagatgaaaatctgcagtcttgcgtctagacgtgatctagactgtctaaaccatggtctaggcgaacactaaatatataggacgctgacggtagaactcgagctcttctcgtcccttttctctatctaggtccctcatctcagcgactgatagcggtggtggacaccattgcttgtccagccattgtctcctcaagcttggttaggtgattgacattggccgaagcaaagcttgaggcagtggcggaccaacgtagagctcgaggagatggtggacccacatagagctcgaggctctcccgttccccaagcactgctaccccatcttaataggggaagagatggaggtagccgcgagcagatctcatgttgttgtgcctccacattagagcaaggataacttgcaggctataagccggctaaatgcttaggtggaagagagaagagaggagagagaggagaagcgggctataaacttacagccgacttggacacaataacaaaaaactctgtaagagagacaagtagaccatgtattaattgtaaagagctaactattatatgggtaggctaagagaaaactaaaaaaaccttatagccatcaggtcggttatattattagccttcctcttagtgccaagtcggtgctcagctccatggtctccaccgtcgcacctccacatctcatgttgtcgttgttttcttctgctgaggtcgagcctaggaaagaagggaagagaggaaaagtactgacaggtatatccaatcgattttaaaaatattttttggtgggaaaaaaaagcttcggattgagtaacggtataattcgtgttttgaagagttttggtgtgaaatatttggtgtgttaattcagcgaataattttaattttcacaaaaaaatgtggtggtaatttggaccatttctaatttaaatcactagcgctaagcggctattttaggatggagggagtaaaacttacccttttcattttggaaaaagtacgaattacccgcctgaacatcgcgacagtatgaattactctatttaactcgaaaaccagacatccttcaccccccaactatgcaaacctgacaaataaccctagctcaatccgcggtggttttagtcctacgtggcatatgtgtgatagtccaatcagaatttctttaaaaaaattggagggccccacctatcagtttctcattcgtctctatctctctactctatccctttccccggtcccctctctctcttctccctcccctcacctccatcagagaatgacggtgagcgaatgcagttgggtctaggcaacgaagggggagccgaggatggcggcaggcaagggcggagccaactgggggtgccgaagccagggatggcgacgcgcccctatctccgtcgtcaatgcccaagcaacctccgcctccccccatcggcacccgcgcgacctccgcttccaccgctggccgcccgagcgacctcttctgccgccagctgcccaagcaatgtgccacgcacctccgcctccgtcgctggccgcccgagcgaccttcgcctccctcgttggcaccgcggagactacgactctcctcatgtatgcgctggcgccggaggctgaggaggagctcagctcggcatggaaggtcgtctcgtgaagagatgtaggggcggccctcgtcatccgcggtgtcggcttctccagtggggtaatctccggtggtgggtgaggatgaggaggaggggatggtgggagacggggcggcatcatcgacagccgcggcgtgtggtggtggtggttgcgctggtggtgcagagaggtgggaggggagagatctaacagtggaccccaacgattgttttaatagtatttagaaccaaaatcatcgcggattaaccgtcgggaggagggggtgaggggttatttgtccgatttatatagttaggggcgaatgatgtctggttttcgggtttggggttaatccggttgactgcgatagtctaatgggtaattcgtgtttttccttttatttatttttttatgcaactttgactcctagacgtacattttattatttatcatattaaaagatcatgaaagtaccatttatgttgatgttgacgtgacatattttaattgtaaaagatatttgaagtttgttttacatttttgtacttatatttatataatcttttttgaataatgaatagtaaaccatactaggtacgttaaaacggtagcaacattgtacatttaaaattagaggtagtgccgcataaagagtttccggtcgcactcggcacacgggatgcaatgcaagacaggtggtgatcgcgcgcgggttcgtacgtccatggttttttgcacacgcatgagtgcatagtgctgtgcataaccatgtttaattagtcaactagtgctaaccgcttcagcacgtcgatggcaagcatctgactaagcatctgaaatgttaattgtaagtagttgcaagataccaaacgggtctaaatcccaagtttgattcatcaggcgcggtagtgatgatatgatggatcccaagctgctcagagccgcaggccgcggcgactgcgcggtgcttgaggctctacttctgggcgccgccgccgccgccgccgcgacgccaaaccagcaagttgccatcgacgtcggctccgggcaacaatcgccgctcctcctggacgcggcgacgacaccacagggagactccgcgctacacgtggtggcggcctccggcgacggcgaagggtccctgcgctgcgcgcgcaccatctacagccacgccgcgcgcctcctggaccgccccaacgcgaggggcgacacgacgctgcactgcgccgccagggcgggcaacgcggcgatggtcaggtgcctcctcgacatggccagggaggaggagctcgccggcagcgcgggcagggtggccgaagtgatggagaggcagaacggccggcgggagacggccctgcacgacgcggtcaggctcggcgacaagcagctcgtcgaccatctgatttcggtgcatccccggcttgcccgtcttcccggcggcgacgggatgtcgccgttgtacctggcggtctcactgggccacgaccacatcgcagaggctctgcatcagcaaggggacgagctctcgtatgcaggaccggccggccaaactgccctgcacgctgctgtcctacgcggtgcaggtacgtactcctacacttttttttttagaaaattcctcatatgccacctaaagttcacaggttttcttatatgccatcgtaaattagcagttcatgtatatgccatcaaacagaattttcgttcatctatgccatccacgtcactcaagagtagtgttagctttttttttgaaaaatgacaaaattactctggattccctttctttctatgtaaagcacaaatcagggtgagttgtagttgaaactatgactataactttaataatcattactgattcaacaaacaaccaataattggatgcaaagtttgtttctctcctatttttatagttaatttatagattatagaaagaaatagttcataatcttttaaaatgtcactaagaacaataatttaattagttataatctaattaatgtatctaactggatgtaagcattcaatttagaaaaaaaaaaacaaagcaatctctcagctagcaaactgattatatgcttaatttaatcacaaaaataggtatgcttaacttaacaagctgcgtgcttatttaatatcgccatggaagtactccccctgtcccataatattgtaacataataccggacgagacacttcatagtataacgaatccagacatgtttactgtactttaaattcgttatattatgaagtgtcacatccagtactagattgctatattataattataagacggagggagtaagtaactttaggataccgacattagtgattaacaccaaaaagatgcatcagctttgtttactcgtagtaagaatactaatacaaaattgaggagtttctaaactattgaccagcttttccctgagccatgtctagagagtggtacaccaacactaggaagataaaatggggaggctgtgcataagaaagaagggaaaatatagtttatttatttttaacctcttttttccaataaagaatatacatgtgaataattaaggaagtgaattgcgaaaaaactatagcaagttgctactccctctatcaaattgatctacatatttcataggtataccaagaccaaaaaaagctaatatctctctcatactatatttactctagcaacaaactcgatgcatgcaccattctcgctattttctagccaatagcaaatcaagatattgcatgtggattataaatacttgcgtgcatagatgcatacatcaatgtctatttattccaatgcacaaataacaaatagacttaatgaataaacacaaatatatagatcatttaggaataacaaaaaaaaaactatatgtagattagggatggcaatggggcggggtgggactgggttggacaggaacggtcctgcccctaacccccgactttatcccccgtccctggccccggtaccatcttcgtgtgaaaagcttccccgccaccgaccccgaccggggccccgcaagctgtagagaaagaggacaaaccagaactgtagcagccaagatgcggtggcttatcgaggaggccagtgtcgcggagatttggcggaggtgcagaagccggctacgcgcgacgaagacaaaggcgaagcagccgacgacatgcgacgaaggcacaacagccggcgacacgcggcggagttgcagcagccggagatgcagcgaaagtgcagcggccggtgacccgcggccgagacgaaggtgcagcagccggcctgggctgacgaggcgcagccttgcagggagctgacgaggcgcagcagccgtgcggagtcactatcgcttgcaacgactgcggtagcgccgatgcagtcgctactaattgactctatctttctttttattttcttttgaaaggtcattgactcgatctggatgggtggctccgtgactatgtatggctggggtagataagacgagataaggaaaaggagaaaattgcatatgtaccatggtataaaactggtttcgcaaaaatatcatcattcaaatgggtttcgctagaatactattctcaattgagtacacttcaccactttgccattttcattatttctttcattttaaattcattttatcatctttgcatctctttttgactgaaatacacctagtcagcaacgttgaagcacttcactcccaacttgaaatggatctgatctgcaacgtaccgaccaagtttataatttagcatataaattatcctccaacatttagcatttaattcgagaaataaattaaattaaattaatcaattacatctacaactcagattcaaatatttgaataaatcaattgcgattggacagagttgattaatttattttattttatttctcaaattatatgctaaatgttggaggagaattataggctaaattataaacttggtccgttgcagatcagatcattgcacgtaagtgcttcagcgttgatgacttaggggtatttcagtcaaaaagagatgcaaagatgataaaataaacttaaaatggaagaaatgatgaaaatggtaaagtggtgaagtgtactcagttgatgatggtattttagcgaagcccatttaagtgatggtatttttgcgaagccagttttatgcgatggtacgtatgcaattttctctaggaaaagttatttcacaacatgggcttgtttgggccacatttttaatgggccatctgcgtatgtacaatatttccgggtccccatgggtcacccgcgggtaggaatctagacccgcccccgtccccgcatatttccgggcccccgccccgatgcacctgtggggccaaatatagccccgaccccgtccttgtaggggcgggtccccgtcggggaaattgccatctctaatgtaaatcaatttggaatggagatagtactattgggattgcctatccatttgtcgggtgatttctaaaaaaatcatccagatttttctacccttagatttacatccaacggactacaaagaaaaataaaaaaaaaatacatactccctccatcccataatataagggattttgagtttttgatggcaacgtttgaccacccgtcttattcaaaaaattttgaatttattaattattttatttgtgacttactttattatctataatactttaagcacagcttttcgttttttatatttgcaaaagaaatttgaataagacgagtggtcaaacgtttcaagcaaaaactgaaaattccttatattttgggacggagggagtatttacttacacaacaattttatcaaaattacaatgcactaacatgtcatattaactgaatttacaaatgtaattgtagttatatagtattgtaattttatattttaaagaaaataacaaatagatatttacttacacaacattgttatcaaaattacaatgcacttacatattatatcaactgaatttacaaatgtaattttaattatatagaactgtaatcttatattttaaagaaaataacaaatagatattcacttacacaacattgttatcaaaattgtagtgcacttacatgtcatatcaactgaatttacaaatgtaattttagttatatagtactgtaattttgtattttatttttattttaatttcaaatgagagaggagagagagcatcatgcatgtcgatttttcagagcaaaaaataaaaataaaatagtgactctaaccatccgacgctgttacacgcgacccaactgaaccctatgcgggttcccagcccaacatatacgcacggatcttggcacatatggaacggcctaaaaacgacaaatctgagagaaaaaaaatcacatgacaaatctatagcaaaatcgagtactttttaaaaaaattgatccattctttgatatgcaagaagtaatatttctccgttgatttcggaggcccatcatatgaagcttttatggtgatccgataaatattggtgaccatatgcattccgattggtttcgttttcatatctggattttagagtattcgtttcggtttttaaataaaaagatgaaagcaaatatagtagaggtagctttcacagtatccgagccgtacgttttcattcctaatggcagtttatgaaaattcaatcaactgatgaataaacactcctttacgattgctaagatcacacttaaaaattattcttaaaacatcacagtttaaaattatgcctttttttaaaaaaaaaacagtgctgagcaatagtttgatagctaccgtgttgtatattggtttatcttaagctttgctttgtaaattataaagaaatgacagaaaagatgctgcaatggaacgatggtctctccggcgaagccgacgcatccggcagcacagcgctccatttcgcagcctcagcggagggaccagagatcgagctcgagaagagctcactcctccggcggctcgccttgcgatggccgtgctcgcgcaatggccgccgccgccgccggacatcgactcaagttctcctgaaagccgacccgtccttagcctgccggccggacagcaacggcgagtaccccatacacgtcgccgcgtccatgggaaacctcaagctcgtggccctcctcctccacaggtgcccggagtgcgccggcctccgcgacgcccgcgggaggaccttcctccacgtcgccgtcgaccgggggagggaggagatcgtgggattcgccaccgacgacaggcggaggcgggacggctctcagctggcgacgcccatcctcaacgcgcaggacgacgacggcaacaccgcgctgcacctggcggtcgcgagcggtgtcctcaacgtgttctgctacctgctgcggaatcgcagggtttgcttggatcttgccaacaacgacggcctcactccggctgacctctcaaggtgtaccattcccgctgggcttaactacaaaacggtaaatcactttcgcttgactggtaatttctaaattctaatgttacttgcctctccatttaatagagctgtctacatacgtatgtaccattgtacctacatacatacacatacacacacatgtgtgtccaatatgtatgccatgtgatcaaactcatccaatttatataaaaattagataaaaataactatacaaaaccaccttagggagtaatatgaatggttttgcaaagatctgattttaaagtttagggtgtagaagtatttctatctaaagtttagaggagtatttggatatttttttttcttttttaattgttatatagggggaattttacagttgagatatcaaaattttagtaccttacttaatacctagaagtattaaatttaccatagaaatatggtacctcttagtaccttctcagagatattaaaattacccttgttatagacatctctagtctctaaaccaactcatatataaccaatcaactgaaacatagtaagtccctttaattagagatgattttgcatctaatttagtaatttgttgatgcagaacgcacgaacgtggatactttggtccctggtggtagcgaaagccctcagcggcaacatccggcgcgatcacttccagcagcagtacgtacccaagctagacgagatcgccgagtccaagaaaatgacggagtcgacgcagatcctgggcgtcggctccgtcctcgtcgccactgtcgcgttcgcggcggctttctcgccgcccggtggctacgcggctggcgatggtaataataacaatggccgtggcaacgtcgtcgtcgtcgcgggctctccggcgctgtcggggaggtacgccttcgacgcgttcatgtacgccgtgacggtggccttcacctgctccatgctcgccacgttcagcctgatctacgccgggacggcggcggtggactggaagatccggcacaggtacttcaagcactccctgtcgtggatgcgcaagtcgacgaggagcttgctggtggccttcgcgctcggggtgtacctggtgctggccccggtgtcccgcgccacggcggtgggcgtctgcgtcttcaccaccggcacgctgctgttcaggaacagggaggtggtgcggatgctgatctgcgcgtacgtgctgcagaggaggatggggatcacggtgctcgcgaagattggggtccccatcaccgtcgacctggtgaagtccaatcttgtctacttggtcatcttcggtgggcccctttgcactccgctgtgcgttctgttctttgtttggaggctagcaccagtgattatgagatacgtccacagaaagttaatatgatgcggtgaacatctctgatgtgatatcatattagatggtgcatgacttcaagcgttagggttcaaatctgaacttcttccgtagtcaacatatatgccaatgttttcctaaaaaaacacatatgccagtgcacttttattaagaattttaataattgttacagtgcatgcatgtgtgtgtttttaaggaaaattggaaaaaaaaagtgtcgattgtcaatacaactccggctgggatatatgatatgatttggggttgggggaggaggaggagaaaggggtgaaacggggggcttcccccagacgctctgtaggcggcgaggcgctggtattgataaccggaacggtacacacggaaaatagagcaatcctttagtacattattaattaattattagctccctctatttcataatgtaaatcattctagtattggctacattcatatgaaacacacgttatgaatgacttaacatattaatatgcatccacattcatattaacttctatatgcatgttgtcggtgacatgggatcaggagtatcatgactagaggtttgaggcagacacaatcgcatacgtggcctggtacccccgagggacgtcgggcccgagggtgatgcattcgccctcctcttagtccccccgagggggtc

SEQ ID NO: 22971 - DNA, 11706 bp, Oryza sativa
tcacctaaccacatttattgcggtttggctaagcgtgtcacgccgcatgtaacgcagtgcagtgcactcgtttatccggtctgtgaccagtcacagaccggtcagatcgtgggttaggtggcgacaggcgatctgatgcacgcctcgccccatcccgtcaggacgagggcttctaggcgctcgtccccagctggagctagcgtgttacctcctagagatggcacgttagtcctggtcagatatatgccaggcttcatcctaaaccattataggcaagatgttgtgtgaagaagggcgagcatgtagattgctaagctgacacgtggtggacaagaatgaccgacgtgactggtctgataccggtcatgtcgtcagtagacagccacgattccacgtcgcacctgctcccggcgaaagtggaggtagttgtgggccgtctcatcagaaggtgactcggacggcaactatacaaatctccgtccatttatggaaaggggggggggggtaagtccccacaaaaaaagagagaaatggtgcatgtggtatccccttaagatataaaaggaggaccttgcccactgagaggggggattggacttttccagattagaaacctagaacaagggagaggctggctgatactttgtagctccttcatacacagatctcccaaaacacaggagtagggtattacgcttctcagcggcccgaacctgtatacatcgcccgtgtcttgtgtgatttcactctcgcgaactttccacagaccaagagcttagaacctcacccagggcccccggccgaaccggcaaaggggggcctgcgcggtctcccggtgaggagccccacgctccgtcatctggcgcgccaggtagggggctctgcgagggattttctgagctctcgcactctttcgtgtgcgccaagcttttcctgttcagcccaatggccgagccagcaaaggcgcacgacctctccccgagtatgagcggtgacgacggggagccaaacccacgccgtcgagctcgtactccaccgccccctccacgccaaagtcctaggcgggagaaggcgctcgagagggccgaaggatccgtgacttcgacacccacaggaggtggagaagggcggcgagatggggagcgtcgcctcctcgtctacggcgacggcagcacgccccagggcgcgctccaagctgcgggcgcgctcctacgtcacccgcccgtcgcccatgacccggagtctccagcccaacgttggctggacgatgtggccaaattggtcatgactgcacggcagcgcctagatgctggtgggcggtcctccgccaccaaggcctctggtgctgctaccaccggctccgcatcgtcaagacggagggcgcggcgagcggcagccgctgttcgccattcggccgccactccttcgtcaacgcctccgacccgggaagatctgcgtggggaaccggatgctcgcatcagtatcgagcgccggcgtaatggccgacgtgctccccacgcaacggagggcgcctcctcgtccggagtgtcacctcaccacggacgcggggatcagccctccgtgcccccagttggtggtgtcggctgtagagcctttgtggcgagccttcggaatgtccgttggcccccaaggttccggcccaccatcgccgaaaaatatgacgggagcgtcaaccccgccgagtttctccaggtctacacgaccgggatcgaggccgcccggggtgacgacagggtcatggcgaatttctttcccatggccctgaaaggacaagcgcggggttggctaatgaacttgccacccgcgtttgtccactcttgggaggatttgtgccaacagttcaccatgaacttccaaggcacatatccgcgcccaggtgaggaagcggacttgcacgcagtacagcgaagggatgatgagtcacttcgcttgtacattcagcggttctgtcaagtccgcaacaccataccatgcatccctgcgcacgcggtgatttacgcgttcagggggggtgtgcggcacaaccgcatgcttgaaaagatcgcctccaaggagccccaaactaccgcggagctttttcagctcgcggaccgagtggctcgtaaggaggaggcatggacctggaacccctccggttccggtgtggcagcttcggccgcccccggatccgccgctcagatagggcggcgtgacaggaggaggaagaagaggtcagcccataccgacgacgagggtcatgtcctcgccgtcgagggcgcttcgcgggccacccgaaaggggaggcctgcgggaggcaaaaagaacgaggccggcgctcccaacagggagcgcccaaccggcaagtggtgcaccgtccacaacacttcccttcacgaccttgcggactgccgtgcagtcaaaagtttggctgagcggacgaggaagtgggaggaggagaggaggcaggagcgccgagagggcaaatccccggcggttccttccggtaatcggcgaagtgaggccaagcagaaggcccccgacgaggacatcgatgacggcgatgatgacctaggtttccaagagcctggggccaccattgccaccgtcgatgggggagcgtgtgctcacgtttctcgccggagcttcaaggccatgaagcgagagcttctggccacggcccctactcatgaggcgacgtgtcgggcgcggtggtcggaggttgccctcaccttcgaccagaccgaccacccaccgtgcgttgcccggggagggcagatcacgatggtggtttctcccaccgtttgcaacgtgaagttggggcgtgtcctcattgatgggggagcggccctcaacatcctttcccctgcggcctttgacgccatcaaagccccggggatggtgctccggccgtcccagccaattatcggtgtgacgccggggcacacgtggccgttaggtcacatcgacctaccggtcaccttcggtggatccgccaacttccgcacggagcgggtgaacttcgatgtggcggacctcagtctgccctacaacgcggtcctggggaggcccgcgttggtgaagttcatggcggcggtccactacgcctacctacagatgaagatgccgggccccggtggccccatctctgtccatggcgacctcaaagtcgcgctcgcttgtctggagcagcgcgcggaccacctcgccgctgcatccaagcccgagggtggcgacgagaggcttggcgcttccgcccccgccaccccgaggcaacggatgatcacaggcgacgaggtcccggtcaaggaggttgccctgggcgacggcccgtccaagaccacacggatcggtggtcttctggacggcaaataggaagacgcgctcgtctccttcctgcgggcaaacgctgacgtcttcgcatggagaccggcggatatgcccggggtccccagggaggtgattgagcaccgtctcaccgtgcggccgggcgcaaggccggtccggcagaaagtgcggcggcaggccctggaacgtcaagccttcatccgcgaggaggtggcgcgacttctggaagccggattcatccgtgaggtcatccatccggagtggctggcgaacccggtggtcgttcccaaggcgaacggcaagcttcggatgtgcatcgactacaccgaccttaacaaggcatgtcctaaggattcttaccccctgcctcacatagatcagattgtcgactccactgcggggtgcgaccttttgtgttttctagatgcatactctggttaccatcagattcgcatggctagggaggatgaggaaaaaactgcgttcattacccccataggaacctattgttatacgacaatgcccttcgggttaaagaatgcaggtcctacttttcaacgtactactcgaatttctttgggtaaccaattaggacgtaatgttgaggcttatgtcgatgacttggttgtaaagacgcgcaaccaggaaatgttactctcagatctagcggaaacttttgagagtctccgctccgcccgcataaaactaaaccccgataagtgtgtgttcggtgtacctgcgggcaagcttctagggttcttggtctctgcccgaggcattgaggccaaccctgagaagatacgggctatagagcggatgcgccccccagcaaacttagggatgtgcaatgcgtcaccggttgcatggccgccctaagtcggttcatatcgaggctgggagagaaggcgttacccttatttaagcttctcaaacgctccggaccgtttacctggatggaggaagccgaaaatgccctcacccagttgaaggcgtatctaagctctcccccagttctggtcgccccggagccagacgagcccttgttactctacttagcggcgaccccgcaagtagttagtgcggcattggttgtggagcgcgatgagaacaattctcatttcacgcttccccaccctgtgccgacttggcccgggagagagcagggaggagaggctcccgagccgaacggtggcccaaggcccctgacgaccggagttggccctctgcccgcttgtcagacagtgctaggagcccccgacccccaggaaggccctgaggccactgtgggaaggccgcacctatcgcccttcgaccccgaggctaaccctgtgctgacccgacccgggaaagagcaggaagaagaggcccccgagcctaacggaggcctaaggcccctgacgaccggagttggccctttgcccgcttttccgacgacgccaggagcccccgacccccaggacggccccgaagccactgtgggaaggccacccctgttatcctccgaccccgaggtcatcagcacagaagataagtgcgccccgcgaggctgcttggacgaagagtgccccagggatgcggcccctagcgaagaggatcggccccaccgaaaggtgcagcggcccgtctactttgttagtgaggccctccgggacgccaaaacccgataccctcaggcccagaagatgctttacgctattctgatggcctcgaggaaactgcgccattatttccaggcgcatcgggtcacagtagttacgtcttaccccctcggtcaaatcttgcataatcgagagggtacaggacgggtggtgaaatgggcaatcgaactttctgagttcgatttgcactttgaaccacgccacgctatcaagagccaggccctcgccgattttgtggcagagtggaccccggctcccgagcccgtctcgatccccgaggccagcgcggacccctcgcagctgcctcacaccgcccactgggtgatgcagttcgacggctccctgtctcttcagggcgccggtgcgggggtcacgttgacctctccgagcggagacgtcctcagatacttggtccgcctcgactttcgagcgaccaataatatggcagaatacgagggactccttgccggactaagagtggcagctggactggggatccgccgcctcctggtgttaggcgactcccagctggtcgttaaccaagtctgtaaggagtaccagtgctctgacccgcagatggacgcctacgtgcgccaagtacggcgtatggagcgccattttgacgggattgagcttcggcatgtgcccagacgggataacatgattgccgacgaactctcacggctcgcgtcctcgcgagcccagaccccaccgggcgcctttgaagaaaggcttgcccagccgtcggcgcgacccgaccccttaggggagacggatgcgcctgaccggcccctgaggcctgtcggagtccaggcctcgggacccgaggggagtgctcccaactcccttagattgattgcttggatcgccgagatccaagcatacctcacagataagactctacccgaggaccgcgaagggagtgaacgcgtccatcgcatctccaaacgctacgtgctggtagaagggaccctctatcgacgcgcggctaatggaatcctcttgaagtgcattcctcgggaacaaggcgttgtgcttcttgccgatatccatgaaggcgaatgcggagcccactccgcctcgcgcaccttggttggtaaagcttttcgccagggtttctattagccgacagctcttaatgatgcggtcaacctggtccggcgatgtagagcgtgtcaattccacgccaagcaaatccattagccggcccaggccctgcagaccataccactttcgtggccatttgctgtctggggactcgatatcctgggaccgtttaggcgggccccgggcgggtttgagtatctgtatgtcgcgatcgacaggttcactaagtggcccgaggcttatccggtcgtcaagatcgataagcactccgcacttaaattcattaagggcatcacggcccggtttggagtgcctaaccgtattattacggataatggcacccaattcactagtgaactcttcggcgactactgcgaagacatgggcatcaagctctgcttcgcctcacctgcccaccccagaagcaatggccaagtggagcgcgccaatgcggaaatcctcaaaggccttaaaaccaagaccttcaacatactcaagaagcacggcgattcatggatcgaggagttgccagcggtgctctgggcaaaccgaactacaccaagccgagcaaccggggaaacgcctttcttcctcgtctacggcgcggaagcggttctcccatccgagctcaccctgaggtctccccgggctaccatgtattgcgaggctgatcaaaatcagcttcgcagagatgacctcgactacttggaagagcgaaggcggcgcgcggccctccgagccgcgcgctaccagcagagcctgcggcgctaccatcagcgccacgtccgggcccgatcactctgcgtcgacgacctcgtcctacgccgcgtccaaacgcgtgctggattgagcaagctttcaccaatgtgggagggtccgtatcgagtggtcggcgtcccccggccgggctccatacggctggccacgggcgacggcactgagctgcctaacccgtggaacatcgaacaccttcgtcgcttctacccctgaggggggggtcgggagtcaggtttcgggctcgggccaaccccgcaccccccttcgggcgtgcagggttggccgggggctacaacatatgcatattcttatttctctcttatatctgaatttctataaaagcagtttcaatttcctaaaggctgtatctgtgctgttttttccttttgaagaatcttgacttgaaataggtcactcgtgctcaatcctgccctcgggggctcgggtcggctaaaatcgccaaacggggcccagaaccgagccgtgccccgaggcgtggtgaactccgggggggaatcggcaaaaacccacaatcgggtcacccataaccctcggtcaccacgttcccggcctggccagtctcgacatgtggatctccccaggcactagccccgacccgcgccttttgaggaccagaacctgggcacaagcccttattcaagctaagacacaaaaggaccacggcacagatcatcctcatctcatactcacagcaagatgaaattaacacaaaaatttcttcatttttgattacagattaagttgatctatacaaaaaagaggcccgaaggccttagaagaaagaaaagaagaaaaaactgaagaatggcgggggtctgggggctcaatccgatgcgcccggatcgccggcctcgacgtcactgtcgtctgcaccaccggcattgccctcctcgtcggagttgggggcgaacgcaagccgaggggccgagccctcgaagctgtcgacgatatggtcggcggcatcccggacctgcgcgcgcgcgcggtcctcggtcccaggagggaactcatccagcgccatccatggagagaaattggggtccctagcctggtaactcgccaggacgagctccaccgctccttgggcgaggtccctcgaggatgacttaattgtcttctcgagctcctcggggagccgttggagagccccagccatcttcgagaggcgctgggcgaggcctccctggttggcggcgtactttacggtccgccctctccagaggcccacttgccgaccggcgcaatctaggcgggagacggcgtcccaaagcatgccgggccctatctcgcctgccaagcggagggcttcgacctccccggcggacgagtccagcgcgccctgcagatcggcgatggtgcgttcggcagctgcgaggcgggcggctaagtcgctttcgcccgtggccgccccgccgctgcgcgccctcgcgtccagctccttcgcccgcgcctcaagctcagcggcccgttggttcaatacggccctctcggcggggcaccttccagattgcggtgcgcctgctcctcctgcgctgcctcgcggagggacaggttgaccgccagctgttgcgccgcggcctcggccccctcgagagctcgctcccgttcggtgagcgcgtcctcgcggaggcggagcgtgaactcttcttcggcgcaggcagcctcgtgcgccgccagcgttgcttcccggatggtgacggcgccctcgcggtccgccagatccctctccacgacgcaggcgcgctcttccagcgccatggcgcgcgcctcaagggcctcttcgcgccgccgggacgccgcttcggtctccgccgcccgctgttctcgggcagcggcagcgtcaagcaccccctgggcggcgtcgagcttcttccctagctccgcctcccagctcccgtattgaaggcggagggtgtcctgcgcctcgttcatcacggtggtggcaatgagggcagccccccgctcctcctccacttccttggcgatctccgccagcaccttcttacgagtttcaagctccgagacgtgccggcggtgagccttacggcccacctccaccatggcctccaccgagcgtcgcccctcttcgacacgcgcccacgcggcgtcgagctccgcccgctctgcctgcaggacctccacctgggcacttaacccatccaacaccgtggtgtttgcggcggccaaggcctgcagaaggggctctgcgttcagtagggcgatagaaggcgtggggaagagccgccttggagaggatgccacgcggctcgggccgccgatggaagtgccggactcggggatgtcccccggacccggttggtcctgagcgtcgcccgagggagtaggcccaagcgacgcgcccgcggcctcgtcgccagctgccccggaagttgtcgcctgagtgtcgcctgagggagtgggcccaagcgacgcgcccgcggcctcgtcgcgagctgcctcggaagtcgccatcgcctcgtcctggcgaaatccggcctcctcccgagcggcttccccggcctggcgggcccgggcggcctcctcccgagcggtttcctcggcctggcgagcccgggcggcctcctgggcggcctcctcggcttcccgtaggcgatccgcggcctctcgccggtcagattcccgcctgagggcctctgcggccgccggatcctcggcctcagactggccggacttggaatggcgggagggacgcgacgggatctcgctgaaacaaaagaaaaaccagaagacgaacaagatgggtgagtgaaaactcgcgttgagagaatgaatacagccacgatgggtgagagacgaacctgcgagggggtcggttaaacgaccactttggaggggaaatgaggtttccccgagatggttctgtctcccccatcttacggggccgcttcttcttgcgctccccctcgggctgcgatgttggcgcggccccctccgggcgcctgttactggcacgcgccgccccgccccctcggggaggagatgggggaggtgttcctccctgcttcctcttcccccgggcgtcggcagggcggctgctccccgggcccctgtcgcgggaccaagaagcacgaccccctctcggggtagattgttcccccctgcggctcccgcctgcgccgtcgtggccctttggagctcgctcctctgaggccccgaccgccatcataatggtcaggatggaggcgcggtctggatcgctgcagagggggaggattccttggggaatgagggccgcctctacggagttgagattcagcacccattgaaccaatatcttgaagtcctcaggagcccagtcccatctcactccctggtgggtcctcgtgaagtcttcggacccggtgtactcccaggcgccccgagcgcgtcgctggagcggtgcaatccgacgacggaggtagtcgccgtacaccatggcccctgtgagcccctgggatcgcaggcccgccaggcggtcgaggacggcgtcatagccatcccccagatctaccggcacccgccagctggaggcctgcgccgggggctggctcggaagtcggaggcgcgcttcgtcggcgaggggagtgtagaaccagtcgctcttccagtcgtcccacttcttgcggagggcgcaggggatgtagcggttcagcaccggcccccgtggctggaagtagcagccaccgactaccgatggcggcgacaccgactgcacagtgaagaaccaccggaacagccgaagagatgggcgcaccccaatgaacatctcgcacagatgcgcgaagatggccaaggtcatcaccgcgttgggggtgaggtgcgccatctggagatcgtagaactccagaacatccatgaagaaagaagaaaatggtggaaccagccctgccattgcaaaggggagaaagaagacggaccgccccgggtagtgtggcgccgggcgtccctcgcccagcgtgactatctcccggccggtggcagattccggcatgaagcggcgcgacagcccagcctgcctctcgctcacgatccgggaaggcggcagcacgctaccatcgagcagagcggaaccccgtgccatggcgccggaggaagagaagattaagagcgagcgcgtgtggcgaaggtagggcacaggaaagaaggagttagggcgcaagcggcgaagacaaggggaataatggcgaaaggaaggaaacagatcccttcctcagtgcctttgtactcttgccaacgctgtgcccggctcctcgcttctcgcgcccactatttcgccccctcgtttctcgcgcccacgcttccactaatcccattcgcccgcttgcggcgcatgaggtggatatgcggttgtggcagtcgagatagatcatatcgtgcgcgcgttaattacgctcgccgaccgaagcgacgttaccatatcttcagacgaaacgaatcgccatgtccagattcgtgtgctactcaagtaatgtggcagtcttgaagagaccgctcattgttgacagccgagttaccattgccgatgtgcgtggtttgtgaccgttgggtttctgcccaattgtggagaccggtcccacctgtcaccaggtcttaggagtggcgtcacgcccgaccgtttcccttaaagagggcgatcgccctggcataacgccgggggctactgtcggtgacatgggatcaggagtatcatgactagaggtttgaggcagacacaatcgcacacgtggcctggtacccccgagggacgtcgggcccgagggtgatgcgttcgccctcctcttagtccccccgagggggt

SEQ ID NO: 22972 - DNA, 24725 bp, Oryza sativa
ctaattaggcttagaagattcgtctcgtgatttccttcataactgtgtaattagtacctctctttatatagacttaaagcttcagcgacgcgtcgaaagcggccgctctggtgcttagtagatcccccttacaaggtgtcaagagcccgttattacatgcaccaaatgccttttaagtccaggggctggtgtggcatcagagcccaatcgtttgtcgtgggcaggaggccacgacctgactagttccatgtcactcgcatcgtggagctgacgatccgccccaccgccgcggacgatccagcctcaacagttcgccggtatgcacgcgaagggcggcgggaggaggccggctaggcctccttagcgcgccatccgcgtgcattccggctaactgttgaggctagattgacagcggcggtggggcagattgacagccaaacgatgagagtgacatggaacaaaaaaattcgtggcaaaatccaaaagatttctgaatggaatgcaatttatattaaaaaacctatgaattagatggcaaatagtgaaatttctcacctgatcatgacaccctgtttagaaatatgactatgtttagatgggactaaaacttttaagtccctatcatatcggatgtttggacactaattataaatattaaacgtagattattaataaaacatattcataatcttggactaatttgcgagacgaatctattgagcctaattaatccatgattagcctatgtgatgtacagtaaacattctctaattatggaataattagacttaaaaaatttatctcgcgaattagtttttatttatgtaattagttttgtatatgtaattagttttgtaagtagtctatatttaatactctaaattagtgtctaaatgtagagactaaaattaagtccctagatccaaacaccaccgtagacacgaatcaactaataccgtagcacacctagatgcagatgcacctagtcatattctctttctcaacacatatctgagcacctctgttggcgctaccctccaaaagagaattagaacgcacagcggagtgcagaagggtgcaccgaagatgatcaagtagacaatgttggagatgagcaggtcgatgccgatcggggctccaatcctgagcacgaccctgatccccatcctcctgcgcaccacgtgcgcgcagctcaccatcagcaccagctccctgttcctgaacagcatcgtgccggcggcgagggcgcagacccggcggcggtggcgcgggacaccggagccagcaccaggtacacccccagcgcgaaggccaccagcaggctcctcatcgacaagcgcatccaccacacggaattcttgaagtacctgtgccggacattcatctccaccgccgccgtgccggcgtacatcaggctgagcgtggcgagcatggagcaggtgaaggccagcgccacggcgtacatgaacgcgtcgaaggcgtaccgccccgccagcgccggcgcgccggctgcgacgtagcctcccgggggggagaaggccacggcgaaagccacggtggcgacgagcacggagccgacgcccaggacctgggccgactccgtcattttcttggactcggcgctctcgtcgagcttgggtacgtgccgctgcaggaagtgatcgcgcctgatgtttccgccgctgagggcgttggctattgttagacaccaaagtatccacgttcgcgcgttctgcagcaacacgagcaaagttttacccaattttgattagcttaacgatgtagttctctccttccggtgctaaataatatttgacgctcttttaagattcgattaaactacttttaaaactttggacatcagtttcatacaccaacaaatttataaaatctagagtataattcataaaatccctgtatatttggtctaaattgtacgaaaccgtatgagttttatactgtgttgcgcataacagcatgtattatggtgctatagtttcatacacttttttctaatctactatgcatatgaattttatgggttcgtttatccatcaaagttaattatattttattgtgctataatattaatagttaagttagttgacggtgtggttttctaagaactagtttaaattctagatttgataaaggggctcgtatttaccgctatttatttttttagtggtaggtggcgtttccatcaatagagaggacttcatcaatctcaagatataccgactcagtcctgaagatgctcacaaaaatagtgtgtgcgcgtgctatgggtgcctatgttcgttccatgtttctaacaaaaatacaatactacaagtatattcgtactatttttttttcaaaatgcagatttacatgatttgatataaaatagtttaattgttgtgaatttatttttaaaagaaaaacattattaaaaagggcctgatctaagggcacgtacaaacgtgtataatagcggtctctctttattgccatgtaagtaaatttgataacgtggaagagagagaggagagaaaaaaaaagcatggttgctatacatgacaacaggtaagagtcaactcttaacttttattaaagaaaattttgttgtatgagggtggagaaaagaaaagaagggtagtaaaaaaatattttggtacgttaatgattaagagttcttgttgtctcaactattgtaacagtatattctttaaataatatgtcttacttaaaagaccatatcggacactatttttgtacatgccctagtgaggtaaaagtgatgtaccgttctgttggagtaaagacccgctggaatggtactcctggccaggtcagccggtgtgaggccgtcgttgttggcaagatccaagcaaaccctgcgattccgaaacaagcaccagaacactctcagcaccccggccacgaccgccaggtgcagcgcggtgttgccgtcgtcgtcccgcgcgttgaggatcgccgccgccggaaaccccgtccatcgacgtcggaggcgaatcccacgacctcctgcctcctccggtcgacggcgacgtggaggaaggtcctcccgcgggcgtcgcggaggccggcgcactcggggcacttgtcgagcaagagggcgacgagcctcaggttgccggcggacgcggcgacgtggatggggtagtcgccgtcgccgtccggctggcaggccaaggacgggtcggtctccaggagaagttcggttggtgtccggcggcattggaacgggcacggcaagaggagccaccggaggagtgagctgttctcgatgtcgatctttggtccgtccgccgaggcggcgaagtggagcgctgtgctgccggacgcgtcggcttcgccggagagcccggcgttccattgcattatcttttctgtcatttcttcaatttatggagaaaagcgtgagaaaaactattactccctccgtcccaaaataagtgcagttttatactattcacattcaatgtttgatcgttcgtcttatttcaaaattttttatgattagtatttttattgctattagatgataaaatatgaatagtactttatatgtgactaaatatttttaatttttcataaattttttaaataagacgaacggtcaaacgttagacacgaatatccatggctgcacttattttgggacggatgtagtattaaggtactactgctaccgtgctctctatgagatgatatgatgttaaaattaattacaggagcagttaatttactactagtctctaacccgtacattgcacaagttacgtttggatatttctttaagtgggaaatctaaatggagagcattcttgattttgtcttatggcacgacgctccgccagccatccatccgcgtcttcatgttgtcggagagataggcttgcttccattgcaatggcatcaaagcgaggaaccttcgtggcgtcaggtatcgctatacaccaccaaccatcgaaactaaatattggttacacgagtctattctttttctaatgatgacttatatattttaaatcatatattattttcatttttgtttgtaccatcgtgctctactcaaaatatacgataaaacaaatttaatatttaatatattcaaacatttaaagtaatttacttaatttcaaaagtaatttagtaaaatcgtagaagtaacttagctctgcaatagaggtaactatctaagcattgaaagttgttatattgatcaatcaattgatgttgactgagacacggacacgtaaatattatattgacgaagagtcaaagaaatgagaccacttgacaggaaaagaggacaacatactatctgctagttatcatgtcgattcacgtgcatgctactgaggctaacatgtcattacactagtataatgtttttttatagaatctttgatgacctatatatttttagaccttatattacttttaagatccattttgctcaaaatatgtgataaaatgagtctaatattgagtatatttaaattatttatttattttcttaactcctttagaagtgtgttacttccaataatgtgcactatgtagtcgtgtccttttcaaatgtattgctagattttaagctcttgaaaatacaaatttccagtcacctaaaattcaagccctctacaaatcgagcgtctgatttcctaaaaaaaaaaaatcagacggtctaacgtttcaattgaccgatgactgaaatgttgagtagtacatggtgaaacatttaagaatttgtgaagcatagtaagaacacatgttgaaataggtcgctattacgtatgaaacaatgtgttttattggtttgaaacatattttttattaaaatataatcatgcgatatcttgttataaagatttaattataatgaatattatattatgtttggattatatattggataagtaatttagttgaaaaatatttcaaagattgctacaagcctatatgcatgaatggaatgaagagagagcaagtatatggtagaagagagagtaggggtagttatgtccgatactttaccagccacatctgaaacgtcatgctatacaaggtgaaaaaaaagacattgaaatatttatttttcatgtgtaatacattaaaaatatatgttgaaacatgtcgcattacgtatgaaacatttagtattaacggttataaacatatgattatattttagcaaaataatcatgtgatctcttattataaaaaaaattaattgtaacaaatataatagtacgatcggatcgaaaatccgataagtaatttaggaggaaaaaaattttgaagatagccacatgtatacatatatggataaagtggtgaaaaagcaaagtagtatactaatatggcagccatatagtagcttagttgcgcccgattttctttcctccaatcgggttaccgataggaatcattctcatctaaaattgcatatactcttaagcctaaaattatggtggcacgtgcggaacattatttctttttaactatagttttattgttatattttttttcctattttcttgtctaagtttgaatgttttttttaaaaaattgtatttttttgaaattgtaagttcatgtaatgcaattttgtaatttttggagtatgccttgtttaagtaagtaatagtggagtgatgagaagaattacatcgaaaactcactttgattattcgaaagagtgtaggtcaattttttatgctacaaggcaagaccacctatctaaatataaggctaaagccaaattatttttcgtcatttattgatctcttcgacggaagagggtgtcctaaggcgcactaacgtgtgctttgccctgtcataccagaacttctgaatcacttaccaagacttctggtattcctgtagtggcacgtcattaggtatcgttgagggttgcaaacgtagtgctagatgtgttttgggatggacacatttttatgtcaacaatagggaaacacatggagtcatggttgtataatttgacttatcatggagccgaccacctatattagaacgcctatagaaatacaatatttatagaaactgttgtcttaacttggctgcacgtaaaacaggggcctgcatatgagccccccccccccccccccaaccaaaagtatagaagcagattttataatgcactatatcaagtaaaatgagagagtgtcttctaaaatcgttttatatagtgtaaatcatgttaatcacacttcacacgtgcacatacgtttttaatatgactttagtgaagccaagaggcacgccaaagtcaacctcttggcttgagcttatgccaagaggtgcatttgtcgatgtgcttctgtttctttgatcgtgcctcatcagagtgtatttgtcgatgtatacgtgtgggtctttcatatgatctaaattgatcgtgcggagaaaatgttttcatccctaaatagttataaaaaacaataagatagccaagtatgaaatatattactttacaaatatgtaaataaaaaaatcaacttttgaaaattataaagaaacaaatataaccaggaatgtgtgttaactatttaagttgaatttgtttcttttggtattagttgtaagagtccaatttgatattacgagtgacatagttcatatcaatctatgttaatatatgctgttaatttttttaagaaaaataataactatttagatgatatataagaaatatatcccatcgagaaatgaaaaaaaaatcaatcttcacttgtaggcacgtacctgcgccgcgtaggacagcagcgtgcagggcagtttggccggccggtccagaatacgagagctcgtcgcccccttgctgatgcaggagctccgcgatgcggtcgtgccccagtgagatcgcctggtacaacggcgacatcccgtcgccgccggggagacgggcgagccgcggatgcacggccatcaggtggccgacgaggcgctcgtcgccgagcctgacggcgtcgtgcagggccgtctcacgccggccgttctgcttctccagcacgtcggccaccctgaacctcgcgccgccgcgctcctcgtcctcctccatcgccatgtcgaggaggcacctgaccatcgccgcgttccccgccctggcggcgcagtgcagcggcgtgtcgcccctcgcgttggcgcgatccaggagggccatggcgctgcggtagatggtgcgcgcgcagctcaggaacgcttcgctgtcgccggaggccgccacgacgtgcagcgcggagtctccctgcggcgtcgtcgccacgtccaggagcagcgccgccgcggtgggtggctgtggctccccggccgcggcgacgtggacggtgacgtggtttggcgccggagcggcccccagaagtacagcctccagccactcgcggtggccgccgcgtgcggctctgagcagcctgcgatccatcgatacggggtctgaatcaaatgatgattaggatagaacattatattgcagagtggctgtgatctagacccgtttggtatgttgcgattacttataattaacatgtcagagatacttagtcagatgctttaaacaacatacgagacttgctggaagcggctagcactagcacacggtcatgcgtgcaaaaaccatggacgtacgaaccagcggatcagatcaccttgtcttgcattgcatcccgtgtgccgggtgtgaccggccggtggcagagccagcatcgccatcaagtctgtgtgactgtgtgtgtacgactataaccttcttctcttttagatatattaacatgttatttatagtaataagtttgaatttataatgataattacaatgtaaataagtgtgtgtacgacatcattaatttcacaagaagtgtagctataaagtgctatatatctaagccgtaatatatggtaatgatattatacttcaaatttatttatttatgtttttttgtaaaatcataggaccctaaaccctgcacatacatttaaattaggggaacgaaagatctaaatgaggattatgctgaaagagacttggaaatgggcatgagcctaaattaaccaaacaactcgtatgaggagcaaataaaaaattaaggcgtgactcaaggagagatggtacactgaaaagaaattttttgatgcaaacaaaaggtaaattagaaagcttaaggtattgcgttcttcattgatggaaatattacagatttcatggatgccaaactcaataagttttgtattttgatcgtgatgcgaagccaggaaagaactcaagaacgttcagctgataatgcaaagttcttctgttgaacactgccactactacagatttgattttttcgtacgatcaaaatagattttctcatacggagatcccacccgtttatattcagatgtttgcgaaaatcaacatttgcccctcggaggggtgagggggaaccgcaacgcggcaaagccacggtctccacaacgcggccacggcgttctcccgcatgccgcacgccctcaagttgtcagagagctattaggccatttacaatgcaaagacgtggagttcagcctccacatgctagctcggagattcctctccacctaggcacttttcactccctcactaggaacggggagccaaagtaagcattagaataactaacagccacgattcatcaccgttattagatcagcataaaccaaacaaaacaagcagatgtgatgcgaccgaggcagctttattcaacttgtccagaaccacttctctaccgactatcacttttgcatgggtaaaattaactaggtaccacgggttgattgtacagtatttctcaatgggacagacatgccgaaacatcaactatttcccccactctcactactctccatctcaccgtctttcagaaccttggcaaaatctggcgttggagctgtcaaacatgttagccgtcaggtcccgtctcctccatgtctacagccacaagcatccatgccctctcctactcactgcacatcaataacagtttaagaatagtaatattgtggtgaaaaggatgctcactgctcaggcgatcagtgtacaaaccttgtttagagctcatccttgagaggctcggctggggccgactctgccttctccttcgcctgaccagcggtttccttgttcttcttaatgaagtcgacgatctcgtcggctgtcctgccgctttcatagggaaccatctttccactgggggtgacgaagtacagggtggggtaaccttgcacatcgaactcgcttggcacatcgttcgcagttgcatcctgcatacaaggtagcaaaatagtagttagatgaactgtacttgtgataggaaagaatggatgaataatgcactcaaaactaatggcaccacccagatagaaaggaaattaccatcttagcgatgacaacatccttgtcgcttttaagcgtcgtagctgcctcatccaagattggagccagcttcttgcagtgtccgcaccatggtgcatagaattcaacaaggactgaaacagaaaacagcaaataaatgagagctgcaaatcaaatagaggctttgccagcactgataattgaagaagctacaaaaaaatagcaaacttgcttttgaccagggaggaatcagtcgctcacaatactaatataagaactaaaaatcatctcactgaaaagattacgggggacaacagtatgtaccgtttttgccagacttgaagacaaaatcatggacgttatcagcgaccacaaccttaacaggctcgtcgttgacctcaggaataggttcagacttcctgaatggagacaatttaccatcctaaaaatagaggttttgtgagcattgtgcaggtaaacaaatatcctaaaattacataaatagtaacaaataatcacaattatattttacaagtataaaagactacttacaaagtattccttcaaccaagaaacaatttggtcaggctcaacgtgtgccttcaaaaatttcttggactcaccatcctggatgatgatgagtggtacctgatcctccctcagcccaaagtactgtacagtgacagatttaaagttagcatcaagtacattaataattgtttgaaaaaaattataagaaagtgaggtaacaaacctggaaggcaccttgactggcctcaatgtcaccaatgaggaacttaatttccttgtccttgaactcctcagcagcaccataataaactgacttgaaagactcaaacggtccagtggagaagttcaaaaatagcatagcctgcataaaatttggtacagtttagtgtcagtcatcaacaactgcaaattactggcctaatgatatacggagtattaaagaacaatatttgaatccctgcgtttaatagtgagacctgccaaatatataaatggagaagggtatcagatattacagtctaagcaaagtctatttgaaacacgagaaataaacatttaaattgactattaatatacagtatcaatcaactactgccagctgttattaaaagaatggagcttttcagagagcaaggaatgccaagcgcttaccttggcagctgagctttggaaaaatttcagaaggtaaggatggttgtcagggttcttgtcaaaagtaacaactttaggggtgctgctagcatcaatgaacttctccaaagcagtaacatcaaaatcctgaagagatatgcaaacaacacattattgacaattaaccaaaataatgccagccaataaaggctgtgacaagttgtaggaaacatagtggccaaatgaatagttaaaacaatgaagtttgatatttgaggagttatataccttgctgtcaacaacaagctcatcaaagggcttgaatagcctaaccaatggtctctcaactgcagcatcaccgcgtggaaggtggttggcatgcaaggtgtggccaaagtcataatcagatctcagcttctcagcaacctctatgaagtttgtatactcagtgccacttaattctgagaagattccaacctatttcaattgctcattcaagtcagcagtcaattttaaagcatgaacagtcggaacagaaaatataagttggagaatgtgtcatattgaatcgaggtcttacaatgtagattttcttgtcatcaataaggttggttgcgtcttctggtgacttgatctccttggaagcaggaccaacctgcttcttcaagtattcaacaatgccctcagcctccctcgggcccttgtattcctgaatgttcttgccctggttcctgaatatcttgagtgtcgggaaaccctggatctcatacttggtagcaagaggcttgttcttctcgtcgttggcatcaaccttggcaagaacaatcggtggatcgtgcttgcttagctcttgtgcagctttctcatactgaaacagatcaagcaaagaaaattaatacatgggatcaaaccatttaatccaaaatgtgaaaatgtgctgttaaggaagtgatccaactgtacagaagcatacctctggagcgagcttcttgcagtgtccacacctgcgaatagggtttatccaattagacacatttagaacaagcattggttaaattttgattcagataacacaatagcacgatgcacaagcataatttcataaagaatcaacattgaagtacaaaaacaaaataatagtgaataattgaaccaagactacaaagctatctggatttaaaacctgtgtaagtgaaagaacacccgaaattctcagttgcaaccctgatacagacaccttataactcgaaaaaccaagtaaccaactcactcaatctaaaccactgaaatctgactaggagaccaggcatacacatcacaaacaaggtaaatctactacaatttacagaatcggctcatccgcagtcacaggtccacgcacaatcgaatcggcgaatcctatccgaatctaagactggatcaccaagatcgagaccaacaaacgcatcaattcggcaaacaccgagcctcacacgcatcgccagcttccccaattcccgcatctgaactgaagtcctaaaccctccccaaacctcgcgatctaaatcccccccccccccaaaaacccacctcgcgagatctaacccaacacgcacagctcatcaacaggggggccgtagcagagcagagcagagcacactcaccacggggcgtagaactcgacgaccatgaacgggtgcttggcgacggcctcatcgaagccgtccgcgtcaagcgtcagcacggcctccgccgccgcatcgcccccctcctccgcagccgccgcctcctccgccctcgccgccggcgccgacagcaccacggcgagcgcgagcagcagcgagatccaagccttcgagatcgccatgaggaggagacggagagtgtgggtggctttcggaatttttccctgagacgacacgcttctcacacgggttttaatagggcggagtacgcgaggggggggtttaccggatcacgtggaccaagtccacatcgaccctgaaactgcccaccgggccccaccccgcggactccctcgtggacgcggcgcaccggagtcacgagatatttacaggtaacatttgcgatgaaccccctgtacttatcatcgtcaaatcatccctccacgaggctgagatgtgctaaaactagaggtaataaattactaatatgcccctgatgaggagtgatgtgtaattaagtggaattaggggggcgaaagtggggtggtcccgagggataaatccaatcctgtgacttcaaaaaaggcaggggaattaacgacggccaacgccacgtcaccgcgcgccccgactacgtacacgtacctgtacagccctcggccaatgggagggcgccacgtcagctctatgacatgtcccggagccctgatttgctccgcgcccccaccagcgccacgcaacgcacacgcttccaaaatccggatccgggtaaattaggcggcgtttttactgctctcggatacgataaaagctgtgtagtaaaataattctaatattggcctcgtgtcgcgcgtgattgctgacgcggcgctggatcgagctcgtttgcgttgcggcagtggtgacgtggcactgttgaactccgccacgtttcaccgggtggtcccgatcggatggctactgtttttctttttctttttttcaaatcgatgactgttttttttgctgcgacttattttaaacttgtcgatcacgagaatgtgttcacgttcacggtcatatagataagagacacattttattgtttcgagagacatttatagtcacagatggcagatccggcgatgggcgaatttatttcgcatcccacctcaaaattttacaccatatcacatcaaacgtttaaacacatatgtccacgagtgatactcgtagaccgaatatagagggtattggggtacgttggtacaaggatctacgtaatacgacatcaagcaaacagagaacgaggattatactggttcagaccccttgatagataatagccctaatccagttgatatgggattatatgatggaaaagacaggttataaagggaacgatggaactcgatgaaaccgacgggatcgtaatcgagttggttcgactagatctcccggcgatttggctcctgcaggctccgacttcgtaggctgtgggggttgtgttggctccgagattcgatgccttaggtcctccagggggtcccttttatatcgcaggtcaggcggtttccaagtagaactcggagacatcggaccctacacgatacattgacgacccagtctgtccgagtaggattctttccatctgtaaactccgtgaaggatttacttagttatgcgcagaatgtccatatacgcgcagacatgccatatcgatatgtgacgtatatcgaagggtaaagggtatacctaacccgtaaccttgacagtagcccccgacttctgcttaaatgaactcgtgtaaccaatcgcgacttctggtgtcgaggctgttgttgttctcggtgtgagaactgtggagacaggacatagccgagaacaccatgtgaagcccaacggtcatgagcgaatttaaactgaagtgagaaagactgccgcgcgtaacggaccaagaaatttccggcggtcatctctctcctttccttgaaatttgcaccgtcggaagtgcgtttatttaagagagttttggggatccattttgaagtctgcctgttgtgaagaaaccctccaacctccaagcgcttctcgtcttttccgctcccgcaaaaccctagctcatcaatctcagtcctttctccggcgatctccagtcagcgatggatctcggcaagtcctcctccaccagcgcgtcgctgaataagctacaggaggatggcgcccctcccggtcgtgggaccatggagagagaagaaggaggtactgaaccccagcttgtcctaggtcgcatggttgcgatcgaggactacattctctgcggttttctccctccgccttctgaatttcttctcttggttttgaacttctacggtctttctttgctccatttgaaccccaattctattgccttccttagtatttttttgcatctttgtgaggcctacattggggtagagccttttcttgatctctttcgcttctactacgagttgcgttggatgtagtccaacagggtatctggatgcgtcggattccgactccgggatggcctgaagtcgcgttatatccccttccagtgcccttcctctcatagcaaatggcggacgaggtggttctatcttcagatagaaaattcggatcctgtctttgttgttcctgaggaacaaccagacaagatttcgtcttggaccgcaaagcccaccttgaccccttcccttcagtccttcatcgatgttatcgacgatctccgagtacgaggtttgtcggggtatgaagtcgctgctgacttcgttggtagacggatccagtcgctccaggctcgagcccatctagcctttgactattctggaccggaggacacgacccaggtttctcctcggggtatctttcttgcatttaccctgacttgcttgtgtgcgcgttcctcctgacttatcgaactttggttctcgattcacaggtctgagcagcgaagccgtgggacgtcgtgtcggccaggtgatgatcagtggcccaacgatggcgagcaatgtccccgttctcctttgcgagaagggggcggccgaacgcgacgctgccatcaatgtaagtgtactcagtaggccttctgtgtttttcttccgggatcgccttatgacttcataaagcgtaggctctccctctgactgatatcatcgggccgctcatggaccatcaggtggcggtgtcactaaaagagaaggtcgccaaggaggcgtccgatgctgctgctgtcgctgccacaacaagtggtggcgacgttccaaaaaaggggaggaaattctcctctgtaatcggacatcgtcgaaaggcacctaccccctcggtaagttctcctgtcatttgatcacgtagtcagaatacttccaccccacatcatatcgattgtactccaagccttggacgcgtctcccctgcctccacgacggcagcggcttgtgacactcggcgagaagtgagtgaatgaatttgaggtttcgtgatttcgtcgaactttgtctgaaccacagccttcttgtagggcggcgcgggcgaaggcggcgcaggacgggtctggagggacttccagcgcgtctcctgctgtagcctcgacggatgtcgtggtcgtgcccgggagccacgaggcgacaccaagcggcccagccagcgatctcgtggctggtcatggttcgccggctgccgtcctcacctgggaggagctccaggttgagatgtggcgcctcctcgaggctggtgctcgcggcattggccgcgagatcatggaggtgagagcggcggcggcgtcgtcgtcggcgaacgagcgcgccgaccggctggcacacgacttggcggaggctcgtgaggacctcaagaagatgaggaaactggtggccgggaatgagcgacaacggcaggggctcgagcaccgtatgtcggagctcgagaacaacttatcggaaatccgtggctcgttgcgggtcacctatactggtctgcaccagctcgccggggaatgcggtatcaagtctaccatccccgcgaatcccaatgagttctcgctgacgtcttctcttgcggagctggcggcggcgatggaggagattccctccaagcatgcggccaggatcggagaggagacgtccaacgggaactacaccggggcatgccacgtccttgcgtgtgtgaggctggcgcaccctgaactcgatctgcgggagatcttggaatagggggcggctagcgacgcgcataaggatgtgatggaagaagtcggtgatctgggggagtctgttctccccctttttgaagagtaggattttgactctcttgtactccttagacatgctgtataaaactccaattggctccaaccgcctttgtgcgtgcagtcatcaccttagtttgctttagcattttgatcttgagtactttttttgtcccttgtagagatgttgatgtcgaggatgtccagcagcgtgggcagcctgagtcgccagcgatcattccggctcttgcgtttgagccacacgcgtcgccggacgatgtagatcagattttacccgcgagaatggggatggcgatgacttccttaggttagtggtctcttcatccctttttgctcctccgacttgatcaaccgtgttctcgaaagaggagtgcagcttgacttagtcgtttccatattgaacagatctcgagagtgcgcttgctggccaagatcgtcgtatccaatattggaagatgaaatttgaagtagcggagctcgagagaactatgctggaagtaaagaaagagcaagctgtggaaacgctctgaggttgtgaggtatggttcaacttgtacttgaagagttgctgcacgtccatggccaaggtttgtagagagctccgagtaccccgtggagatcctgaggagtcggcggccggatacatctcgtggctgaatggggcctgtactcagctcgaaggcgtcggcaaacgcattgacgaagccttgaagcaggaatgtcgtcgatcgagccgatatgccggagggcacgtgttggcttgcctacgagatcatcgtccgcgacaggacctcgagtttctccatgaaggttttgctcgttctcggagaactacggcggagatagaccacctggcaaagtcgatggcgccgttggcggagaaggtcttctagtctatggactggagttggccttcttggtagtctttgtaccctgtgatggatatcttagggaaaagtgtaatatagctttgaacttgtgtaaaattgtaaggggtattttgtgaaatagaaaagaaatctatcttaacaaatccttcttactctggatatcgtgtgtaagggtgtgttctcagttcacgactttagttagtcgtttgagtcgtacactctctctagcccccagccttgtcatcggaggatttttctcggaggataagcctcttggacctttgacctgccttggttgaataagcactgatcctagcccccagccgtgaagttggaaagtgaatttccgattacgcggcttggttaatacgcacggcgagaactcttacacgaccaggtcttacatggtctttcgtctctacaggatctgacaaggccttatcggctctgggcgtccccagtagaagatcccttaggttcatcggaggccttctcaagatgacgtaaagggacatggggataggtttcaacgctaggtgtcatcttgttaacaaccaaatttggtaacatcggcatcaggaaagaagattagatcgaagcaaagtcggaggcagagattgagttcggaaacaaagcaggaatcggctggagtccaaatcggatgcgattggcatcggctaggtctgagtcggactaggtaagccgatacagccgattccgacaatgcagcttgatgtatgatatcgggttggattgaggtgcttcaaggtgattgccgcacatggatagagtcctgagaagtcaattgtatctattaattagggtgttttatgtaatctccttagagatacgattgggcaaaagtctgccgcaaagacttgtggtatcctagagtttgataagatagtagtcgtgtctgttatggacatatcttgtgattctcgggtataaatagacccgagccctatgtaacttttaacacacacacacgttcaatacaatttcggcgcatcgccacccttttgctttagttttgtttcgatgagttcttgctttcaggttgagctgcatcggtttcgatcttcaacgagaggtaaaacttgttatgacggcttgtattctcgggattagtgcttccatctttatgacactctgatctcgtttatgtaattcatcgagttatcatatatcttacataatctccggcaataccgctatctaatctacaatcggctaacatctgtctgtagagggtagccgattaggttagatatcgatgttgacttagattatataaggtatccaccactctatgaaacttccagcgacttgattgtctagatattgttcttcttttcatacttaatgttgcatcagtcgagtttgatctattaagtcgtgcttagaatatcaatctctaacatgccttctggttgccaattagggtagcatcggagtttcagccgatcttatctgatctaactatatttgctctatatgcttcattgacatattaaatctgtcctttatgtcaagatattgctgtatctaagtatattagtcctttgtttaatatattatgtctgttttaatatcctgatatagagtagtattggagtattagccgatacatgctagatctatctgatcggctatgctataaacatatatagccctgttattaatatatatttcgatctaagtgatttatactgtctcggcatggcgaccgatctatcccaatcactcgatttaagtatatatcgatataagaactatatattggaaatatctacagccgatcgaatagatttagttctttattgtctatttacaactgccgatcgattcacatatgacatcggctcaaagataaatgttatgtcatcggcacctagccgatcggctatcatttatagatttaaccacggtttctttgcctttatttcttgttgattacgggatcaaatcaactggcacgctagtacacccgaaggcgagctttggacctacactggagttaagcagatctcccaggcctcgtgttttctgtcaacacatctgggtaagggatcatcgggtaggaacactttgattgtaatatgcgcctaaaaataggctccattgatactgtaaggtgtcttacaggtgtggatgacattgactcatacatagaatttacgtagttggtcaatattccaagagtttgccaactcgcgaccatcaccgtctgcaatttttaatgcgcctggccgcaaaacttgtgtgatcgtgtaaggtccttcccatttgggtgagagcttgtttcgccctacttggcattgaacccgtcggaggacatagtcgccgattgaaagtatgcgtgctcggatgcgctcctcgtggtagcggcggagagcctgttggtaactggctactcggacggcaactcgttcgcgatgttcctcgagtagattcacatcgacgtttcgctattcctcctgatcctcgtcggaatacttctgtactcgtgtactctgatgtcgtagctcgctggggagcatggcctcggagccgtacatgaggaagaagggtgtttccttgttagacgttgtcggtgtggtgcgtacggcccatagtactgatgggagttcttcgacccattttttgtcatgtgacatgaatctgtcgtagacgcgggtcttgatcccttgtagtactatgtcgtttgccctctcgacttgtccgttgctttgagggtgagagaccgaggcgaagcatatctagactcccagtccgatgcagtaatcatggaaatcggcgctgatgaactgggagccgttgtcagttatgatgcggtgcggtagtccgtatctgcaaaatatccccttgatgaatttgatggcgttgtcggccttgatttcccccgtgggtactgcttcgatccatttagtgaatttgtcgatcgccacgaataggaacctgtagccgccctgtcctcgtgggaatggcccgagtatatctagcccccagcacgagaacggccaagtaagagggatagtctagagcgcttgcgcgggtagctttgtgtgtttactgtggaattgacaggcttcacaccgctggaccatgtcgcatgcatctttgatggcggttggccagaaaaacccttgccgaaatgctttcccgaccaatgtccgaccagcggcgtgtgacccacagatgccttcatgtatatcaaggaggaggtgtctgccgtcgtcggacgagacgcatttgagaagtaccccgtttggcgctttcttgtatagatcgttgccaatcatgcagcagatttttgctttacgggttattttctcggcctctgcgtcgtcctcgggcaactcttcgctgttgatgaatttgatcagtggggtgcgccagtcgtctgtggtctcgatatcggcgacggcgtgttctgcctctgtggcctccgagctaatgttgggggcggctgggctgacttcgccgctaacctctttcactgatggctttgtcaggatgtccagaaaagtgccaggctcgagtggttctcgtctggacgcacatcatgctaggtcatctggctcgatgttgtccttgcagtatacgtgtcggacctcgatcccatcgaaccttttctccagcttcctgacttctgcgagatacttggataactcggggttagagcatttataatctttgtgcacctggttcgcgactagctcggagtcccctttcacgatcagtcgcttgaccccaagtgcggctgcagctcttatcccggcgagtagtccttcatattcggctgtgttattggtcgctctgaagttgaggtggattgcgtgcttgaattggtctccggaaggagatgtcaagatgaatcctgcccctgctccttggctgttgagtgcaccatcgaacgccattgtccacgtttcgttgtcgatttggttgtctgatttgttatcaggcatagtccaatcagctgcgaagtcggcgagtacctgggacttgatggctgttcgtggcacaaagtggacatcaaactggcttagctcgactacccatttcgcaatgcggccgacaacgtctttgtttctcacaacttcaccgagatggaaggaggagacaactgtgactctgtgggcttgaaagtagtggcgtagctttcttgatgtcatgattaccgcgtaaagcagcttttggatatgtggatatcttgtctttacgtcatggagagctttactaacgtagtagactggtcgttgtactttctctctctcgacaacaatgacggtgctaacggaatatggcgtggtggcaatatagaggaataattcttcattaggttggggagcaacaagtacagggggtttgataggtagcgcttgagtgcaacgaatgcctcttcggcttcttgtgtccatacaaatttgtcttgcttcttcagcagagcgaagaagggttgtcctcgttctcccatcctagcgacgaacctgcttagtgctaccatgcatccggttagcttttgtacttccttgagtcttgtgggcgacttcttgttctcgattgccttgatcttctcgggatttgcttctattcctctgccagagacgaggaaaccgagtagcttgcccgacggtactccgaacgtgcacttctctggattgagcatgaggcgatatcgtcggaggttgtcgaacgtttcccgcagatcgtcaatcaatgagtcgcttgtcttggtcttgacaacaatgtcgtcgacgtatgcctcgacattgttgccgagttggtcgctaagtgcgccctggaccgtgcgctagaaagtattccctgcggttatcagtctgaatggcatcttaacatagcaaaacaccccgaacggcgtgatgaatgctgtcttctctccgtcctctttcgccatgctgattcggtggtagccagagtaagcgtcgaggaagctcaacagctcacagccggctgttgagtccaccagttgatctattcgaggaagagggaagtgatctttgggacacgccttgttgaggtcggtgaaatcgacgcacattctccatttctcgttggccttccgcaccatgactggattggctagccactctggatgaagtacctctctgatgaagccagctttgagaagtttgtcgagctcttctcgtatggcttgtttttggtctggtgcaaatcttcgcagtttttgctttactggcttggcatcgggtcgcaccatgagtttgtgctcaatcacctccctggggaccctcggcatgtcggacggttgccaagcgaacacgtcagcattgtcgcggaggaaggtgatgagcacgaattcctatttctcgcttagtgttgccccgatcttgacggtcttgtcagggttggcactagagagtggaacggtcttgatcgcgccgtccggtttcggcgtcttgtttgtcttgctcactttcttgggtggctcagttgtggcgggtgggctgggcatttgctcgaccatgtcgaggctccacttgtcgcattgtaccgccagctttgtgttcccttgaatagtgattgttcccttcggtcccggcatcttgagcacttgatacgcgtagtgggatgtggccatgaacttcgcaagtgcagttctcccgatgatggcattatacgctgtatcgaattcagcgacatcaaaggtgatctgctccattcggaagttgtttgcttggccgaaagtcacaggcaacgtaattttgcccaatggtttggacgaggattggggagtaattccatggaaggattgatcggtgggtgtcaactcgcttcgcgaaattcccatcgcgtccaaagcactggcgaagagaaggttgattgagctaccaccgtcgatgagaacccacgcaaccttgatgttccgaatagtgggttcgaccacgatcggatagcgtcctgggatgacggcagtcttgggatggtcttcttctgaaaattctatcttctgttcagaccacttcatcttgtgtgcagccccctgccatgtcgaacagacttcacgttccactttcttgtattctcgctttgaggagtacgctgtggaacctccgaaaatgtgtgaaacgtggaggttagagtctggatatgctgtgtccgattcctgaggagccacctccgcatccttctcgaccacgcgtactcgcttgcctttttcaaatgccatgtgcttctcgagcgactttttgaaaacaaggcaatcttccaaagaatgtctgtctatcttgtgtatggggcaccatgctttcttcgtgtcgctaccttgtgggtctgggcgcttgggagggttcgcgtattctgctgcgagaacttccgcttgagctttcattttcccacttttgcgatttttcttcttgcttgactcaggtgcgtccgtggctggtttcttctctcccccggtcttcggcttatcgttcttgcgtctcagtgcatcatctgcgtgggcgcatcgctcaacaatctcgaacaatctccgagtagttgtgatgcgtcttgtcaccaactcctgggtagtatagcgatctctgacaccagacttgaaggcgcaaattacagaagcatcggtgatttcggggattgtatttctgcactcgttgaagcgccgaacatattccctcaaggattcacccgagttctgtgtcaacgcatgtaggtcgtcttcgatcgcgtggcgcttgtaagttccttggaagttggcaatgaactgctggcacaggtctgcacacgaagagatcgagtagggcgggagatgcatcagccatgaacgtgcagagccttttaacgcagttggtaaataattcgccaatgcattgtcgtctgctctggcggcgtagagtactgtggagtagacttgaaggaactcttctgggtcggtgctcccatcgtacttctctattgctccgggtcggaatctctcaggccattggacatcacgcagggaacgactgaaagctctacacccagcgctgggggcggtgggttgtcggcgatcgtgtgtccttcatggatgtctgtctgatgatgaggatgaagaagaagacgacgatgacgatggatcgcttggttccggtgtaggattacgaggacgtcggctaggttctcgagaatcctttcgccgccctcggttgttgtcccggcgtcgatctccgtcgtcctcgtcattatggcggtgtccttgaccagtgtcaccctgcgtccgcctctcgcaatcatcgtgatcgtggcgatcgtggcgattaacacggtctcggtcttcgctcgagcggccctcccgtctttcattatcgcga

SEQ ID NO: 22973 - DNA, 10328 bp, Oryza sativa
cccgtaaccctgacaacatacatgaaatattaaatatatgctaaaataataactaattgcacagattgcgactaatttgcgagatgaatctttttatcctaattactacattatttgacaatgtggtgctacagtaaacatttgctaataacggatttattaggcttaataaattcgtctcacaccctatataatactcaatgtgacacgccaaaactttacacccctggatctaaacaccccctcaaatttgaacaatgtaagagtagtactccttcccaaaatataagaatttagaactggatcggacattttctaatactacgaatttggacagcacgtcccatccagttctaggtttttatattttgggacggagggagtacatggcatgaagcatgatgcgtgtgaaatggaagaaaaaggatttggtagcaattgctttcagaaagaattgttgcacagagttgatcttgcacatggtaagtcaatctttgcacggacgttgcttctatggaagaaccttgtgtgtacttcttacttggagaaaacaacttcttcaaaccaatcctgacttgtacgtagttcttcaaaccttacaacgtgcaggtccattcgattagggatgagctaagaggttaggcatatgatgtgaaaaaaaatcggatgtacacattgcgcgcgcagtagaaggaggggatggaaaaaagacgattgcacttttacaacagtagagactagagaaaatacgaagtatcacttaaacactttcaagacatgtgaaatcattctattgtcctcttctagcttcaattcatgttttcaaaaaaacttttagtcaggtcgccttgtccaattgttttcggtacaagaaatgacgacatatttatgtgcaaaccacatatacaattcagacgaacacagggatgattcatcttttgttctcttccccaacgacttcacatgaatcatatgcctttgtaccagctatatatgacttgctttttatattgagaataagcattattctcatatctccttttccttttctttttcaggtttgtcctcgtacaattgtaatgtccaaaggactggaaaagtgcagtaacagaaaggtgcttcacaaactgaaaagttgaaagccatgtcactgcactacgtctgacaaaagaacaacagctataggtatttggcatttttattggctactctataaaaaaagcacattaatatttgtgtcaaagaatttaatttctacacaagatttataggcagagggcatgtagctccacataatggagctcagatgatcaaatacataattacatagtccttactacatggagtctaaagaaatatatatatatccaagtagtgcagcatcatgcacggccactacttattagaaataaaatgaagtgaataaagatatgcttctgatgatgccaccggcgtgaaccgagcaatctttcatgcagattttcgcctccacctactcccacgcacgcacgcaatgagcaatagttggttgctgacttgatccgagctttgacaaattcagtttggaactttggatgaatctgcaattctgacgacaaaagggaagggaaggacaaaaaggttttactttaatcttctttcactcaatgtctaaagtgattttcagagacatacaatgggctttatatctttcttttactcaacatctaaaatgatattcagagacaacacaatgggcgaagacctgtatttatctctgctctgaaagactgaaacagtctctgctccagctacgaagactgtatacttgctggtcatacagatccaggatgtgtattatttgcaaattcatcagaaagcatgactcaaccatcacacacactcacacgtaccatctgtcatctctttcgatgatatcattcaacagggtgacaaactgaaaacaaagaattgcaagaaagattggaatgaacacaacaggatgacccaggtatgatgatgattacagaaaactttcaggaagataagcgagccaaacatagaaattgggagataaaacattgttgcatgattcacaggttctcaaaatgattaacggcatacaaacaacacgaagatctagagcttcaaatactacttcattgtagaatggaaaaaagaacagtactcgccctggacctgagttgaggatagaaattgttacaatcgaggatagaacagtactcgccctgcacctaaattgttacatgcttgtcggaggatgcctggtacatgcatctacgattttgacgagaagaaatgatatttagacatagtactatatcatcgtaattgatgtccttgttgcctgctccagttcttcaaactcagcgcctagcgcttcgcttcctgctcttctttcggctgcccttgtcatcagaatcactgtcagatgcagatgcagattcggagtcagattcagacgatgctgatgatgaggtttcccttctgtgcctcctcttctgctgcttccttttgggtcgccgcttcttgtcctccgagtctgaggagctgtagcttgagctacttccagaagaatattcagagccggtaactgatgattcactgtcagagtcaaatacagaagcctcactactatctgaatcactccgtgaacggtattttctcttgcttttccgtttgcttttctcagacttctccttcttcaactttgctttcatcagcttcctttcctcttccttttccttctcaagatcaggattctggaactgataggaaacaggagcagccgtcttcttcagcttggggttcttgagctgctgtgtcctcgagggccgcgaaatgtagacccgttcgttcttgcactcgtatgtccagtgcccaggctgaaaacacttctggcactgggtatatgcgccaccagaagaagaagaagtttgcgcagcttttggtttcactcccagtatcacagccttctctgtactcatcagatacatctgtctcttggcctccttcctctcctgccagcgcgaaggtccctcttctttctgcccataagcattgacattgcgggcagcggctgcagcagctcgctcggcttgagttctgctcaatcccttggcagcagataaggcctgtgcttttattctctcagctgcagcctgagacttatcgtcatttccagacatcttgggctcacccaacaagaatcaaatcatacaaaatcagcaatattatgatcctgtaaggaaaccaaaatacatcaatagagtaatttgggtaatgaaaaataacgcaaacaataaataagctttctgctataccaaaatcaacacattgatgcaggaaaaaaaatctggcacataatatttttcgttgctataagaacaacatctacttatcaatttgtcatacgctcggtctgtgcctctgtggtcaatcattgctacgcccaaaaataaaaaaatggacaaacccttagagctaagagattctacagtaaaccgtggtaagaaagaaattgcgagctacaacccaaaagcaagcaaataaatccaacgaatacacctccccaggccgggcggatcttaacgtgggggcatggggattcactcgaacccccccccccccccaaaactttattccgtaacaaactgctgctattagtgctagggttagggcaaattaagagaaaagcttccagatctaggagaagagaagctagggtttaggcgaagacagatggtgcgggggtaggaaggtgcgtgtgggttggtgctcaccggcggcgaggatgcttgcggcggaaggaggcagcaggtccgcctcggctgctcgccgagttcgatggagatcggcgcaggcgaggcggcgggcgaactcacgaggaaaagagagagagagagagagagagaggagcgggtcagaatcgggagaggtgaacgggtcgggatgtgggggcgagcgatgatacgtgggccgttaatgggccgatcactatgtcggtcagtgatgggctgatctttatgtgggccggtgatgggcccatgaagtaaataatgatttgtactgatcctaacagggtaaatttacggtgatattagacaaccatgcaaagttttattgtgagatataaaacgaagaaaattagaaaaaagaaaaaacagaaacaatgtttttattttaagattctttaattttattatgcataaacggagttgaggttgtttatttacatcctacctacatgctctgtgtgattctttcagaacttctatataaaaaaatttccacaagttcctgatttttgaacatgcgtgcaaattagagtataataaaattattatttcttgatatcatatgatatagaagtaccccgcaaaaaaaaatgatatagaagtatatttatttgagatccattgccataaatggtcccaatacggaacccatttctgtttctcagaagcatgagcccctgacacaacctagcagaaaacacatacaaccatctcagttttgtcaagattttggaggtctattacctgcagcgagactgaattctacccgggaaactactttttttttattttatgaaacacgcgaaactactataaccataaaactgacagcttttcaaaggccatgttacagtttctccacactgaaaaaaacagtaaagttacaccaacttcaaattgcaacctgaactatgaatattgctgccaaatggagtaatatatacagcaaaggaaagtaggagcatgaatggaaaaggaaaaaaaatgtggcaaaggttccaaaaaaaaaaacatcctgactacacaacacacaacccattatgatcatgactgaatgtatctgatatctgtgaattctaactgtcgaatgcacaataacaccttgcacagccaaagtaattcccaaggtaatgaaatccagactgaaactcttatttgatggtatatatcatctctaaagccgctaaacctgtaaagccaaatagcttggcaactcctcaaagtgcttccctagcacccattggtcagcgagtcctgcggctgttggctggtttagatggagaagacggtttgttcttagcgaaatcgacaagatccttgaaaagagaatcttcaggtttggtctgccgtgatgcggtcggaactgatgaacctctctcattctcggtattcctctgattaagcgaaaggccttctgtttggctcaccagtccattgtacccggcaccgttgttaccactaggaaggccgtgctgttgctcgaagtactgctgtctttggccataccttgctggaggtggcggtaaggaacctggagcttgcgcttcccatggagcttttggaagatcttcaccggagtctccatacttgttagcatttgaagacgaagaaaaaccagggatagctgttgggtttataaaatcatcatcaggtagactctcctgcctattgacagcaggacgatttgactcgctcataggacgagaaggcatagagaagctgggtgctgcagttgggtttatgaagtcatcagacacactttctgaccggctatcataacttggcggcggattcgtttctgtttttgaatgagacggcgcaggtatattggctggggcagttggattaataaagtcatctgatactttttctgtcttgtaggagtcgccactaagatagtcaacactgcttgcctccgtgaaaactggcctctttgatgatggtggcggaggaagaagtgggcttgggtaaggcctttcactttttggagcagaaggtagattgccctgtgctgctgtgccatcccttgcagacctacagaacatatatttgtacatcagatgacaaaactaaacagaccgtgaatcttggtatcataacatgatccgcatcaccaaaacattttcttaagagcagtcagctgatgttgccacaaccatccaaagcttagaatagcaatagcatgtatgagaaataattagtaaagggtactaatagggaaaactaatatagcttgcctgcgggaaagaacagagaactcgtcttctggctcatcgtcttcatggtgcacattaagaagtggggaaaatgaaaccccagtaggcctaggaggggctgttcctcggtttacattagcagcagcaggagctgggcctgaaccgggaggcactccctttgcgatgtcatcatgacgctgaagaacacgctgcagttcatcatttaaaccgagagcttgaaatagaaggctctcatcactgcagaggatacaagacaatatgtcacatgacaatgtgaaaaggacatggaaccaaaatttcagagtaaaagaatagaacatacccagtattgctaacaaggtccatgactcgaccttgataagatcggcactgcccaacaaggtcaacaatgacctcctccctcacaccctacaacatgaagcgcaattagacagaaatttagagaaaaagagcataggtgggtggaatggtggattcaatagttaaatacagagacgcatagagacatcacactagtgcaagtttggtcataataaattaaaatattagggcacattatttttagccagataccagagcaagttctagaaaatacaaaagcttagaaatccctctttaattattcttatgccctcagtctcctatgctgctaaacatgattccctctgaacaaatggaccaagtaaaatagttcgcacattcctgtaagctgatgaggtaacatggatgaacaaagatataaatggatattggataatatactagacttcaaagcctagcaagaaactactttgtcatccattacacatagatctgatcaatgatgggacatgtaatagttacatcctcttctgtgcacaattcacagatacagctcagctcactacatgtgaaatatgctgtagtatgatcatatgaaataaaacacatgatttatgcataatttttttcatgggaaaaacaaaggtctagaagacatgacaatcatattaaagctcttaaaagtaaaagaaactacagaagagatacaaggattatacaacactgcactaaattttgatgcttaaaaaagtcacctcagggtgcctgtggtccaaagcatttaacatctcatccaacacatccacaattcctcgagcactctgaatctcacttagactgtaatgcacaaggagcaagaattaaaggtggattataactaaagaatttcttctgcaaagatggtgaaataaattgataaacacaattgaagtattcaggtattgtttagcatgattatgaaactaaactgtcacaaggcaataagtagaatctattttggcacactgacaccgccatattttgttgttagaaataccactataagtatgaaattcttggaaagttgcatggccctagttctatgaatgtcttgcctgtaaggctgtaacagggagacaaacaaaattactattaatgtaatgcatcataattactttctagtatgctttagagttcaggaatgaggacaaccaaggatagcggcaactgcaaccatcagtagcggaggttccaactttagatcagagatggcgtacttcaagaaagcaattaatcactgaccacttttttcccccaaaatacttgacactccatagttgctaacaggtatttttccaatatcacacctggtgggcccaaccggaggttcagcttttttttttttttttttgcccctcaaaactactaatgtgttctcagtgactaggaaaaaacaagaaagatctggagcctgatagcctatatgcaccgtgaaccttctttccgtactctccagttgtgctgagcggcaagtcctcagggttggagccttggaggcacacaaatcgtccagaagcaacttggacactgctttctgctgtctgatgcacaatttcagcagaatagagatactttaatccaggagcattttcgaaatttaactaggaaacattttatagccttgggaagtttgcttggctaatgggtgtcatctatagaggaacagagggagcagaacatattgtgagtacgattccactcctaaaacatgcctagccatttaatgtggttgtaggctgatcagtatttctgataggaacatgtgtttgaaacttttcccccacaagtgtgaatttacaaaccaggccatgcttgttccaaccaaagtaggttattctaaagagaatgggaaaaatagaacaaagcaaggcataaagaaacagcaaaagtaaatggcattaagaaactatggatgaatatgacagtactgcttgaagtgaacaagtaaataaggaacaaattttgcattagaacaaaagaacacctcaaggcaggtgcagaaggggcgctagattgaagagaagcttgtatcgctgcatcttcatagctttgacctggaggtggatatagatgtggttgcctcaatggttgagtttgaggaggtgtaaacagtggaaccgtgttctcctcacgaggtggaaaatcaacaccagcattctgcacacaagggcaggatatcttgttcatggtttggacagaaacagaagcaattgaatattaactcaaaagtaaaaacgttgaagatctaagtttacattgaaacaaagtgcagaacagattgaagttgagtggaacagtagtcaagtatgagctgtgatagcacaggataaataacagatgagaaaactggaatgaacacaagtagacagtaccctgagttcttggtaagcagcgtgatactggggatatctgccagatgcacctccaaaagccacttgccatgtgtcaatcaaactcaatattttctcccgaacatttaaatctggctgaaatcataaattggcaatcaaatacagaagcataagaatgtaggaactataggaataagtcttggctggttggtcttggtcttgtggtgccttttcctgcttttcagctttctaggacagcatctctactttcagtttggatgctctaggacagttaggacagcagtttgttgagatgctctaggacaatatgttgagatgctctaggacagtttgttgggatgctctaggacagtatgttgagatgctctaggacagtttgttgggatgctctaggacagcaccctcttagactagcatggctgcatggctgctacaagcagctataaatatgtatccaatcctctttgggaggatatggcttttgagtttgtgaatgaagaaaaccagaaaattgccccactccgagtgccatcctcttctcaatgagagtagccattgaagttctaacatctggtatcagagccacactttcctgtaggctaaacatctcttgttccaccccttcccaagctcggttgagctctcagccaccaccagcagcagcaacaccggctgctcctccttcccctttcccttccccctctccacgcagcagccccccggaggtgcgccatgtccgacgttcggtctcggcgttcggtcgtctcgagcactcggcgtcagcaggacgccgagctcgccgcagcagaagagcgcaggcgagcaacggctcagaccgctgcagcagcagcgagggcggccagactggcggcagcagagttggcagcagccagggcggaggcagaagcagaggcggcggaagatgcggcacgtgcggcggaggtagaggttgagaccttgcgcagcagcatcaacggctccatcgccggcgacatcaccgccgacagggagcttgaggagcttgcaagaggtagggcacgggagcgggcagagcggtgggcagcagcccacctccacggcggcggcggcggcccaagggaccgcgcgcccgccgacgggaacccagacgggcgcgggcgtgccggcggcagcccggagcccgcgcgcggccctcgcaggcagcgtggctctccctcccctgaccggcaccatggccaccacggcgtccagacggtggtcagggactttggtcccggcggtgggtggcctaccctcaccaaaaccaactacatcgagtgggccgcggtgatgagggtgaggctccaggtgcggcacatgtgggaggcagtccggtacggcgacgtcgactacgacgaggatcggcgggcactggatgccctcatcgctgcagtcccgcccgagatgcagttctcgctttcccagaagcggactgccaaggaggcctgggacgccatcgctgcggcacgcatcggcacgatcgcgcccacaagtcaacactgcaggcactccgcaaggagtgggagaacctggccttcaagcca

SEQ ID NO: 22974 - DNA, 10330 bp, Oryza sativa
agtctttgctggacctctccacgatgtcgatcgaggaggcgttaggtcgcctaaaggtcgtcgacggcgatgagccacagcctctctcggggcctatcaccattggcgggaagctccatctcactcgggagcagtgggaggccagccagagtaacgggaggaagggggagtcccctccctcgacaggcggccgcaagccgcgcaaggcgcgcggaggcgtccagctgcggtgggcgcgaagacgcgccgagggtggcgctcgcagaggtgcccagggcgacgccgctggcaaccacaagccggcacgagacgacgcctgccgcaactgtggcaagcttggccattgggccaaagactgtcgacagccacgacgcggccaggcccacgtcgcacaggtggaggaaaagccggctctgctcctagcacacgccagcatcgagctatcttcagcggcaccggccgcaacggctttcctccacctcgaggagccgaaggtacacgccttcctcggcaacagctccagcaacgacaaggctgatgggtggtacctcgacaccggcgccacccatcatatgactggccggcgggagttcttcaccgagcttgactccagcgtccgaggctccgtcaagtttggggatgcctccggcgtggagatcaagggcgtcggctccgtcaccttcaccaccaagtccggtgagcacaggctgctcaccggagtctactacatccccgcgttgagaaactctatcatcagcgtgggacagctggatgagaacggctcaagcgtgttggtcgagcacggagtcatgaggatttgggatcgccgccgtcgccttcttgccaaggtaaccagaggcactaatcgactctacatcctcagcgcgcaggtcgcacaaccagtttgcctcgccgctcgtcgagacggcgaggcgtggcagtggcacgagcgtttcgggcaccttcactttgaggccctgaagcggctcagcgccaaggagatggtgcgaggcctgccgtgccttgaccacgtggagcagctctgcgacgtctgcgtcctaacgaagcagaggcggctcccctttccccagcagacgagtttccgagccaaggagcggctcgagctcatgcacggggacttgtgtggcccagtgacaccggccacaccaggaggacgacgttacttcctgctgctcgtcgacgacctctcccgctacatgtgggtgatggtcctcggcagcaagggagaggctgcggacaccatccggcgcgcgcaggctgctgcagaggcggagtgcggccgcaagctacgcgtactgcgcaccgacaacggcggcgaattcacggcggctgaattcgcgtcgtactgcgctgatgagggcattcagcgccactacaccgcgccgtacagcccgcagcagaacggcgtcgtcgagcggcgcaaccagacggttgtggggatggctcgggctctcctcaagcagagggggatgccggccatcttctggggagaggcggtggtgacggccgtctacatcctcaaccgctcgcctaccaaggccctcgatggcaggacaccgtacgaggcttggcatgggcgcaagccaggggtctcccacctgcgggtcttcggctgcctcgcgttcgtcaaggagcttggccccatcagcaagctcgatgacaggagcaccccaggggtgttcatcggctacgcggagggctcgaaggcctatcgcatcctcgacccggagacacagcgtgtgcgcacagcgcacgacgtagtgttcgactaagggcgagggtgggtatgggacaagacggtggacgatggttcgactctgacgtacgacgacttcaccgtcgagtatgtccacttcgagagagctgggggagtaggcagctcttcttcaccaagcgtgtctaccccagtccccgagcctccatcgactccgacaccaacacaccctcgggccacggcttcgactgcgacgagctcttcgccgacaccaccacagccggcaaccccacgcgccccagcaccaacagccactcctccgagcacgtctactccgacgccagctcgtgttgagcgcagcccggtggagttcgctactccgctctcccacgacggggagcgcatcgacgcgtaccacgacggcgagcagctacggtaccgtacgatggaggatcttctcggtgaccagcccgtgccaggaatggtgcctcgcgacctggaggcgcagttgcaccttgcgtgcgacgacggtgagcctcggtctttcgcagaggccgagaaacacgcggcatggcgtgccgcgatgcagtcggagatggacgcggttcaggagaaccgcacctgggagcttgttgatctccctcgtggtcaccgcgcgatcacccttaagtgggtgttcaagttgaagagggataaagccggagccatcgtcaagcacaaggctcgcttggtggcacgcggtttcgtgcagcaggaggggatcgactacgacgatgccttcgctcccgtggcacggatggagtccgtgcgactccttgcgctggctgctcaggaaggctggggcgtccatcacatggacgtcaagtcggcgtttctgaacggcgacttgaaggaggaggtctacgtgtaccagccgccgggattcgtgatccccggcaaggagggaaggtgctacgcctgcacaaggcactctatggcttgcggcaggcaccgagggcgtggaatgccaagttggattccacgctcaaggggatgggcttcgagcaaagcccgcacgaggcggccatctaccggcggggcaatggaggaaatgccttgctggtgggtgtctacgtcgacgacttggtgatcaccggcaccaaggatgcggaggtcgcggcgttcaaggaggagatgaaggccaccttccagatgagtgatctgggcctctctccttctacctggggatccaggtgtaccaggacgactccggaatcacgcttcggcagaccgcctacgccaagcgcgtcgttgagctggctgggctcaccgattgcaacccagctctcactccgatggaggagagactgaagctgagccgcgacagcacggcggaggaagtggatgctacacagtaccggcgtcttgtggggagccttcgctacctcacccacacacggccggacttggccttctccgtcggctacgtcagtcggttcatgcagcgaccgacgacggagcaccagcaggctgtgaagaggatcatccgctacgttgcggggactctcgaccacggtctctactacccgaggtgtcctggcaaggcacacttcgtcgggtacagcgacagcgaccacgccggcgacattgacaccagcaagagcacgagcgggattctcttcttcctcggcgagtgcctcgttagctggcagtcaatcaagcagcaggtggtggccctgtccagctgcgaggccgagtacatggtggcatccgccgcttcgacccaggcgctctggcttgctcgactgcttagtgatctcctcggcagagatactggagcggtggagctcagggtggatagccagtccgctctggccctggcaaagaaccccgtttttcacgaacggagcaagcacatccgggtgaggtaccatttcatccgaagctacttggaggaagggagcatcaaggcgagctacatcaacaccaaggaccagcttgcggatttgctcaccaaaccccttgggaggatcaagttccttgagctttgctcccggatcgggatggctcaactttcccacaagacgacgcacaagacttagggggagaatgtaggaataagtcttggctggttggtcttggtcttgtggtgccttttcctgcttttcagctttctaggacagcatctctactttcagtttgaatgctctaggacagttaggacagcagtttgttgagatgctctaggacagtttgttgggatgctctgctctaggacagtttgttgggatgctctaggacagcaccctcttagactagcatggctgcatggctgctacaagcagctataaatatgtatccaatcctctttgggaggatatggcttttgagtttgtgaatgaagaaaaccagaaaattgccccactccgagtgccatcctcttctcaatgagagtaaccattgaagttctaacaggaactaggaaagcaatagttggccactgaatgtgagtataatcctcacctttttctttactatcttaaccatttcacttaatatgtctcgctcaatgatttgctggtaaacaacatccccacagtttttgcttagagtctctagcacctgaaaaggaagacaaacaaacagaacaaatcagcacattaaacaagacatgactgtgcacatagaaactatgctctttgtttcctaaatctggaggaagcacaagaagtttccaaaatctggaagaagaacaagaaataacttctaaatttgtgtagctagtgaagacaggtgaattcttaaatttaggaatgaatcgacctaaaactcacattgttaaaacaaaaaaatcagaagataacacactgagtatcaatatacaaggactcttgaaatactcacataaagcgtcagaatttgcacttttgaattcttgtttcccaggcgtttctttaggagcttgagtgtatccttggcttgtctgtacttcagcaaacatttatgagcatgctataaaacatgacaaaccaaaagttgtatggggacattgaaaataaatcccagaaagtatttaagacgaaacaattatgtcaacaattcaatatacaaaactcattatgcaatgtgcatcactcaaccatgaaccgaattatcaacaaattatagcaaaatgtcttaaattagtgtggcatcacatacacagattttaatgttagcaaatgccacagattataaaatgtaatcactgcctggagagacatataaaccatattggaagttggaagactaaaagttattgaagctatatatcacaccaacgtacagcagagtagagaaacaaagttttttttttctctcgaacacgcaggagagttgcatatcattatattaagataaaagagttaaaaaggactcatgcatgcccataacgggaacaaaggctataagaactttccaaagaaacaacaaaaaactacaccatgacttagcttcatctctaacatcctgcatgacggaattgaaattagctgaaacctctccaaagacacatccacctatgtttccaaatcaaccaagccaccaacacaactaatgagttaaaacccttgcgatgttgcttagccactttctgcaaagcttaaagccaccacatggtgaaaacagtgtcatcgggaccttatctaaggtgctgcaagccaaccaaggacaaaactgagaaccatacacttcttgtgaacacacataaagtgagcaagtgctgcacattctcctcctcttgattacacaatggatattgccaagatggtcaacactgcgatgggccaatcggtcagcagtccaacaacgatttagcgaggctaaccacacaaaagaattgcaaagaggccaaagctcaagttttccaaacttccttccacggctcaaattacatgcccctgatgagtttttttttttgtgtgtgtgctctcattgctgatatcatcatggcaaaaagtgatgtcatacctaaactgcacctcaacaacaaatgacaccaactcatcaccaaaatcagtggcctccatgagattatagctcaactaaccaatcacaaactatcatcaattattgagttattctgctctccaaaccaacaaccgtacaacctaagattccaaattcctaataaatttggaagaaaaagactgaatatgcttttccaaaaaaatacaaaacatatagcaatagacacagaacaaactagccaaaatcacagattcaatgccttatagaagcagcactaaaaccctgctaaatttaacgattttataaacaagcctaggttaaacgagatacaacaagcaagcaagatcacaacacataaaatgtcagagatgccacgataaccctactaaatcactcacgggttgaacaacatagagaactacctaggaattctccatcctaccatatgatagcaataacaattacaaacaaatcaaagaacctaaacaaaaagtctcgaacagaggcatcatcgagagagagaagccagacccgggatccatgttgatgatgtcgcagagctcgatgttcaccgcccaatccggcccgatcagcatgtcgctcgtcgccctctccgcgcacgccacggccgtcgccattttccccctctcaccaccaaaaaccctaaatcctgcaaacaacaacaaaaacaaaccacccaaatcagcccccaaattcccacctttccgcacctccccaacgcccccaacccgaatccgccccccaaaaacacatcttccaccccgcaagaacccgagcccctcaccgaatctgagcgacctcctccccaagattcggcgccaagaagcaccaaggcggcctcttttcaccgatccggaggtcctggccgcgcctgggacggggaggagagggagagatgcgagcgaactgtaggattggaggaatttcggtggctcggcttggaggaggagatgaggaggaaggagaaaggttggagaggagggtggtagactagactaggcaggcagcaggaaagaaggaaggaggaagagaagggaacgcggccgtagactttttctttgtttagttttcttggtgtgaaagtgagggcctgcaaaattatattttgtggtgctagtttggaattgtgagaaaagtgggatatcaaagtactccattcgtcctatattagattgtgagtttttacttgtaatgtttaactactcgtcttattcaaaaaaattttaaaattatttttattttatttgtgacttactttattatctacggtactttaagcataattttttgtcttttatatttgcaaaaaaaaattaaataagacaagtggtcaaacgttgcaagtaaaaactcaaaattccttatatagtgggacggagtaatactgtcatctagcagccccatcatttggaataagccaaacgacattttaacgaataaaacatgatttataaataaacttttatatatatgtgttcttaacaatttaaaagcaatggctgaaaaataaacttagatgaaaaaacctcaaaccaattataaattcaaggttgaaaatttgaattttagctactaagtattagtataagcgaaaaaatgagactatgatgactgatgaggataggatcgatttttctttatattagatcttgaattttttttacatgggtaaattatgtattttggaaaatatatagttatgttgtgaacttctttgatgtcatgaaaaatatctttttttagaaactctcaacggttgggggtacatactagatagatttctactatcggaaaaaatacattcttatcaacacaaagggtcattaagtaggatctttgcatgaatgcttactaagtaagcaagttctacattttggttgcgtatatggttgatatgaagttacataaaagtgcaatgtgaaaaccctggatgaaataattatataacatatcctatgtaagtcattttcactcattaattatattatccttgtgagtctattttctacacattcacttttttttcttccatttctcataaaaatatcaacacactatttaccattagcactaggcgactttgttcctcttgctacttctcttataaggagagataggggatatttacatgattaaatgtgcttgttaatatgtcatcgtatgaaatagttgcgacattttttgttttgcttgcagtgatagacttggggcattacttctctgttgcatacttttcacaaacaataggaacatttcaaacttttagagaaagtatctcatgttttttagagcatcaaattgttcattgtgtcaaatttatatattactcgaatacacaagccaaaacaattggttttatgtacatggctagaaaattatactccatccatttccaaataactgacaattggcactattcattttaaaccgtgaccattcgtctttctcatttaaaaagtataactgaaaaagcagaggaacaataatcggcaggaatgcaagtacaaaaataaaagattatagaacacagtaaatacaaaaaatgatagtttgattagaccgcgagaaaaacacaacaatcggataagagacgtaagctcaaaggaaatttttcaacaagtttgagttcttactaattttttttcaaaatttctttaggattatctattttataggaatttcaaagaaaatgatgggcttcctaagaattattttccgatcctctataaagtgccctgtactaaattaagtgatcgaactccacaagaattattcaatgaaaaccaatcttcatcttcaattcagtagacgaccacccactataaaacgccatattcgttgggcaagaagtttgtccatttgacgatcaaccacacggacccacccttgatgcagaaacaagcaaagctttgctcatcttggccgttccaggccaaaattgctttctgtttgccacccaacttcctttgggttaagcaagactaggttggattagatatgacttttaaacataatcctcatatcagcacaaaggtaatgttggttcttggatctccttaattaatcacctgcaaagctagtttttttttctttttatagcaagaaagagaggcctaatcatggtagtgggtttcactatctgcatgtaggtgcaagcaacagtagagctggctagcatttttttccttgtttgttatgtctaatagtttaagccaaaatggttttggctattataaaccatcaaaaataataattataaacttcgctaggcgtccacatgtacaactagaattatttttgtattggtccatgtgtgtcaacgatttgtaagagaaaagatataatgacttttaattagttttgtttttgtcacaaagaacctctcgatccatcatgtattttgtcttgtctccttaatgtaagaagaaattcaacatgccacaagcctgaaatcaacgtagaattgctaatgcatatgccataggagtataggactaatagattaaaaaaatctactgatataaattgggcaacatttttttagataatataggtagcaattacaagtttcaaactgcagatccttaaccggttttcctactctggtcgcatggatgtagtgtactgctccctccgtcggattttgactttttgcttgcactgtttaaccactcgtcttattcaaaaaatttgtgcaaatataaaaaacgaaaagttgtgttcaaaatactctagataataaagtaagtcacaaataaaataaataacaatttcaatttttttgaataagatgaatggtcaaacagtgcaatcaaaaagtcaaaatcacttatattatgggacagagggagtactagatttgtactacttcagatttcctaggctgagtttagttccttccaaagttgaaagtttgggttgaaattggtacgatgtgactgaaaagttatgtgtgtatgacaggttgacgtgatagaaaaagttggaagtttgaatccaaagtttgactgtttggtagctagccagtcagccagacacggttttgttgagtcctcaatcttcatgcattccaccatgatttgatagccgaacgattaatggcgaaaactgataaaattcaaacggaatgtatcaaatatttggattttttaatacatgaaaatttatcaagtggttcttaaatatagattggctcgataagatcaaccatgacagtcaagcagtttttgttgtattatgaaatcctattcatctctcatgctttcaaatctatatgattatttccctagcaaaacaaatagatccgtcctaaaaaggaattattcccatttaatttgaaaatgattctgcatgagttctgtaaagaattttgtatcgaccaattcaataatttgaagaacagagtcacaaagaattttcctgtattctactctgggccttgcatgcatcacagtgttagaaatggctttaagcttttgcatcctgggcctccaaaattagttggtttaaaagcaaacccacgtacctaattaaaattgggccgcccttgttcacactgcacacttcatgctgccgactacaattagg

SEQ ID NO: 22975 - DNA, 5089 bp, Oryza sativa
  unsure (1)..(5089): unsure at all n locations
acaaacagtaggattttcaaaaaggttaacttctagaacaactgttttctccttcatttttggggaaaacaagttttctcaggatacaaaactactaattggctggaaaaaaataatggtggaaaatcttcagcacataatagaaataattcctatattatttattgtttagtatcaaaataacttttcttatttgtgagggaaaactctacaaaaatggagattaaagtgtggtcattgtttcttaattttcaatattttaaattgcgattctgatctcaagcgattcacaaagaacccaacacaatctaacagaatcaagaagagcataattttttccccaaactacaactaaataagttccatcaacctaagttagcaaactctgttctccaacttttttaaaaacaaacagattttgaaataagacaccattcctaaaacccaaccaaactcccattcgagaataataaaaaagagatatgcaaaaaaaaaaagatccaatgaaactaaactttacatctagaaactgaaataatgcacaattagcaagtctaaaataatttacctgctcctgctcctggttgtttgagccttcgggttgccgccgccatggccatttccgatgctgctgctgctgctgcttccatggccgccgctgctagtgctgttggtgctgctcgtcctgctgctggtgccggcctcgctgaactcgccgcccttgctccaccactcctcctcctgcagctgcgcctcctgcttcttcttcttcttccccttcgtcttgttcttcttgccgccggcggcggcggcggcngncngnttgngcgacaccttcttcttcccgccgccngccgccgcggngagcgnggggcngagcttggtgcgcnggccggtgtcgaggctcacgctgcggtccatgctccggctcagcgtccgccctatcgtcctatgcttcctcgccgtcttggcggtggtgcatttcccctgcttcttgctggcttcctcgcccatggcgcccgccgcctccgcggtgatcgtggcttcgacggtgggaggtgctggggtggggggaggaggagggagaggatgcggcggcggaggaggaggggactcgacgatgtcgcggagggagagctcgtagcaggactcggggaggccgcggacgaggtcgagcatctcgctcggtacccggcgatcgcctgcgccctcgacggcgagctccccgccgacgccgggtatagccgctggagctgctgctgctgctgctgcccccagaactccggcgacggcgtgccggactccggcgagccgacccgcgacgcctgcagccaccgcgactcctcctccccttccctcgccgccatcgggttccccagcgggctccgcatcctaaccctctcgaactcccctcctcccccacccaccgccgacgccgacgacccctggaagctgaactccagccgccgctgccccgacggcggcatcggcatcatcccgacgccgagagagagagagagaggttggaagagagatggagagggagaggaaggtgtaataatggcgatgtggaggaggaggcgaggaggcggagggggagaagaagaggagagaagaggagaggagggaaagcgatggcgggtgggtgcaagcaagcaaggtcgttggtgagagatttaaaagcgggatttaaatttggagggagtacattacatacaaagctttaaataataataattaaattataaacaaactacactgtactttgtgtatatacggcgtggcgccgaactgtacatcacagcaaagctgctgtacatctccgtcaggtccataccgtggattcgtggagccattgggttcggaatcatctatcataatatcattatcgttacgtgatcttaactttatattatcccgcacgacagtgtttataaaagtagtgtcattatggtagataatgtgaacccgatggactaatggtagtatcttcacctcccgcacgtaaaacgaagggatctattatggtattactaattaagtattagttaaaataaactttaaaaatagattaatatgttttgttaaaacaactttcctatgtaattcttttttaaaagactattgtttagtatgtttggaaaacgtgcgcgtgaaaaacgaaggagtataggttgggagttgtgagtgacaaactcagcctaaaatcttcataaacccgagacaatggctactgttcacacctctcgtattaatatgtaagatgtgtgcagtggtgaaatggtgatgtgttcgctaccatgtgtgatcacgtctgagtcggatgacgcataattcgtgatatattaaaattttgttattatgttaatagatggcggtgtaagtgattggtaattaatgcgagtgattaaaataaaccaagggtacatgacatgagtgttgaaatgtttgctagcttgattgttgcaatggcgtttaatcggtgttgtaggatccaggggggtgaatggttggtatacccaaaaaccgaaaacttttagtggaaataaaagttaccctcgaaatcgacggaagtcggtctgaccgagattgatctgccggtctgaccgaagcgtagccgccggtctgactggtgttgatcttccggttggaccgccctggaatccctgctgcgcctgttgtcgtccccggtctgaccgaaggtcacccgccggtttgaccgccgccttgccgccggtctgaccgccgatgtgtcgccggttagaccgccgaaacccggtgaaacataaattgaagaattctaaaagtagatgacgactttattgattctctctgtatttacgaagtgcacaaacagcactccttacagaaatttcgactaaactcaaaaccctaactcaaaactcaactcaattgctttcaaaagcgataccgggaagcctcatgctccccctctatttatacccgaggcaggcaggaaccaaactcatactaggagtcctaaacaccttagaaaaccctctagtacaagaaagaaactttacataaccaatcgtaccaaatttggactccttccaaattcgactccgcatcccatacacacacaatacctccatcgtatgccatatggaatctccatcaaccacgtgcatcaactctagcctaagtatcccgcataatctctgaccaccacggacgtcgtcttatccccaagccgactcccggtccatcaccgcaaatactctcccgagacatcgagtcacctacacatgaaataaataaagaaaccatattccgagaccaagctatctccaacttgactcattagtagcaaacaacagtattacatacgtatagtatccatctagaagccataatcatgaaataatcacggatatccaaacaaacaacccgaaagcgaaactgacacagtgtcggccggtcagaccgcgggctggccggtccaaccgctcgattaccgccggtctgaccggcatacacagcccggtctgatcggtcacatgaaataatgaatcctgcgatcacctgtgaatccaatcatctccaaaccacttcatgaataaattccaaataacaaaaccaataatctccaatgcccaattattcatcacagaataataataaaaaacacctttgattttacaagtgtgagtgctttactttgttgtaacaggaatgctaaaaaaataggatcctgtttctcctaacccctcaagctggggtctggggaggcatgtgctaccgccggtaggtccggccgatgagccactaggcaccattggtgtagcctcctacttatcctcatctttacctcaactcaacttcggttgccatgggccacctcctttatgttctctcacgtcgctagtagtggtttgtgtgtgcccacacgagacacgaccataggtctaccaggtgtaccactgcctccatcgttgtacgataataccacataccccgcgttgatgttacatggttgtccgatgataagtaagatctatatggtggaactaactaaaccttcacaaactcaagacagtggccacggttcacacataacaaaaatatgtgagatatgtgcggtggtgaaccggtaacgtgttcgttaccacatgttaaaacgtctgagtcggacgaggtgtgttttatgtagaactcataataagaaattttcttattatgtattctacatgtcagctgtacggttcttttttcatttgccacgtgttaatgtaattctatgaactagttagtacgtggcaaataggtggcggttttggtgattgataattaatgcgagtgattaagaaaacctaagggtacacttggatttattgagtgttgaaatgtttgcttgcttgttggtggttaatcatcagtgtgagtgctttactttgttttaaacgtgatagtataaaattgtgccattttcatgacagaggaactgttcctatccattatatttcgtgcagcccctaattgttgtgatactttagttcattctgaaatgtgatacccatgctatataaatatggcattttcatgacgctgaaactgtactgatcgatcgattgtgttcagcccctaattgacacagcatgcaattaacagctcgatgaaagcgattcagtgtttataatttgcagcatagttcagtagccatccagatgtctggcacgtgcttagaccgatggagaaaaaactgacatgatggttgctacatgtcttgagctgttacatctcacaaccactaaataatccgtggttaatcaaaatactactgctgcctttgttccataatatatatcactgtcaaacatgacacgatgtctaaaactaccttttaacttttagtttcttacacacactataagatgtagcaacaaaaatcataacgatagaaaaagtaaattcaaatatcaattgaacaatattatttcttaaaaaataaaatttaatttgtattagactaattttcagtcgaatatttaatgagttaaatctttataaatctgtgacagagagagtagcactcgtacctatctcagattaagcaagacatcaacta

SEQ ID NO: 22976 - DNA, 1161 bp, Oryza sativa
acaactgaacaagctgctactgaaaattagttagacatttggataaaataaagagccacaccttttggagaacccgaactttaccgcatgcaagtgattgcagcgttcttcgcaattctttatcctcaataccagtcgattccttgatatcgaggaagcttagtttttgtgcatcattgaacaacatcaaaaccacactctgaaaaacagaataaatcagtgattttctaattattgatcagacagttacagctacaataaaccaccaaagaaattgggaaaaataaccctacctgaaatagtgacaccgcaagttcctttttaccttttgggaactctgcttttaatacacagtgacccaatgagttttgccacatcaaacgccttccactatacttgctcaaatagaattctttaaatatatcctatcagaaaaatagaaaactaaattaatttccaggcagttaatataaatatttactgccaacaaacatagttttgagaacatggcctgacctgatagacattaagttcatgggggagtttcacatccattggtggatatgttggccaatagctgcaatgcaacatatttaatcggaaatgcacatttatgatagaaaatatcaagttgcatgttaacatgctcagcaaacgcctattataaagttatataatccattgcccatattccagctacatgtcatggactaagaagcctatctatcagtattaggtttagacaagtgttgtgtaaacagaacatgctactcagtaaaccagcacacatgtaaaaatggcaaggcacatgttacctaccctgttgtaagcacgtgaacactcatttcaatgccagatggaagctttgtccttgcttgagatgattgcttgaaagactcatttatttctttggataattcaatgtcctgagaacagcaccaaagtcattttattttacaagagtattaaatccaaataaaagaaattgatgatatcgtgtacgccaccaatggatagaggcatagagcatatataagttagcaacatttgagctaaatatacatagggcaagagttcgcaaaaaggctagtatactagcaaaagtcatttcttctatagcaaattgctaccttgaacattccctccagcttgttggtaaat

SEQ ID NO: 22977 - DNA, 1102 bp, Oryza sativa
tccatcgtaccctttgtaacctgtgttttccatcatataatctcatatcaactggattagggctattacctatcaaggggcctgaaccagtataatcctcgttctctgtttgcttgatgtcgtattacatagatccttgtaccaacgtaccccaataccctctatatccggtctacgggtatcactcgtcgacagtggcgcgccaggtagggggacttggtgctcaaggttctactactatgtcatccagtttcgttgacaacggcgtcaacaccaacctccaccagggatttcctacttcaacaatgctggtgtggactcaagtcggcgaaatcgtcttcccggtttataccacgatgccgatctcagctggtccatcaatgaccggaaatgagaacgcagtggatacaacccaggacgactccctgtcgaaggatcctcccgccgaagcggagaacagaacattgacgacatccgagctcgagaaggattctaatgcggccaaaccttgtcgttcagacaagagccacgagccgacgagaataacttccgaagcgacaaggtcctggtgtcctatccacaaaaccaggaaacacactttgcacgcctgttgggtttttctcaacgtccgcgccgaaattcgcgcctgcaaagagcgtggaattcagcgtatttctccaacctgtgatgtctattgtcctattcacaagacaaagaatcacgacctctcaagctgcaaggtctttctcagcgccacgatgacgtcatcccctaaggtccagcagttaggcatatcccttagagatgaagacaaggaacaaggaacgacgctggtttcagatcgattcgttggcataatcgacatcagttcacccgaaccatcagtcctgcatctactcgaggactatggctcatcaaagcgagtacgccgcgcgaggtattagctatcgacgggaccagcacgtcagcacacgctaatgcggaagcacaaaatcaagtggctacaccggcctagcacatcaggaccatcaacgcaatactgagggagaccccttacgatcccgttctaaacgatgatctcgcacagtggacagaacagcta

SEQ ID NO: 22978 - DNA, 2615 bp, Oryza sativa
gcagttgtacataattaattatggaaataaagaaccttatacactggcccgaatccaccttcgcctagaatattttgagaactgaaattgtctgtggctagctttagctcagcataactaaaaacgtcaggtcgtccaaccaggttgtatagttctgcatgttatttttagcacagatgagaagagtaaaccagataattttgatgtttgaattatatatgtcctgatatataataccttctttctgttgtgccaatgctctccgcttctttactagtgtaaacactccaaataatgctgctaatactaaaactattgcaccaatcaatattccggaaattgcacctgctttacttttcctttttggtatgccgtttcgaacggtaggagtaaaatctgcaaaggaaaaatattatttatcggcagcgaatataacacttcctgctgttgttttagtgtggtgcttacttggagtgacgctcaatgctgagatcattggcccatagtaattatctttagtaggtatgtcaacagtgcccttgccagcccagaatagatggatctcaaggaagtttttagacacagttaccatgaaactcctattaactacggtaaaagattttccacctgctgttttccttatatcgaaatccttttgttttagagcaccctatgtaaatatcagtaatacttttagataaatattggtaagattcagtagaaaaacattatataaaatgcacaaaatttctacctggatatatatgtcaaaaactcttctccctaagcttagccaagtctgtgagtctggaaaagctaattctgcgaattggagcaaaacagtgtaatttccattctcaagtccaagtccatagtacctcagagatgatgatgacatccttgcagtttcaaacaactctgaatcaactacattttgaaaaggttgggagctatatataatattctttgcatctatggcgttccctacactactgacaccccatcttgtttgaccggtaacataatatgttgcagctccaagatttgtaggatctgcttcataaatagtgtcatctgagcctcttatggatgcattactgccacagtcaactgcgaaggaataatctgcaattaagattaaaaaaattgtagccatcattcaaattcgtaagttcatgttactgtttagttttatgaagaatgagaaatatacattctggagatccacggaaacaaggggtgtcttgttggaggcagtttattccccaaggtagcgtactgtgcacaatttgaattgaaaatttaaagttaccagcaagattttcatatagttcactcgccaaattagaactaaatgtcacaagtacctttcactggtggtatcgagtaagaagttgtttgccaccaaattcctttcaaaaaacagaatattagtatttatattttttctcagcgacacaaatatcacacttttacacttacaactgtaaattgttttgtctagcccaagaaggaatgctcccagtgagttggttgtacgaaaaatctctgtcaacattccagaattatgttatacaaaattagtgcgtactattatgaatgtagtttgtgctatactgccatgtcaattgtatttgacatacatcacttttaatgaagagcttataccatccggcaactttcctgtaaggctattgttcccaagaaacctgaattgggcacagttcaagattataaaatatactcatctgcttaatacaggctcgtatgaacaaattgatgtaaagaaagaatttcttacaaagaattgagatttcccaaattcaagatggattgaggaacttctcctgtgatattgttaaaactcaagtccctgtgccacatgactatcatattacttgaacatatggtacacaacatgaggaaatgagtaataacgtcatcagttggcaccatggcctgtaattgaaaacttacagcaattttaactgtttaaacatggaaaattctactgctccgagatcactagatatcttgcagttcctcaatattctgtaacgaggaaatacaaccttggtaacttgcaactagacaatactgtaagctttatagctaaaagcatcacatacagtgtgctcagggatgccatattactgataaatgccaacggagagaccccatttataatatctccaatccatctgctcatttgagtttttcataaattagttatcagccttgacattgtcaaccttcaagagttcatgccacaaaaagagtatacttacaatcttgttaatttggtcagattagacagactttctgggactggtccttcaaaggagtttccgtggaaagcactacaagctcattattttagaaaaaaagttagggacattcaacctttataaagtaagaaaaaaaatctctgtgtgagcattcttaataagatctctaggtatgaacatgccatgtggaccgcttactgtgatgcagatatctgcatttatattgagtgaggactgaaatgtgaaaaaatgcttttgtttaagtctgaatggagataatgtgatatacagacagtaatttatcttgcacagattcatctatctctg

SEQ ID NO: 22979 - DNA, 8837 bp, Oryza sativa
gtgtttctgtatcaaacgtttgaccgttcgtcttatttgaaaaaattatgattgtttttaaaaaaataagtcatgcataaactactattcatattttatcatctaataacaattagaatactatttataaaaatatttcaaataaaacggacggtcaaatgttgagcactaaaacccacaactgcacttattatgggacgggggaagtagaacttatgcgattgctatttcatgtattattatattagttcgtgcagtccaaatatatactccactcatttcatattatctgtcattctacttttgttgtaagtcaaacattatatttctaaccatccatttttacatatttatatagtttaacatttagattcaacatgagaaataatttcataatttatagttcgtactccctccgtaaaaaaaaatacaacttctagctaacaatttacacataagctatgctcagattcgtagtcataagttcaactctctctctatatatatgtgcgcgcacgcgcgtgaaaactgctaggaattgacagttaaagctgaaaggatgagtggtttgtagcagagggagcagtggaagattaatccacatgtgagaaaagatttcttacaatgaaagaagattggtgaggtttcctagttcctttggaagtagtccagatagtggattgaaagataatgaccttgagatgattagcaataattaaaaaaaaacaacgaccaatagatggaacatgatctagaacaaacatgtaactcatacaagtattgcattgaagtaaattttccgatgaacgacggaatgggaccagtcaagtaattacggaataagttcctgaaaagatcacaaaaataaactagaacaattagccaacacaaaaataatgatgaatacctgacaagcatttgttggtgttcacagaaagaaccatgggattgaatttatattttgtgcaaacccttgatctataaattattagtacaagactctttagtagtgccacaccctgattttgtttcaggaatttataaattatttaataaaatacttctagaatttatattaaagtgtacattaattaagaaaatgaattaaagtgggaaataaagtttcctaaataaaacattgctggatttaatttttattatattctccatgattagtttacactctctagaattttttcggatttttcagagctcaattactaattttaacaatacaaacatcaattcaatggttatttaaatataaaataaattagaaacccctccaaagttctgggtcgaattgagcccatgtctctctctccgcgctcagcgcagctagcgctaggccgctagcctaagtcaccagcccaccgcctccctcctctcactcctgccaacatgtgggatctggtcccacatgttagtgttgtccccagcatccagccagaatcacactgtctgcgttcctctccaaatccagccgcctctctagatcttttccaaaattagttgaggccgtttgttccctatctcctctttcctttccccatgaaatccccaaaaatatctaagtaaatcgtgtggaatcgagctcgaactcggacactctctatccggtagaaccctagtttttcccagcgctgccatagccgtcttaggcccggatacattatctcgtggctacaaacaggatccccctccctctcctctttccgctgccaccctcgcctgcacaaatcggagcctgtagccctagcttcgccgctagcccatagcatcagcactgctgccaccttccagtcggatcacgtcgttgctctactcgtcgccgctctacttgtcgccttcgcccactgtcaccttcgccgggtgcgcaaggaggaggcgcatttcatctgccggtcctccatcaccctatactgccagaacaccgctattgacgatgacccgagctacaccgtcatttccacctcgtcgccttcaccgtccgtcgtcgcaacgcctctcgatgagttcggctcgtcacactcaacctctcggtaccctccgttcatgctgccgtgcctgattcgccggcgatctttgggttccgagcaggtcgtcgccggtgaggtgacatcatcaccacgccattgctattgtgttatcaccaaaagttggtaaggttccttagtggatttggttgaaggacaaatttgatcaaccaatggaagtctatccagaagataccgaattcaaaaaggattgtgaagaccatggcatggcatattaattctatctgttgatttagtaactttcctttaatctttaggaagttttatctaatgtctgattaagacttgtattttttccttttatgtttagcaaacctatgtcttgtctgattaggacttgcatcaacctgaggagataaatatgtaccacagggtctttgtaaactttctccacatattaatacaattactttcggcgcattgcaaccttttgttctagcaagttcttactttgagttgggctgcattggttttgatctccaatgaggaagtaatttctatcaacttttcatgtatcgccgtggcaagaactttctcgattaagtcaggtattctttttgggttgacgcaagcattacatatccgatatattgattctatctttaactgcattgccgtttagagttgcatcgacttagttaggactttcttggttaggtccgatattctgatttagttgatatttctctaattatactattgttttagatagatttgttatatccatcacgtctgtgtagatttatcggataaataggttttttaggggcaattgcttatttgaccatgtttaaaagcataactactaatttgaccctacaattttcagtttgcttatttgaccctgttcatcaaaatcaaatgaaccgtctgaccctgttccgttaaggcgggttaacactgttaaataagaggcaaatagtcccttttgcccttgcttatttggccctcttgtatccaaacattcatacaaatggatcttttaacaaatcagaatcaatttgacaaatttaatacacagtagctggaggttgatgctgggtgccgccgccgaccaccctttgcacgccactgctccccgcgacagcgccgctgcggacaaaccgatgcctccacaagcgaattaaacggcccatcgaatgaactcgcgagggaattcttatactcttgcatgcccccttcacttgtagagaaacgtctaggcgcagcaaattaatcaagtgctctgataatcaatatctcatcaaggttatccaagtagtagccagatcaatatctcgataataatccggaacacgttcaccatggtcgtcggcgcacccaccgtggcgttcttcttgagagacctgagtaggtcgtcaacgaaacgctccatcctcctccacttctgccgcggtcggccgctgatgcgacacgggaattccgagatacctacacgcatcgcgtgatgccgcggccgctccgtcgcgcaatggcgtttgcgccgacctccctatccgtgcggcagccgccgcttccccatgcgctgccgacgctgctgctccctacctccacgcatcggcggtgctgctagccactccctcgacgcaccgccgccaccgcagatccatttctccatgtgccgcttgtaagagatgagagagacaaggtgggatggatagggttgaagtgccttgatggtattttggtcagtttaaatagtaaatagattttttttctttttctagaagaaaccctaatgatgtagtggaaagagggtcagacggagtgttcaatttaaaaaagtcaaataagcaaactaagaaaaacatagtcagattagaagttaggcttcaaaacagggtcaaataagcaattatcccattttttatcatcttcaatcttatactgtctcgtttaggtttgatttattagattgttgctaatatgtaattatattctactaagccgataagtttttatgcaacattttattagagttctagccaattagttatcttgttactacttctaagtgttgtatcgtcttatactcaaacttgtataatcaatagttaaatatctctttatcaacttcaatatcataccgtctcgattaattaggtctgatctatcaagattatctttgattaggaatggtttattgacgattgatgaaaaccttatatacatcggctagccttgctacatcacatcagcctattggctgatcggctctttgatcttatacaatccatctatctatcttcttaattgtacgatcaaactaaccgccacgccctacacccgattgatacgacgagctatgtggatctctcaggccttcgtgtgcgacaaatttcacgtcaacatgttgccacgtggttccatctaaaccctagattgaatcggtttgagccgtcagatcttggttaactcttggttaactcttggtcaagatcaatctcggttgtccatctcagtgaacatgtggtcaatctctgtggacctactctacggtggactgattgctgatgacatcataatttatctttttcttctttaaaataattataaattatgtaataaatctatttaatccttttaaataggctttagttgaattaaatcttgtaaaattcattactaattcatatgaagtcgaaatgaggcagttcataattcatctaaaataaagctctaaatgtttgtttactttttatgtattgtttatttggtttttattagtcttttttctcgttttgcatgttagcttgtagtttccatcctttttatatattgtttaattgattattgtaaggcatgtcacacatgtcccaaacaatccctttgagcatgttgataaaatatttaaattcttcttttattttaaatgtgcatttaatttcgaatgtcattaggtggtgggaacctttcctttgaatagctagtttgtattgataatcctgttccttgatatcttgggatataatttgactagcttgagccatatatattggttcgactagatattagtgtaattgcttagccatgctaagaaacattagtatcattttacatgcaataactaatgattcactcatgattaatgatggttaattaatggtatgttgtgatgtttggtcatggttgattaataatatgctaactaaaacttgactaatggtaggttttgagcacatggatgtgatgatcatgctcatcacaattaaggaccggttttgtatagcatgattcatcatggagcaccacactaagaagtggtagagataggcccatgtgggtcactgcggagtctattccgggctatggaaagacgatgatccgggaacggtgaactactttgagttgagctatgcgaagagtcacaattttgcacgtggtgacatattaagcgtgggcacacgataacatggtgacatgttgtggaattgtcttgtgggtatattggtacacatctgactagagtaaaacttttcaaatagccatacatgcggttattggcaagcctagcaatgtttttttggtgattagtcacacactactcattaatcataaataaattggtcataacaatttgtttgcattttgtatggactttagatctgtgtagtcgggtttggttgtttagagatggttgggcctacgcagcataggtatgctattcagagttgattttaaattgattaattactctcaactatttactgaatgttgcttttgcaaatgaaccctactataccttcctttgtatccccatgcacctgcattttttctatgtggcttacggagtattctatttactcaccttgcaataatcatcaaatctcagttgaagaaagttttcgaaggagaagacatgtggcttatacctcagttgaactgtctgtgagagtggagctgaagctaatgttagattgtttgttacctgttgttttcttttcatttataagtaatatctaacgtaattataatattggatctgtatattcaattgtcaattttagtatctcagctaattagtagatgagtgtattatatgcacaacttagttcggaaattactagtgaatttccgaatgtgacaggtagcaagataaattaagaagagaagtcttcgataccgtacaggtccactagatgggtgagattctgtagctccgcaggtatttgaccaactacatccaaataagttaccctcctacataacaaacaagtaataattctgataagagaactatgttcaggatacatatatacagccggaggaccaaatgaatacctccgtttgggtccagcagatatgtacaatttttctttagggaagatctgtaccaaatttaggatagacttttctgattcctctatatgcagccttggagatactaattaatatcaataatctggtgtgtgtctatatatatatacacatatatatgtatgtatgtgtgtgtgtgtctatatatatatatatatatatatatcttaatttgcatacttgcatatacgtgtatatgggctagcacacacgatgaaaccacgataaagataaagagagtgtgcgtacagtctcgtaatgtggcagagggtgttgttgttgaatgtgcaatcgcacttgatgaacgggttgatgtcgcggtagttatcccaatcggttttatcagctgcgaaaccgctgcagagctcaccgctgatgttccactccggtgatgccttcttgccccatctccctagtatcgtgttcagagcagccgctgcatggttaatttattaactcaccattagtaatcatgcggatgaaagctacgcaatagtgaaatcagacttcatgaaactcacgggttgctgcgtaagttttatacagtaataatagaaataacatataatcagtaggcataacattatataatttcatctttatcgactgcagaaaaaaaactatatacaattaggatgttatttataataatttaaactagattggccatttaaaatcacaacaatagtgatgtggctaagtacatcatcttaaatataaaacaaaggtgatacggcttaataacaaaagaaaacgtgagagataatttgaacaatatacctatctcaactatcatagggataaagaaacaatttagatgatgtggcttaataagaaaagatataaatagcattaataaccactgtagaaatgaactttatataaatatataggatttctctaactctttggtttcaacgcggcaagagcggacacactatcaaagttattatcaaccacaaattagtactcctgcgatcaaagtacatggagggaaaccaaacaagagagacatgcatgcgtggaagcctgccaatggtttgaaatccaatccacaaccagcccaaaccaaagcagtaagctacacaagtccaaaccactctaattcatttgtcttctcttagaatccaaaccaatccaacccatatcatatttcaacccaaatcaacccaacccatttcatctatatggattcagttcacttttccagtccatttcaccccattccaaatcgacaccaaccacatgtcggcgacgaggtgggcgaggagcatcggcggcgagccgaggaagtcgcagcgcgactccgagcaggagcagggcgcgtgcgggcaggcgcgctggtggccggcgacgtcgtaataggcgacgtagctccagcagccgaacaggtcgttggggcacaggatcttggcggcgccgccgcacgcgtggcactgcttgccgggacgtcgccatggcagctgctgcacgccaagtgccccgccgcggactgcacgccaagaaattgccactagccgagccctcacgaatcgaatgaaagaacaacaacaagaagaagaatgtcagatggattggatgaacagctaggaaggaggcagatagggcaacggagcacggccaagtcgatccgcttttcttcttcttctccggctccggctgcagctccctcgccgcgcgccgcttccaccgccttttctcgcttcacttggccgttgggcgacaccacccacgccgccttcttggcgccgctctgctcgtcgtgctgcctgtacgccgcactgttcgcgctcaacttggccacgtggttcggcgacggcgtggacggcgagctcgtcggcgccatgcgcgccgtgcagcaggagttccctccgcttcctcccccgcgcccgcgtcttctccaccttccagaaggcggcgggcggcggcggcggaagctctccgacggcgaacctagtgcggcggccggacatccaaacgcggctgcgcggcgaggtcgaggcggccgagggcggtggtgatggagtgcctctgtgtctgagacgacatcatctgctatttggggatgaatccaattgaaatccatggactccatccattttagacccaaaaattatgactaaaaaccaatccaatccaacccaaccatccctcatccaagctgctccaatccattagttatctcaacccgtttacacccataccaagtgaatccaaattgaaaaccaatccattagacccattccaatccaacccattggcaggctacatatacgtacgcgtgcattcttaattaccttcgactggatcagtttttggtgcttgttgatcctgagcagctgcaacccgccatgagcacaaattagcaccagccacgccagatggtggcgaatgacacctctgatgctgcaagaacgcatatctctccctctctctctctctatctaacaacactgtgtgcat

SEQ ID NO: 22980 - DNA, 3874 bp, Oryza sativa
cttatcaccattactacctttactactattgatgagggttatttttgtcatttttactcctcactaaatttgttttgggatgctaggaatctcactaaatttattttgggatgctaggaatcctcttttagcaagcaagtgttttggtcaaattaaagatgacattaacaagagcatgaggatgaccaactagtgtatgcccggtgagttcttaattaaagattagttatttttcatatatatctaaattcaagaaaacagcttgaaaaattctttttagtttttgcactttgcgtccttttattcagttttacttcgttaaagttttgtcccatatgagtacttgtttaatgctatcttaggttacgttcagcgacaatacacagagagaaaaattaccttctctttcaaaagcatacgcttaccgaaatactagacaatatttttttacaaaagaaattacaaaaagttgtatttttaatttttaagtttaaaataattaatattaattatcttattttgtgagtatgttttaatttttttttctttcgtcaactctcaatcataatgttaaaaaaaactctcaactagtatgttttaaagttttatggtgttagtcgtgtcaaaaacattgacttgtccacccgccgttgttttgactgcctgccgcgggaagggaaaaacttgccgtggaaatctgatgctgccacggcatcctttgcgtcaggacggcgttccccgttcttcaattttttgtcgatcagctctgttgaatcgtatgattcatatgctagctgtgtctataggatttggtgcttgcagaatgtattcttttcaccaaagtgcatatacacacacctagttgcatacatgcaatctagatagctatataaaatttttaaaattttcacaaaacgagtcctcctggtagatatgtgagcgtttgcacgattgtgttgtgtgtgcgttagacttgtactgacaaaaaaaaagaaatattaaattgataagatagatcatgaagatgtaaattactaaacaaatagatctaaacttagtctatactcactactgcagaaaaacccatagaggtgcacccttttttatttttataggtgctaaaaaaacatgaaaaaatatttggtatttttattacttccctataacgtcacacttcgcttcccacatatcacatgatttttgcaacccatattcatagacatgcttctaaagattcttaccatgctattgttttgtgattattgttatccaaatttataatgctcaactgaaaattttagcgactacaaaattgtagacgtcatctatacctacaacgttcatatatgttttgtctccatccgagatcatttagaaattttaaatattcacttatgtaaatagatctgaaacattataacacattttcggacatcagaaaaacattaaataaaaaattcatcacctacaaagttatatgtctcgtcaactacaaatttgatataaagtttatcttcatccaactttatatgaaaatgttagatagaaaatattgtgtcattattggtgccgattttagttgtaaaccaacatctatgagctcataagtactagtttttattaagaatcaacacatatatgatgcctataagtatagtttttattaagaaccaacacatatatgatgcctataagtaacggttcatgataaaaaccagtacatatgcttatagaggtgccattttattataagaatcatcgacacctatgtgttgtttataggtatgtaccagtttgttatagcctgatagaaaccgacacctatgatttgatagattattggtgctgacttttgttacaaaccaataccaataagtgattataagtaccggttcttaattttatactggaaaaaggtggagaaagcttcataggcgccagttttaggcaaaccgtcatatgtaagtccagtctttatgtgctgttttataatagtggctggataaatataaatagctagcaaactgtattgatgtgcacttattcatagttgtagcattttattattttagaatgttcaggcatatggctgtgttcgttgggtaggttgggaactcattccctccacacggaaaacggagcggtccactagcgtgtgattaattaagtattagctatttttttaaaataaatagatcaatatgattttttaaacaacattcatatagaagcttttttcaaaaaaaacacaccgtttagcagtttgaaaaatgtgcacgtggaacacaaggaagaggggttaggaaccctgaggaaataacacagcctatagaatacatgagaaagtccagagcaagtaaccagctaaactattaaaaacaattaactttactccctaatggcatttgtatgtttttttctccttaggcactaaaatttaggactatcatatatgtattacaacttatatcttaatattctcaatatttttttagatttttttatagttatttacataggttagaagcatttaagactgaatcaaatatcaagatctcaaagttaagcaaacacttctgaaaatattgaaaatattttcgaactttgataatggtgtatctatggctataaaaagtgcaacttaaaatatagagcttatataaagaagaaaaaaaaggtgaaatgtcacccgagtaccattttcaatatgctttatggagtcaaatgagtaaagaaaaggtttaggggttgatctaatgaaatagtttgagagattaaaaatttagtcttgaatgtttctatatataattaatctaaacttattattataccacaatcagtattactattttgcaaactttacgcaacttatttgttaggtgcacgcctgggtggagcacctatgctgtgatgtcacgcccataaattcacaagtaatttccaaactaatttgtgcattaaaaccctcgtccaggaatcagccgaggtacacaaactgacaatttaatatacaaattcatcaaaataactaaaacgataaatacttacataagaggcacttagtcctcaccatgaagaaaactgcagcggaaagtaaaatctagcgaagcttcagctccactcccacaggcagctcaactgggatctaagccaaaggtcttctcattctggatccttttcttcaactgaggtttgatgattattgcaagaatgagcatatgacatactcaacaagccacacagcaaatatgcaagtgcacaaggataccaaaggatggcataatatagggttcatttacgaaagcagcatttagcaaagagttgagaatttgtaaaacagtagagtaattaatcatcaatattaatcaacactgaatagcacacccatactgctcaggcccaaccaaacctgaacaaccaaccccggtcgtacagatcaaacctccaaaccaggaattatccattccaaaccataagtcaaattaattatcacattattatcattaatgagtagtgtgggactaatcacgaaaaacattgttagacccgcccataaccacgggcacggctattcgaatagttttactctggccagagatgtaccactgtacccacaagacacgattccacacatgctgccatgccccgaagtaccaccacggcactgctaagggggaaatcgtgacagtacccttcacacaacacaactcaccacagtgtactatttctggatcataatcaccccctcaataaccaaggcatggactccccagcgaccccccacggacttctcgccgcttcacagtctggcacaccataatgaatcatgctatacaaaagataaagtcgttgcccacgctggcttgtggttggc

SEQ ID NO: 22981 - DNA, 15125 bp, Oryza sativa
ccttccaattgatcaaataggtcatcaattctgggtagaggatacttattcttgatagtaacctcattcaacgctcgataatccacgcacattctctgagtatgatctttcttctccacaaagatgactggtgctccccatggcgaagtactgggtctgatgtatcctttctgaagcaaatcttccacctgtctcttcacctcaactaactcattagctgccattctgtatggtctcttatggatagggttggttccaggtaccaagtctatccgaaactctatctctctcttaggtggcatgcctggcaaatcctcgggaaacacgtctgggtagtcttgtactatggggatctcttgtagagcaacttggtttaagatcacaccatgagatttaggagaggacataaagaaagaaactgtttccccattgctactggttaaagtcaccttacggttggcacaatctataactcctctgtgacaagataaccaatccatccctaagataacatctagatctttggattctagcaagataagcgaggatgggaaaggaacttcttctatttctatagtagcggaaggacaatactgtgtcgaaaatacttgattgcctggggtattaactagtaaaggtctctcgagactaataacttccatcccatgattgctcgtaaaacttttagacaaaaaggaatgtgtagcaccggaatcaaaaagcacagttgcgggtatagagttaacagggaacgtacccaaaaccacatctggtgcattctgagcttctgctgctgcaacatgattaacacgtgcctttggtgctggaacattggagttgttcggggctggagcgttcttcacgcgccgaggcttaggacacttatcagcataatgtcctggatcaccgcaattgaagcatatcactggcttgcttccctgttccttcctgacaggctggttctgagctgaagttgctgcaggacgagcaaccacgttgcggttgtcattgccacgattactagtattgttgttgtagaactggcgttggggacggacaactgatgaagatcctccttgagggtacgatggaacttgaggtccagtaacgagacgcggcctctggttactgccctgttgtgccttgaattgggcagccctgcgcttcttctgctccatccggttatacttgtcttcctgacgaatcgccttgtccaccaactgctggaaatcccggaaatccgtagacatcaaagcataagacaactcatcattcagtccctccaagaatttctcctgacgctcttcatcggtgcgaacatcttccggagcataacgagctaaacggttgaaatcatggaggtactcggtgaccgatcgagatccctggttgagtgccctaaattctctcttctttagagctacaacacccgacggtatgtgtgtcttcctgaaagcggccgtgaattcctgccacgtaataggctctccttcagccctgccttggcgaaaatgatcccaccattcagcagcaggaccatgcagttgatgcgaagcaaaagaaactttctcctgctcagtacactggatcaaatccaacttcttctccaccgcatgcagccaatctcctgcttctactggattggtggtgctggaaaaggtagggggtctcacgcgtaagaaatctgccagcttgttttggggaggtgggggtggattctggttctgattgtttgcctgctgattctgtgcctgctgcactaacagattgatcagttgtgtttgttgggccagaatctgagctagcgtgggatctcctccattgttagtagctccacttccacttccacttccacttccggtgcgcgtgttcaccatctgacgataagcagagactcatgctgttacatcccaccaatgatgtaagcaacaactaaaacccacacactcacaagcaaacttaaacaagcaatctaacacagcgatctacggcaacgatctaactaagcgactaaacccgccttgtgtcggaacgaagcgatggatcttcttcctctggagtagctggctctctttcttcagggtcttcctcctcttcctcatcacttatgatgtctatgacaggttcagcacgatcgggcacagcttcacccatcacgcgaatcttcgaagctaactggagacgaggtggcggacaggttctttttctttgagtgaggcgatgcttgggtgttggcggcggcgtttctcctttaagttcagctaattccttttgtagacggtacaccttgctctccaacttgcaaatcttgcctcgattccagttttccctgtcatgagctgctttgtctcgctccacacttactgcatccatagcactaagcatatgcaccgcatgcatcagagtggcactctcttcaccgtcaggacaggtataggttccatagtcttgaccatgaggcttgtgaggatgatactggaaagctgatgaatccaactcttcttcaaagcgttgacgcaactctccaatggccaccaaagctgcctcttgacaagcatggctgtacgatcttcctccagcttcgaacttaaaagacggaaggtcatcactatcactagccaacgtcacacgaacacgacacttctcctcgtcggggtcatgggaaatttggcgatactcgggagcaacttcatagcctacctcaaaagccatcaacctcagctccctgacgaaccctaacaccttgatcaaatttctcggtgaatggggtggcatctaaagaaacatagaagggaagaattaatgcatatttttaagttagctgcaccaactagacttaactgatttagaccaaaaaggaagaaaataaaagaaaagacacatacaaagctactttatatatttttctttttgaatttaacttttgaacagagacaaatcagtttgaacaagtgaataaaataaaaccaaaatacttaagacctactataagcacggtacaatgtcaccattaaaagggatgagtagtactagtgccaacatgattaaatcgataccataatagatgtacagtgccgaccaatccataagatttagtaaagagaaaaagaaacattttgagaagaacaactttttgctttttaaaagaaaagaaattgaattaaatgaattttgtgcataaccttgcatgtgctgccaacttatttaatttgtaagagaatagagaagagcagttctatttttttttcaaaaatattttgaaggctacttaaggtttaccatttggcttatcctaaggtcaaggtggctctgataccaacttgtcacgcccggaatttctatccaaaattccaaacgcttacatgtgtgttaaaccctcgtccaggaatcaaccgaggcacacaatgacaatttgataatagagtacaaataaataactatttaatactcgcaaataacaaaagattacagaggtagatagttcctctcaaaaaataacattctacgcagcggaaaaaaaactataacaaactacggaacagctatggcgactccactccacaggcatcttaaccaagaacaagctcaatcctccagatcatcaccttcactgagatactcctcttctgatgaatgaatattgcaagaatgagcatatgacatactcaacaagtcacacagcaaatatgcaagtgcacaggataacgaaggatggcataatatagctcatttgcagaaacagcatttaataaatatttaagagaatgataaaaacagttgaataattaatcagtattaaataaacaccatacaacacacccatgttgcataggcccaaccacatttgaacaaccaaccccagttgaacaaattaaacctccaaaccaggaattatccattccaaaccaggagtcaaattaattaccacattataaccattaatgagtagtgtgagactaatcacgaaaaacattgctcaactcacccataaccgcgggtacggctattcgaatagtttaaactctgatcagaggtgtaccactgtacccacaagacacaaccccacatcatgtcaccatgtgcctcaataccaccacggtacctcggaaaggagttgtgataataccccttgcacaacataacccattacagcgcacctttcctggatcataatcacccccttataaacaaggcatggactccccagcgacccccgtggacttctcgccacttctcagtctggcgcactataatgaatcacgctatacaaaagataaagccgttgcccacgctggcttgtggctggcacgataaatgtttcacaacagtagctcgcgaaccggtccttaattgtcatgagcacaaccatcaaaaccatatgctcacaacccaccttaaccaggttttaattatcaattaattaacatcacacgatttaccatcgtgagctaccatttaatataatcatcattattaataataatataacatagtttataattaatccctttagttagctaatgtttctaagcatggctaagcaaacctatatatagcatttagctgaaccaaaccaatatataaggttcatgctagtcaaattataacccctaggaaaataaagtcatcttcggccaataattaactgggaaaggttcaccacccgatgacattcgaaaacaatgcatagttgaaataaaataatagctttaaacgggttcaacatgctcaaagggttgtttgggatctgtgtgacttgccttgagcttccgcaaacgcttcggaaccttcctcaacggaaacgctctcctccggaacgtcggaaactaaagcaattaaacaaaaatcaacaaaacagtacaaaaacaagcataaacagtacatgtggatatttttaacatgtagatcttgattttagaaaaatttagcaacttgaaccacctgaaacggatctacggttatttagttatgattttccaaagttttaatctattagaaaattggaaaaaaagaaaaaagaaggagatgatgacgtcagcatgacgtcaccccacggcagccggctagggtttgcgagctcgccggagatagagaccttggccggggatttggagggcatgtacacgtagaggacgacgaggcgaacccaacggtactcaccacaacgacaaacgacgaacgatgatggccggcgacgaagaggacggcggcggcggctcggcttgacggcgacggcggagctccggtggtcggcggcgaagggggacgggcggccgaggttcccctcaccacggcgcacctaacggcggcgacggcaagcggcggcgacggcggaggcggcgcggcggcgcggctggagaaggccgacggcggcggcgagctaaagcaacgcggcggcggcgctacggtgcacgggagaggacgagagaggggcaaacgaaagagggcgacgatgtggtcctatatatagcattggattgaagagatcgaactccaaacgagaggaatcgactcgggaaaaatccaaactcggttttagggataaactcgaaaacgagtttgattcgaacaagatactcaacggattgctccgtttcttgaggggaaagatagaggagaacgagaggaacaaaacccctcaaaaacccggaagaatcggggtcggattggagcggaatcggaggcggaaaagggcggctcgggctcggcttcggccggctggaggtaggagatggatccgacatgtgggccccacatgtcggtctcccgagaggagggcacgggcggctcggctgggccggcttgggccgcgcgggagagagagagtgttgggccgaattcggcccaacggcttaaaggaggggatttttgaactttttaaaataaaaacaatttgtgaaatgttgtttcaattattaaaaatacttcccttgctcaaataattcccagaaaaatctagaaaatagaggagcaagcatagtatttaataaaattttatctagctcatttttatgttgaaaattttcctagaaaattagggtttagtttgtaggcttttaaaaataatttctaaaaattccaattaaacatcagtttatatatttaggatttttagggcgtgacatcacgcccggaatttctatccaaaattccaaacgcttacatgtgtgttaaaccctcgtccaggaatcaaccgaggcacacaataacaaattgataatagagtacaaatgaacaactatagaatattcgcaaataataaaatattacagaggtagatagttcctctcaaagaatatccttctacgcagcgaaaaaaaataaatctataacaaactacggaacagctatggcgactccactccacaggcaacttaaccagaacaagcctaatcctccagatcatcaccttcactgagatactcctcttctgatgattgaatattgcaagaatgagcatatgacatactcaacaagtcacacagcaaatatgcaagtgcacaggataacaaaggatgacataatatagctcatttgcagaaacagcattaaataaatatttaagagaatagtaaaacagttgtataattaatcaatattaaataacaccatacaacacacccgtgttgcataggcccaacctcatatgaacaaccaaccccggttgtacaaatctaacctccataccaggaacgtaccattccaaccaggagtcaaattgattatcacaattaccattaatgaataacatgggactaatcacgaaaaacattgctcaactcacccataaccgcgggtacggctattcgaatagattaaactctgatcagaggtgtaccactgtacccacaagacacaatcccacaacatgttaccatgcgccttagtaccaccacgatacctcggaaaggaactgtgacaataccccttgcataacacaactcaccacagtgcaccgtacctggatcataatcaccccctctacaaccagaggcatggactccccagcgacccccacggacttctcgccgcttctcagtctggcaccccataatgaatcatgctatacaaaaggtaaagccgttgcccacgctggcttgtggttggcacggtaaaagtttcacaacagtagctcgcgaaccggtccttaattgtcatgagcacaaccatcaataccatatgctcacaacccaccttaaccaggttttaattatcaattaattaacctcacacgatcaaccatcgtgagctaccattaatgtaaccataattaaaataataatgtaacatagtttataattaatccctttagttagctattgtttctaagcacggctaagcaaacttacatatagcatttagctgaaccaatccaacatataaggttcatgctaatcaaattataacccataggaaaataagatcatcttcggccgttaattaattgggaaggttcaccacccgatgacattcgaaaacaatgcatagttgaaataaaataatagctttaaacgggttcaacatgctcaaagagttgtttgggatctgtgtgacttgccttgggcttccgcaaacgcttcggagccttccttaacggaaacgctctcctccggaacgtcggaaactaaagcaattaaacaaaaatcaacaaaacagtacaaaaacaagcataaacagtacatgtggatatttttaacatgtagaccttgattttagaaaaatttagcaacttgaaccacctgaaacggatctacggttatttagttatgattttccgaagatttaatctattaaaagaaattggaaaaaaggagatgatgacgtcagcatgatgtcatcaatggcggccggctcgagttggtgacctcgccggagctagagtggtcggccgggattttggagggcatctacacgtagagaacgacgagacgaacgcaacggtactcaccaatgcgtccaacgacgaccgatggtggccggcgacgagaggaggcggcgcggcggctcggtcgacggcggcgacgggtctccggcgaccggcgacagcggggagagggcggccgaggttcctcacctccgtgcgcacctaacggcggcgaaaggaagcggcggcgacggcgaaatcgaaggcgcggcgcggctggagatcaccggtggcgacggcgagacaaggcggcgtcggcggcgagctacggggcacgggagaggacgggaaaaggggcaaacgaaagaggggaactagggggtcctatttatagccttggattgaagagatcggactccaaacgagaggaatcgaaaccggaaaatcttcgggttagtttggagagataaaatcaaaacgagtttgattcggacaagatactcaacgatttgctccgatttttgcgggtaaagatagaggaggatatggggattaaaacccctctaatatccggactcggggtggccggattggggcggatttgagggcgcaaggtggcggctcgggctcggcatgcacggctcggccggctgctagaggaaggggaaggatccgacatgtggggcccacatgtcggtctcccgagaggagggggcggtggcgacgggttgggccggttttgggccggctcggccgcgggagaggggaaggatgttgggccaaaaacggcccaatggctttagggaggggtttcagaactttttaattaaatataatttgtgaaatgttgtttcatttattaaaaatacttcccttgctcaaataattcccagaaaattctagaaaatagaggaacaagcaaagtatttaataaaattttatctagctcaattttacgttgaaaattttcctagacaattagggtttagcttgtaggcttttaattttaatttctaaaaatgatttaaacaatgtatttttaatttaggcgatttttagggcgtgacacaatccaagctgccatgatgtggtcgcagccaatctttgacccatccatagcggcccagcaagtaccaccagttggagccgggcaatcgaatgccgtggcccaactccacgcacaagccgcgatttcgcccttcgccacaccgtacccgcagcaaggtgcggtaaacagggcgggaggcgaaaaggggctgccgctgagtgggggaatcaagactcgtccaatcccaccccagttgaagttcccacctgtcccgcgttattcgggcgaaactgacccgaaggagttcctctccatctacgagtcaacgatcgaagcgactcatggtgatgaaaataccaaggcgaaggtaatacatctcgctctagacggtatcgcccgttcttggtatttcaatttaccagccaatagcatttactcatgggagcaattgcgcgatgtttttgtccttaactttcgaggcacctatgaggagccgaagacgcaacaacaccttcttggcattcgccaaaggccgggggagtcgataagggagtacatgcgtcgcttctcgcaagcctggtgccaagttcaagacataaccgaggcgtcggttataaacgccacttcggccggtctgcttgagggcgaactaacaagaaaaatcgccaacaaggagccgcagacgctcgagcaccacttcgcatcattgacgggttcgcaaggggcgaggaggattctaagcgacgacaagctatacaagttgagtacgataaagcctccgtcgccgctgctcaagctcaagcacaagttcaaattgccgaaccacctcccctctctgttcgccagtctcagccggcgatccagggacagccgccaaggcaaagccaagcccccatgacttggagaaagttcagaacagatcgggcgggcaaggctgtgatggctgtcgaagaagtgcaagccctccgcaaggagttcgacgcccagcaagcaagcaaccatcagcagccagcccgcagaaggtccgaaaagacctctactgcgcctttcacggacgctcttcgcacaccacggaacaatgccgaaacattaggcaacgtggcaacgcgcaagacccaaggccgcagcaaggaacaactgtcgaaacaccccgtgaagcagttcaggagcaaatacccccagccgaacaacgccaatatacacaacaaaggataatccaagtgattacaagagctgacccgccaagccagttgtcgaaacggcagaggaagatgcagatccgtacggtccacatcatcacttcggcaggtgagggggcgccacagtacgtgaaccagctgatccctttcgggccagaagacgccgaaggagtcctgttcccgcatcaagatccactagtaatctcagctgagatagccggttttgaagtccgacgaatcctggtcgatggagggagttcggctgacgtgatcttcgccgaagcatatgctaagatgggcttgccaacccaagctcttgcaccggcaccaacgtcgctccgggggttcggcggagaggcagtgcaagttcttggccaagcacttttgctgatagctttcggctcgggagaaaacaggcgcgaagagcaaataccgttcgacgtcgtcgacatcccatacaactacaacgctatcttcggccgtgcaaccctgaacaagttcgaagccatttcccaccacaattatctcaagctcaagatgcctggcccaacaggagtgatagtagtcaaggggcttcagccttcggccgcttcaaaacgcgatctagccataatcaacagagcagtgcacaatgttgaggccgaaccgcatgagcggcccaagcacacgccgaagcccacccctcacggcaagataacaatagtgcagattgatgatgccgaccccacaaagctcgtatcactggggggcgacatgggcgaagaagaagttgagagcatcctagaggtactcaaaaagaacatcgatatcttcgcctggagccctgatgaggtggggggcgtcccggcggatctcatcatgcatcacttagcagtcaagccgaatattaagccaagaaagcaaaagttgcgcaagatgtctgtcgatcgccaagaagcggcgaagaccgaagtacaaaaattactccgagcgggggttattcaagagattgaccatccggagtggttggctaatccagtgctggtgcggaagtcaaatggcaaatggcgcatgtgtgtcgatttcacagacctgaacaaggcatgtccgaaagacgatttccccttgccgcgaatcgaccagctcgtggatgcgagctcatgagtttcctggatgcatattccagttaccaccagatccacatgaacccgctcgacatccccaaaacatccttcatcactccattcggcacattttgtcaccttaggatgcctttcggcttaaggaacgcaggagcaaccttcgccaggctggtgtacaaggtccttggcaagcagttggggcgaaacgtggaagcttacgtcgacgacatcgtcgtaaaaagccgcaaggctttcgaccatgtgttcgacctgcaagagacgttcgacagcttgcgcgcggcaggcataaagctgaatccggagaagtgcgtattcggcgtccgcgcaggcaagttgttgggtttccttgtttccgaaaggggcatcgaggcgaatcccgagaaaatcgatgccatccagcaaatgaagcctccgtcaagcgtacatgaagtacaaaagcttacaggccgaattgcagcactcagttgattcctctcaaaggcggccgaaagaggtttgcccttcttcaagaccctccggggcgcgggaaagtttaattggacaccagagtgccaagcagcattcgacgagctaaagcaatacctacaaagcccaccagctctgatatgcaatggttcgccacatctagcgaacaccaaaagaaaactatgaaaatttaagagaagggcggagagcctcacacctctgggtggtcccgggcatcgcctccaccccctccggccgccatgccttcatcttcacaaaggtccgccgcctctgctttcgccagctgcgccaaaaggcgcgccttagcggcggagcggccgtccttctgccaaaattgttttcgccatgcacgaagcgcgggcgaaatgtcttgcgcactgatttcccaatcccccttcgcgtacttggggaactcggcgatgtgctcgcagccgaactgctgcaggaggcccatggtaaaggccgctcatacgcgtgcacagcaatcgccgtatgcggtggcgcagtcggaaaccgaaccaccagcctgttgggtccattcggagaagtcgaaggctgatgcatcttcggaggggacaccccgcactttcgtgcccatgtcagtaagggtgaggcgaagcgtttggcacgctgtccgcgaggactcggtggttttccccatctcccgtgaaaaccgccgcgactcctctgcagcacttgcttcagccttgtgaacctcctgccgaagagcctccatcttcggctcggtgaggttgtaataatctatgagcacggcggtgtgggctttctccttctccagttcggccttcaagcgatcaacttcggccctggcttctttccctttctccagttccgattggagccgcttgttttcagccttcgcctccttaagggagttggcaagggcctccgtctccaaatttttgtggcccagttcgtcatcctttggcccgaagacggcttttgaacccatcaagtcgagctcgcacggttcgctccgttgagcagtgagccgcgaggatctgggcgcagaatacgagcggcgaagagaacaagtgtcaaatgtaaaaacaagatagaggaagaataaagataaaaaaagggggggaaaaaaacgtacccgaacagccaggcgagcacccctcgtcgaactcattcagttcggtgaacatgcttggggcactggcgggcagtacaagattgcttaccccctccacaaaaggaaggaggtccgctcgcgtctcgaagtcgccaggggcgaagcggggtaccgagagcgaatattccaaagcggacgtctcagcgaccgctctctttcccttcgcctccatcagcggcgatgcaaccggctgatgcggaggattgccgaatactttcgccgcggccgtcacaatcctttacgcagaagccgaagccccagcggcggtactaccatccactccagcggcgccaattggcggaatgggggcggccgaaagatccaggctgcgaccagtgggcgaagtcggagtcccgtcggaggactcgttgtcgctaaaaacgcgagcgacatcgacgagtcctttcgttttagccacctttttgataggacctcccttcgccgccgcgcccgaagagaacgcaactagggccttcgccccttccaaatccttccgacgaaggggggagctgttcgactccaccccggtttcgttgttaccaggacttggggtaggagtgtaccctggggtgtcggcgcggtttcgaccgcctcacccgcggccttatcagccacagcctccacctcctcctcttcctctccttcctcctcgccatcacattcttcggcatcatcctcgtcgtcggcgtcggagtcagacgaagcaggaacccttcgcttcttgggggcaagcttcacttgtccacgcatccgctttcgcgaaggccctgcctcgtcattggccttttggggattcgcccggggaggcagttcgccattgtaaacccggttcgcccgcccagccgcttgacgcgttaacagctgactatactcgacaaccgaaacatcgccgatcatcctgcgggcttcggcttcggcctgatcgagggtcaacactgtaaaagtaaagcgtgaagctacgtcaaaagtcaaataaggcgaaataacaaagcacagcagtatatagcaaaagaacagtcttactgttcaccccctcaggaagtatcaggttcggcaaaccgtcgacttctttgccttgttcaaccgcgacttgccatgactgggagaggggaaaaatgcgaagcatacaaaattcctccaccaagtcacgacagctaaggcgggagcaaaccttccgcagtagaacgaaccgcgcctccatggcgccgttcacagcaatattgggtctccgattcggcgtaatcgccctacgccgacaccggagggatttcgctgattcagaaccagccttgaaggggatggtgtggtagaaccacctcgccatccaatggcggtcccacttcgacatagcagcgttcaccagccagagatcggaccgctcggggcgaacattgaagttcacgctcccgaacacggtttttttcgttccagccggggtaatcaccgtcttcgagttcacggtggcgaaaaatatggcgccaaagagctcggcgttgggctcaaacccaaaagtccggcacgcccagtcgaagatagcgatccgaacaagcgccgatgggctcagctgcggaagttccacctggaagaggcgaaggatctccggcaacaacacgttgtagggaaaccgtagccctgcctcaaaaaatacggcgaacaccaccgtccggttgtcgacaggtttcgtgtcacgtcccaaaatgactctaaaatacatcctctaaattatgcctagaataattaaaatccatgtgaaagcctccaaaaattaaaatgtgcaaagttaaaagtcaaataaggcttggaggatttttgtatatttcctaaaagcctaaaatgtgtaaataaattttagtggaattttcagagcacaaataataattatgaagaaataaacaaagttaaaataattttataaaaagaaaaaccctaaaaagtcccccttccctcccttgggccggcccggcccatctctccatctccctccccctctctctcctctccccgtggcccattcggcctccctccccgcgcgcgcgccgctgacgggcgggcccgcccgccaccctcgctgacgcgtggggcccacccgtcatccccgacctcccaccgctcccgccgcctcccccgagccctagcgccgccgccgccgcgaatcccgccgcctcccgccgtccccgcgtgcaataaagtggggggaatcactccccgtgatcccctctccctttcc

SEQ ID NO: 22982 - DNA, 6971 bp, Oryza sativa
gtttccgtccttctccgaccgccctctctcgccccggccctatttaaaccctccccgcgcctccctcgcccgtttccgccccttgccgcaccgtctctccgccggaatcgagctcgcgacgtcgctctctctctccgccgtcgccgccgagctccggtccgccgccgtcgtcgccccggacagcctcccacctcggcgccgcctcctccggcatcgccgcaccgccgtcgaccccgtccaccccctcgccgggtccgccgaccgccggaacgccgtcgaccccgtcgacccgagccgcgccgccgccttcctccgctccggctgcctagggtgagccgtcgctccgccgtgcctatggccgctctctctcggcctcccgtgcctatttcccccttcccttcccctctctcggccgccgctccgccgtgcctatggccgtcgccggagaccataggggcgcgggcaccgcctcccgccggccgcgccgagtggccgccttcgtgcgcaccgagtggccgccgcgtggggcccggccgtcagccgcccgcgccctcgggtgcggctgacgcgtggggcccacggcgccggccggtgcgagcccgggtgcgcccggtccaccgtggaccgtgaggctgccgtgtgggccccactcccgtggacccggtacgcgcgccccctcccctcggctgacgcaataaaccctttttaaattaaattttaaatgaagaaattcgcaaatattcatttaaagagcatataaacttcaaatggccataacttggccatttgaactcagaattggaccgttcaagtctctaatttttccttaagaagtcaagaacccaattttgtgctttgttcctacttgttatatggagtttattagagtaaaagccttttcttttccgttggtcgtgtagacgctgcagcttcggaagatccgctcttcgtggaggttgaagccgacgtttgggaaagcgagcaagacaagtcacatcatccttgaacatattgaatcccagtttataaaattattttgatttaaattattgcattatcgctttgtttaaattcccacgttatcactgttttatctagccatgcctatttacctttgttatgaccttattaatgttattgttattattaccttgttcaccctagaataaacaaaaccccaactagtggacaactctagactttgggaatattctcatcacctggacactatggaatggatggattattgtggaattggattcacacctccccctctattcaaaaccctcaaaatggttttaggctgggctcggggtgtatggttttgatagtagcacctcggccatataaggaccggtcttcgggcctctgttgcaaagcactaccgtacttccacatgtctagtgggtaaggcttagtttgtggctcagtctggttataaacaaaagtacacggatggagatggacgaagtcgggggtcgatggacatctctagggcaaatgaaggctacacgagctgcgtctcggtagtcgaaatgtcatggcacaggaccggtgtcctgctgctaggggctcagtcctgcctacctgtcccgggggttccggccgtaggtggggttgggtcggtactcttgtctatggctaggatgggttggaaactatgtcacgtcttccgtccgtataccatggtggtatgtggcatgtggttacacgtgaggaagatgtgtcttgtgggtaaagatgtacacctctgatcagagtataacctattcgaatagctgcgccctcggttatgggcaagccgagcaatgtacccaagttagtgtttttaattcttaaaacctgcttaacaactaaaatgtggaatggttggcctgggttggcttgggacgagctgggacccagggtcgggttgccagttcggtctgaatcatcgtaggccttgggttaaggcaggttcgtgtgggttcacggccttgattaataatattgtatagctctaggaccgtgtttacaaaatagctttgagcaactaagtgtcttttaatgctgtttactgcaaaccctaaccccctaatttatggctcccttgtactcccttgcatttattctgcacttgtgggtgtgtcttgttgagtacggtggttgtactcagtcttgctcaatttttcccaaacccagaagaggagttcctggaagatgaaggctttggtgtctagctcgtgcctgccatcaagcgcctgtggtcgtcgccctagtcttccgctgtttttcgtttgtcttcttgtgtgctgggtcttcgccgcccatgtaattaattaattaggcttccgcttgttaaactctgaattgtatcaacttttggtgtaccttgcctcctgggacaaggaataatgcacgcacttaaggaacgcccgttgggttatttccggtcgtgacatttcggcaccacggttttccctggggcgaaagcctgcccctcaaccaacgctccggagctgaccagcttcgccagctcgacgtcatccacaagagagacccccagaaaggcggtgctgtcatcatcgactcggctaggatctggccctttcgccgaagtagggtttggctaacgtggggccatggcgaacggtgcgtttgcggtggcgaaaagagagattcggcgaaacgcctgaagggtcgaaagatgctgtgaaaggaagagacggagaaagagagcgcgcacggtaaaatggcaagtgtggcggtgaaaaggaaagagcaacgggaatatatagcccgcccaagcgaccgtttgcctacccaccagtaataaagcgccacgtgtcgcaagggtaggcgaaacggtaaattcccgtcgaccgagcggcacagtaaaaagcccaagaaaggaaggcccaatactgttccgttcggcccaggaaaaaagaatatatataaccatcaatcgcacgaggcgaagcgcggcaaaataatactagccgcacaagtaacaaacttcatttgcaggaataatgtaggtttcgccaggagcatcggtcgaaagggggcgccacataccataccacatattttacacggtctcggccgaagctccaatctcacccgtgcccgtgaggggcttgttggcggatggcatgaggctcttcgaccagatctgccgaaacctgtggcgaaggctatggagcaagaacggcgtgaggcgaagagtcgcgcgagggccttgtcaggccaggggcatctcgggcgaagggtgcaaggcgaagactatctgccgaaggaagacgacttcgccatggcaagttcgccctcgcaagggccaaggaagcctttccggcccatcaagcctaagggccggcgatcgctagacggcccatcaggggcccatgagaccctataacattatgtacccctgtaaatgtccctttcataagggtaatcatgtaaattcccctgtacaacctagatcctagtactaagagcctgcaacagggctataaatagccccctagggccatgtaacgggggatcccaagtgaaattaaaaatttagtacacttcattttcccaaccactgttgagtaaccacgtccttcgacgtatgcagttgtcgtttcgacaacaggaatggacggctaggaatcaaggagaaaatgtaccttggttcattatatataatatatatatatatatatatatatatatgataatttgttcaatgaaaaaagggttactttattttgttataagttacttctataatatatgtaaattacttttaggctttactgaatttacttttatatgtctaagaagtaacttcgtgaaatctaaaagtaatttagacatatcataaaagtaatttgtgatttttcatcaaaatataatcatgtgagattttgttgtaaagatttaattattacgaacacaatggtataatcggattgtaaatcggatgagtaatttaagagaaaattttatttgaagcatagatgataggaatatttcccctacttgctcaatggattaatagcaaccaaaactcctaaagttctagcacgtgggtgtctctggttaagactaattggagaggcctctccaattagatttaccgatattatatgcatatgcatatattacaattctttcggactttatatttattgtttctgtcgtatactgcttcatctcagaagaagaaggaccggcttgaagaagagactttccgtcgtaatagaattctcccgcgggatcaataagctgcacattgatgaatctcatcagttgttcttgaacagccattatgaaatctgcgtgagtgaggtcttccctcatgtaaatcacctatcatttgaaaaaataagatataaatatatgaaatcaataagctaatggagacataattaatgtatgaataattttacatacttccaggtccctgtcagtgctgatttggtgtgctaggcagtggatatacttgcagacgtagttgccgcataagttagtcctctgatcctgctttgcacactaaaaaagaaatgacaagagatttaatatacatttctattttagaacaaattaatgattcaatataatattggagcatttactcactagaaaagtaaacctttcatggaagaacccattcccccaagaaacaacaccacgtggcttgttaattaaacatatgacgtgtacgtgtacaagtaaacgttaaaaattatggtcaactaactttgcgcacacaacttcagtaacccctcgtgcgaacatgataacgatatgtaaacaatttaatcagttgctagacgacctttcaaattaatacgtgcttttataaatcgttttgtatctaacttacaaaaaatgaggtataatgccatgaagtatttggctaatgcttctataccgacggtaccgtcacaactcactaccagaacccaaaatttagttttgctccacagtaacaagggtgctatgatttaaactctaaaatatgtaggcgttaaatctataaatttatgataaatttagtgttaaatatatgtagttttctaatagtttgatcaaaatgcctatagattagggaaatttaacgacaacacaatgatataatttttttgagaggaatatacaatgatataattgatcaaagattggataaaaaatttaggaaaaagaacaattgaagagctagcattttagctatttaatgttgtatatttgttttcattgctgtgtggttatcttgttatcctacacccaaacatatatatgagttatactattaggtgaagtaatattacaagcaaagtggattaaagaccaaaccatgcgggcaaaacggcaattaaaaagcaaatgtttaatagtttcctcttcgtgatagaaagaacaagtctttcttcctctctaattcatttttatcatgatatcttttgttaaaactgctaccggacataagtaccataaaaagatattaatctttaggggcctttgatcttctaaattcttttccttcttttgggaacactggtctgcaccaatgcaagatcaagagatttaaccgagaatctcccatcattggttagattccatttaaactcgttggtcgtgagataatataatattagcgatacatgagagaagatgattcaatgctactaacttagagcgagtaaggttcctatgccaagaaaaaattagacgactagtatgaaaaaattttgtaatagacacaagggtattgttctcctatacatgcagtctatttagggagtttttatggtccatcaactagtacctccaggtactggtaccgctaggtaccaaatgaaatccaaccgttaaatcaagaggggtatgattgggaaaaaaaaagaaaggaagtagtggtggggaacattgttagtgatatgccctagaggcaatcatagtgatgattgtgtcacatactatgtttacatatttatccgacattgtttagataactccttattggttaatgaatatgtgattctttcatgagactctttatgttgtttgttactatttctaaaggattcctgatcaaatatcatatgtggaacaaatatgtttatatgatcagcacatctattaattgatgatcatgtctcatggatcatggtatagagataccaaattaataatgtgacacatgttggtgaacatggtgttgggttagaccccaccaataagccactaccaaaagcaatatgtgttgtgtcatcattgatctcattgagtattggtgttgaatccttagacctaagattatcatgattctcaacatgtgtagtagcttacttagggactgctaaaagctactccgtaattgggtagttctaaaagtagttttcgggtatgctatgaaacatgtagtgggatatgaataatcaagatgggatttgtcgcgtcccaaaacaactctaaaatacatcctcgaaattgtgccgagaataattaaaattcgtgtgaaagcctccaacaattaaaatgtgcaaatttaaaagtcaaataaggcttggaggatttttgtatatttcctaaaagcctaaaatgcgtaaataaattttagtggaattttcagagcacaaataataattgagaagaaataaacaaagttaaaaaggtttataaaaagaaaaaccctaaaagaagtccttttccccccccctttccctcttgggccggctcggcccaattccctccctctctctcctctcccccgcggcccatcggctctctccccgcgcgcgcgccgctgacaggcgggcccgcccgccaccctcgctgacgggtggggcccacccgtcatcccctacctcgcgccgcagccgccgccccgtccgtgccctagcgccgccgccgccgcggattccgccgcatcccgccgtccccgcgcgccataaagagggggaaatcactccccgtgattccctccctctttt

SEQ ID NO: 22983 - DNA, 5436 bp, Oryza sativa
ccgtaggtgggattgggtcggtactcttgtctatggctaggatgggttggaaactatgtcacagcttccgtctgtataccgtggtggtatgtggcacgtggttgcacgtgaggaagatgtgtcttgtgggtaaagatgtacacctctgatcagagtataatctattcgaatagccgcgccctcggttatgggcaagccgagcaatgtacccaagttagtgtttcaattcttaaaacctgcttaacaactaaaatgtggaatggttggcctgggttggcttgggacgagctgggacccagggtcgggttgccagttcggtctgaatcatcgtaggccttgggttaaggcaggttcgtgtgggttcacggccttgtttaataacattgtatagttccaggattgtgtttacaaaatagctttgagcaactaaatgtctttaaatgctgtttactgcaaccctaaccctttatggtataattcccttgtactcccttgcatttattctgcatttgtgggtgtgtcttgttgagtacggtggttgtactcagtcttgctcaatttttcccaagcccagaagaggagctccttgaagatgaaggctttggtgtctagctcgtgcctgccgtcaagcgcctgtggtcgtcgccctagtcttccgctgtttctcgtttgtctctgtgtgtgctgggcctttgctgcccatgtaataagttaactatttacgcttccgcttgttaaactctgaattgtatcaacttttggtgtaccttgcctcctgggacaaggattaatgcacgcacgtcaggaacgcccgttgggttatttccggtcgtgacaggatttgcctctcctatggagagatatctttgggcccctcgatgttgtagattatggaagtgcatggccatgacaaaggtgattgaggagtcaatcacaagttatataatctatcaacaggttcgagtgaatgttagaggatggcacatatctagccttgagcttaatcgatatcgtgaggcaaaggggtttatacaagtatacacaagaagttcagccgatatggtctttacgtatgcccggtgggtcaatacgttcttctaggagccgctgttgatgtgtggaccgaaatggagttttcgggttacagcctagtatatatgaacctacagggtcgcacgcttaatggggcggaataaggggattggatagagatccaatatgagcttaattcagatagggatccgaataggagttctacgggccttggaggcccgagtgatggatcttatatattcgtgaggggtgtgaccggtggagctattgcatcacgtgagaaaccctagccgtcacttccctccccgagcaaaaccatagccgcgcgcaggtgctaacacatcagcgcgtggcgttccgtccctgtacgtgtggataccggtagaggcacagctggtttgcggtgctgatcggtgtgggagtacggcgaggagaatgcacgaggaggagaaggtcgagccggtgcgatcaactacttcctctatatcgacgcgcgctacttcgcgagagttccttcgacttctcagcatcttcttccgctgcgcagcgcgtcgagtggtaacgatctatgatctaataaatgcatggttcctggtttacgcgatagaaaattttgattaatgctatcgtagcctgcgcgtatcccaacagtggtatcagagccgccttgtatagtttatgatctagatcattgcatataattgatatgcgaatgtagtagatgagatctattatgttgtatatgagttcttaggtgatcggaacatgagatgaaccgatagctgcatgggttgatgagatcaatcggtatgtgtgttggtgacttcactggaatgtctagtactcaccaaggccgagcgcgattgtgttcatcggatagtccgatgtccactggaaccgcacgccaatgagaaaatcgagccaatgagattgactcggtttcggcataatttgattacgccgttaaggttttcacatggcgaatcgtagatgagatctatgtaccccgtgttcgttgccccttagatttcgcttggggtttttatgtctatcttactatattgctgttatatatttgatatgacatggtaggatagattcccttagaaaaattaagtgtaatttatgctcttccaataattgcacctcttacggttgtgatcataagtgatgggtttgccatagcaaagtgtcactttttatcatgataaaataggatagatgtcggacatctatatgcggagattattggtttacttgacaaggttatcaaaacagttttggaccttggggtataggttgagttggacatggagatgtcaccccaacagcacaagagtcacatatgatgtgattagtaaggtgtttcttacctattttgatagttttctagctgtgatgccaaagctcactagacactaataaaatgaggatcttgactcactatgttactagagggaattttgtttcacaatacatagtgggagtatcttttgttaaattgtttaatgaaaggttaaatgtaaacatggtgctgcttttgcatacacatatttctattgtagatcatggcagctcctgcaccatccaattttaacttgcggtctattcttgagaaagagaagttgactggaacaaactttcatgtattggtatcgcaacctgagaattgttctcaggcaagagcacaaagagtttgtgcttgcacagccttttccagctgacttgcccaacaatgctcctgctactcaacatagagagcatgaaaggcgatgcaatcaataccttgatataagctgtctcatgcttgctactatgtcccctgagcttcaaaggcaatatgaggcattggatgctcatacgataatcatgggactacgtaacatgtttgaggaccaagcaagagctgagaggtttaatacctcaaagtccttgtttgcatgcaggcttgcagaaggtaatccaatgagcccacatgtgatcaaaatgattggttacaccgagagtctagataagcttggctttccccttagccgagagttggctactgatttgattctccagtcgctccctcccagctttgagccattcataatgtatttcagcatgaacaatctgaataggaccttcgcagaattgcatgggatgataaagacttgtcacgtcctgataaattcatcccgaaataaaaatcattttctaaaaggaataatagaattaattaaaatttgaaaagaaattggcaaacactaaaatacgtacaagaaaatttcgaatgtggcccggagaatttttgttaaattctccttggtctaaaatgagccctcaaattttacttgaattttcagagcaccggaaatatttattaagcaacaacaactatgatcaaagtttattaaaaagaaaacttaaaaataatcctccttcctcctttgggccaagcccagcccaaagtctccctctcctccctctctttccctcctctcccgggcctctcctcctcctcccggcccacctcttccctccccctcccggcccagctccctcccctcccctctctctcccaggcctgcctctccctcctctcctcatgggccgcctctgggcccaagctgagcggcgccctcccgcccatgccgcgcacgtgcgtgtgctgaccgcgtggggcccacgcgccggtcgtcttcctcctcccgcacagcctcttctctctcccgtgcaaacctagcgccgttcctcctccaaattcgccccaatcaagccggctctttccaaattaattggggggttttaatccccattgattcctcttcaattccccccaatttcccccttgaatcgtgcccccaatcgccgggaacggacgcgccaaccccggccaccttccatggccgccgggcgcctattccgccgccgttccccgcctctcccgtggccggctccctctcctcccctataaaatggaatccccatcctccgttctatcgttttagccccctcccgcatattcccgtggcctcaccaccccttcccgccgtcgcccttctctttcccccgcgccggccacctccagccgcctctccctcctcgccctagcgccgtccggccgtgccgtcgccttccccggcgtcgcagccgcgtcctcttccccggcgctgcctccgatccgtggggaaatcaccggagacgcgcccccgccggcgtccagtggcgtcgccgccactacaccgtctccggccggctgctgttcatcgccggtacgccgaccgacgtcgccgtctcctccgtcgacgtcgcagcatcgtcctctcctccggctgctcctcggtttcgccggaacaccgccgccgccgcgccggcccctcctttctcctcgtcgacgtcgccttcggtagccccttccgccgtgcccgtgcgccggccgacgttgccatctccacctccggcatcacagcggcaaggtcgtcctcggcctcgcctcccctccacccgaacaccgccggtgtccgtcgtcgtcttcaccgttcatcctcgccggctcgtcgtctcgcggcgccgcctccgtcgtcggcatcgcagcggcgtgttccacgccgtcctcgtctccgtgcagccgctgccggctgccatcgtcgtctcctcgccagccccggtcatcgtcgtcgtcatcctctcgtcgttcccagtttcgctcgtcgtggcgttggtccctccgtcaagccgatcgcgttcgccgcccgtggttcatcaagcgagccgctgcagccccgtcgtcttcgtcctcacctccgcgtcgccaagcgttgcgccggccgcgtctcgccttcgtccaaggatcgccgccgaagtcgctccctcgccgttcgcctccgtcgtctccgagccatctccgccgcgcccgttcaccgtcgtcgttcccacgcctcgtcgcgtggtggtaaggatccgtcctctcgctgccccgtcctagtcctttcggtgtcgcccgtgcccgttgtgcggttgtcgaccccggtacccgtgtactggtgtcggtagtcgttcgcttgtgcgtgtagtgtccgtgttagtgtgtgtcgcgaccgggagaattgccttttcccgaacgctagtgtattaatccccgtcccaggaaaagccggggtacaccacacaaacatgatataagagacacatctttatatatcgataatatttacattataacaaaggcgcttcaggcctggcgatcaaaaataaacagcagcggactagcgggcctacggctccatcttcacaggcgctcaactggggtataagccaagactccacctaagacttcttctccaaaacttctcttactgaggggggagaaagatagagcaagaatgagtacaaccacag

SEQ ID NO: 22984 - DNA, 7801 bp, Oryza sativa
ttaaatgctgctttctgcaaaacttaacccctatattattaccccttgtacccccttgcattaatcatgcatccccggtgtggcttgctgagtactgtggttgtactcattcttgctcaatctttcccctcttcagtaagagaagctttggagaagatgtcttaggtggagtcctggcttataccccagttgagcgcctgtgaagatggagccgtaggcccgctagtccgctgctgtttatttttgtttgtcaggcctgaagtgcctttgtaataatgtaaatattatcgatataataaagatgtgtcttttatatcatgtttgtgtggtgtaccccggcttttcctgggacggggattaatacactagcgttcgggaaaatgaaattttcccggtcgcgacaaggaggaaggagggttatttttaggttttttctttttaataaactttgataattgtttttgtcgcttaataattatttccggtgctctgaaaattcaagtaaaatttgagggctccttttaggccaaggagaatttaacaaaaattctccgggccacattcgaatttttcttgtacgtatttttagtgtttgccaatttcttttcgaattttaattaattctattattccttttagagaatgatttttaattcgggatgaatttatcaggacgtgacaaatccaccccccttacaagaatctcgtccccgagatttgaggaggctagcaagaagataggttgggcggtcctctcttcttgtctgacttctcccgctccgtcttttataacaaacttgcctagcacaacttctccactctggactgctcggctcgatctcctgttgcagatggaatcttctcttcacctgacttgtccctggttgaacctttagctgacttcgactgggttgcggcacttgaagatggggcctcagttctagaacttcgcatagttcatatctttggagtcaacctcatacaagttacccacttcatgtcatgcgtcgagatcagctcgtcattactaggataccatgtttgtcatcataagaatatcatgcttgtcatttgcttctaacttgctaccaactgcctcatattaactttcctggtctccgggtgctagctacttctgttatttgacgccagggtcgataactttgcctttaaattatgtttctcaacagaaccaacttatcccacttgacatgctttgacgtcttcccaaatggctttactgctggacttcttattgtttgatcgttatcctgccaaatctgaagcttcgttgttaggtgtgattttaatctgacctctatagactatcttcgaacatatcacttggttcataactgggaatagctcccacgaacagacaactcggattcaccttcttttcattcggtttacttcccactattctcttcatgttgtcatcatttagcattcaaagtattcctttacacattcaaccctgacgtattcttttcagatttctcttatcaatcacctttcgacctacttctttgcctgatagtaaacacctttgctggtatcttctatcaataacctcttgaactttgtcaaccaagtaatcttcactccgagagttgtggatgcttctggtgacgatgtggtcctttggtctgctgcctttcagtgaaaccttgaagtgttttgccaaaagctgtactgactgtctttgtctttgatccgaaaaagacacatctgaaactcttagtccaaacaaatgtctctttggttaaacgcttgattttcttttccatcatcaggttggttattaactcgaggttagaacatagtccctctgaaatgagaccctaggtttccttcgacagtaaacaattatacacctaatcccatatcggcatcttctgaaagagtcctcatagaacttgtttttattacacatttctcccatattacatgaatacgaggcactgccttaaacaaaaagggaaggtgcttaacatcggtacattgcatcctcaacatgaatcttccataaacataacaaactcattgtttataatcatgaatatatttatttattacatgattgctgcaaactcccgattacagtgataagtagcgaactgaaaatcacaaacatggatacatagctggcattgttctagtgactgcatccttgattggttctgtgatgatgtgataggactgcatattgctatcattcacaggagaagcttccttctgattgctggttgaagcgaataacggtcttctgcttggtatcgccctcctgaggttgattgcccttcgctcggcctggagtaggtcggggagagacacaacttcttccatcgacgacaattctttgctgaggctgtcggtgcagagaatggttggtgctgaaggtattattgctatgattcattgcagagtcaggtgcagcaggaggagcattggtgctggggatgatatcgtcgatgttgctgttggagctgactagctgatgagacaatcgtagggttgttcgttggatttctgcggtcttggtcaacaacacactgagttggcaatccttgggtacatggtttgtaccttcgcacagaaaacatgtgaccttgcgggtgggacactcccctggtggatggtcttcttcacaatgagtgcagagtgtgagacacatgctagcaacgtgtccaatttccccgcaacgggtgcatgcctttgattccatctcttcctcgccgagatgtcggggagactcatcttcatcatccgaggagacttgatctgacccttcactatcagatactctgccaccatgacttaggaggtgctgggtcaactgtcgtgcacctcggaaagtatttcctctttgacgtctaggaatagttatccctgctggaggccattcggtgctggtaatagtcatcttacgtacttcttcttcagttcgcatcggtgcttttctcttctgattcttactcttcttgcctttggcttgcttagtatgtgaccccacgtggtacgagaggctaggaggaaagcatttcccgggattcaatggattctctccgttgagctctctactttgcacactaggctgcaagcttgacttggtgtgaggaggctggtttagcgatgtctgccctgctaaaccaagggaaggggcttctttgacatatacccatggacaattcagggcatagtgtccttgctctctacaatcatgacaaaaggggacctgctcttctggcattggaagctcattgacctgggtggcaaaggctcgatcaaacacatactgattttggtcttgacttccaaccaatggtagctgtgaactaagcagcatgcttggaatggaccaagggtgtgccctggttaactctcttgaggccagtggtggattgagttggaaacttaagttacttgaggcatacccgctgacattctttcctttttctctgttatacatctgttacagggattgaggtgagagaggaaacaagccaggaaagaatagaccagaactagggaccagaccttaaaagaactaactcttcttattgatgtattgtttgtttcacttattctgcaagttgattaagcaaacaacctaacatggttacatcacaacccaccgatgcaaaccacgcgctacacacacaagcaaggaacacacgactaacaacactaccctacagggtggcttaggttctgcgacgggttctccaagatcttcactgcttcctccacttcgctagcagaccctgcggtcttccggagcttcggcagacaattgacgacatcttcttctccgcaaagctgaccatctagtactagttgaaatttgaagaaggaagaaagagtaaatattttgcaaatagcacaggggaaaggaggaaaaagggactttcggaaatagtttcatttataaaatatgtccttaggttttatccacttggcttatcctacagtcgagatggctctgataccagcttgtcgcgaccgggagaattgccttttcccgaacgctagtgtattaatccccgtcccaggaaaagccggggtacaccacacaaacatgatataaaagacacatctttattatatcgataatatttacattattacaaaggcgcttcaggcctggcgatcaaaaataaacagcagcggactagcgggcctacggctccatcttcacaggcgctcaactggggtataagccaagactccacctaagacttcttctccaaaacttctcttactgaggggggagaaagatagagcaagaatgagtacaaccacagtactcagcaagccacatcggagatgcataattaatgcaagcggggggtacaaggggataataatataggggttaagttttgcagaaaacagcatttaaaagccacttagttgaccaaagccatttataaagacgatcctagcgctacacaatattattaatcaaggccgtgaaccttcacgaacctgccttaacccaaggcctacgatgattcagaccgaactggcaacccgaccctgggtcccagctcgtcccaagccaacccaggccaaccattccacattttagttgttgagcaaattttaagaattaaaacactgacttgggtacattgctcggcttgcccataaccgagggcgcggctattcgaatagattatactctgatcagaggtgtacatctttacccacaagacacatcttcctcacgtgcaaccacgtgccacataccaccacggtatacagacggaagacgtgacatagtttccaacccatcctagccatagacaagagtaccgacccaaccccacctacggccggaacccccgggacaggtaggcaggactgagccgctagcagcaggacaccggccctgtgccatgacatctcgactaccgggccgcagctcgtgtagccttcatttgccctggagaatgtccatcgacccccgacttcatccatctccaatccgtgtacttttgtttataaccagactgagccacaaactaagccttacccactagacatgtggaagtacggtagtgctttgcaacagaggcccgagcttaatccttatagtggccggggtgctacttcccacaactggcatgcacccaaaccccaccggaaaacaggttttaggggttttgaaagaggaagagaggtgtatgtccaattccaccataatccaacaattccatagtgtccaggtgatatgagtattcccaaggtctagagttataaaaccacctaatgttgcctaattaatccgcgaagcatctacctaaattcatactagtggaaccatgaatagagtacccactagttggggttttgcttaatctagggtgaacaaggtaataatatcaataacaataatattaaggttataacaaaggtaaataggcatggctaaataaaacagtgatcacgcgggaatttaaataaagcgataatgcaataatttaaatcaaaataattttatgaactgggattcaacatgttcaaggatgatgtgacttgccttgcttagagagaacggccttccgaaccttcggcgacgaccgcgaaccacgcttcgggaacctccagaacgacgaagctacgcgaggcacacaagcaaagctacaagcctataaagaagcaataacaatacataaaaaggaagcacacggttctttaggttataacaaacattaagagacttgaacgggtcgattcggagttcgtatgaccaagatatgatcatccgaagtttaatgctgttatatggggatttgcggattattataattaagctttgcaactataaaacatgtgcaagcgctagcctggaaaagacaggaaggctgcgccgttgacatgcggaccccacatgtcaacctaaaggaccgcggtagaccgggtacacagagacggtccacgggtcgacggaagcggaccccgtgtgtcaaccgaggcgagtggccgacaaacggactccactagacaccacacggcctgcacacgtggaaaccacgcggctaccgagcgggcacactaacgcggacactacacggtcaccacccgcacgcgtgaacgactaccgacaccggtacacggctaccggggccgacaaccgcacaacgagcacgggcgacaccgaaaggacgaggacggggcagcgagggagagggatccttaccaccacgcgacgaggcgtggggacgacaacgacgaacgggcgcggcggagacagacgggcgcaacggagacgaacagcgaggggacggcttcggcggcgatccttggacgaaggcgagacgcggccggcacgaggcttgacgacgcggagccgaggacgaagacgaggacggggctgcagcggctcgcttgacgaacgcggacgacggacgagaacggctcgacggagggacgaacgccacgacgaccgggaacgacgagaggacgacgacgacgacgacgaccgggaccggcgaggaggcgacgaggacagccggcagcggctgcacggggacgaggacggcgtggaacacgccgcagcgatgatgatgacggaggcggcgccgcgagacgatgagccgggcgaccgacgggacgtcgatcggcgaggacgaacggtgacgaggaaacgatgatggcaggcagcagcggctgagcggaggaggggacggcgtggaacgcgctgctgcgatgttggagaaggtggtggtgcaacggggcgactagccgacgaggaggaatgggtggttggcgcggcgccggcgttccggcgaacttcgggcgaggaggaggtgatgccggggatgagggcggcgtcgcggaagccgagggaggtggtggcgacgtcggccggcgcacgggaaacgcgacagtggcggccggaggtggaacagtggcggcaacgccactgttttgccggcgaggacgcgtctccggtgcttcccccgcgaaacggagggctgaccgagggagaggaggtggctgcgaggccgagggagaagacggcgcggccggacggcgctccggtgaggagggagaggcggctggaggcggccggcgcggaggaaagagaagggcgacggcgggaacgcgcctccggcggtcaccgcgcgaaacggagggcaggccggggtggaggaggtggcggcgacgctggaggaggcgacggcgcggccggccggcgcacggtcgaggcggcacaggcggctggaggcggccggcggcgtgggagagagaggagggcggcggggagagggctagggaccacggggaggctcgggatggggttaaaacgatagaacggagtgaggggatcccattttatagggtgggggcgggagccgggctcgggagagggcggaacggcggcgggaataacggccgacggccatggaaagcggccggacttggcgcgtccgttcctggggattgaaggaacgaatcaagggggaatttgggggcaattgaagaggattcaatggggattaaaaccccccaattaattttggaattggccaattgaatcaagcggatttggaggagggagcgagctatggttcgcacgggagagagagaagccgggcgggaggaagaccacgcgcctggcgcgtgggccccacgcggtcgggcgcgcggtcagcgcgcggcaacggcgcgcacgcgcgcgcacgtgcgcggcacgggcgggagggcgcccctcgggttgggccgagcggccggaccaggaggagaggagggggaggtggcctggcccgggcacgccgggagggggggg

SEQ ID NO: 22985 - DNA, 6994 bp, Oryza sativa
tgttgagatgcaatggtacaatgctaagcacctttctttttaggcaatgcttagtattcatgtaataagggagaaatgtgtaatacaggcaagttctatgaggattcttttggaagatgcggatatgtgattatgtgtataattgcttactgataaaggagacctagggtctcattccagaggaactatgttctaacctcgagttaataaccaacctgatgatggaaatgaaaatcaagcgattaaccaaagagacatttgtttggacaagagtttcagatgtgtctttttcggatgtcagggttgaatgtgtaaaggaatactttgaatgctaaataatgacaacatgaagggaatagtgggaagtaaactgaatgtaaagaaagtgaatccgagttgcctgttcgtgggaactattcccagttatgaaccaagtgaaatgttcgaagatagtctatagaggtcagattaaaattgcatctaacaacaaagcttcagatttggcaggaaaacgatcagacaataacaagttcagcagtaaagtcatttaggaagacgtcaaagcatgtcaagtgggataagttggttctgttgagaaacataattcaaaggcaaagttatcgaccctcgcatcgaatagcagaagtagctagcacccggagaccaggaaaactaatatgaggcagtttgtggcaagatagaagtaaatgacaagcatgatattcttatgatgacgaacatggtatcctagtaatgaccagctagtgttgacgcatgacatgaagtggtaacttgtatgaggttgacgccaaagatatgaactatgagaagttctggatctgaagccccatcatcaagtgccacaacccagtcgaagtcagctaaaggttcaaccagggacaagtcgggtgaagagaagattctatccgcaacaggagatcgagacaagcagtacagagtggagaagttttgctaggcaagtttgttataaaagacgcgatggaagaagtcagacaagaagagaagaccgcccaacctatcttcatgctagcctcctcgaatctcggggacgagattcttgtaaggggggtggatttgtcacgtcctgataaattcatcccgaaataaaaatcattttctaaaaggaataatagaattaattaaaattcgaaaagaaattggcaaacactaaaatacgtgcaagaaaaattcgaatgtggcccggagaatttttgttaaattctccttggtctaaaaagagccctcaaattttacttgaattttcagagcaccggaaataattattaaacaacaaaaacaattatcaaagtttaataaaaagaaaaatctaaaaataatcctccttttcttttgggccaattttggcccaaagtccttcctctctcccctcggcccgcggccgaagtctccctttcctccctctctttctctccctctccttctctccctcctcttgggccccccttcccctcggcccagctccctcccccctctctctcccgggctgcctcttccccccccctcccctcccggcctgcccggcccaggccgcctccccctcctctcctcctgggccggccgcccggcccaacccgagcggcgccctcccgcccgtgccgcgcacgtgcgcgcgcctgcgcgccgttgccgcgcgctgagcgcgcgccccgcgtgggacccgcctgccaggccggtcatcttcctcctcccgcacggccctctctctctcccgtgaaaaccctacttagttcctccctcgaatccgcgcgatttaagcgttggattccaaaattaattggggggttttaatccccattgaatcctcttcaattgcccccaaattcccccttgattcgtgccttcaatcgtcgggaacgccgcgccttcctcggctgcctcccatggccgccggccgccattcccgtcgccgttccgccccctcccgagcccggctcccgcccccatcctataaaatggaaccccctctttgcgttctattgttttagccctttctcgagctcccccgcggccacagcacccctccccgccgtcgccctctctctcccgtgccgctggacgcctccagccgcccctaccgccttgcctgagcgccgcccggccgtgccgtcgccttcctcggcctcgcagccacctcctctccctcggtcagccctctgtttcgcggggaaagcaccggagacgcgtcctcgccggcaaaacagtggcgttgccgccactgttccacctccggccgccactgtcgcgtttcccgtgcgccggccgacgtcgccaccacctccctcggctccgcgacgccgccctcatccccggcatcacctcctcctcgcccgaagctcgccggagtggcctcctcgtcggcgtccagtacctccccgcctccggccggctcctgtacgtcgccggtacgccgatcgacgtcgccgcgttgtcctctcctccagctgctcctctgtttcgccggaacaccgtcgcccgtgctggcctctccatcctcatcgtcgccgacgtcccttcggccgcccgttcatcctcgccggctcgtcgtctcgcggtgccgcctccgtcgtcggattcgcagcggcgcgttccacgtcgtccccgtctccgtgcagctgccgccggctgccctcgtcgtctcctcgctggccccggtcgtcgtcgtcgtcgtcctcccgtcgttcccggtcgtcgtggcgttcgtccctccgtcaagccgttctcgtccgtcgtccgcgtttgtcaagtgtgccgctgcagccccgtcgtcgtcttcgtcctcgactccgcgtcgtcacgcctcgtgccggccgcgtctcgccttcgtccaaggatcgccgccgaagtcgtcccctcgccgttcgtccccgtagttcccggccgcctccgccgcgcccgttcgtcgttgtcgttcccacgcctcgtcgcgtggtggtaaggatccctccccctcgctgccctgtcctcgtcctttcggtgtcgcccgtgcccgttgtgcggttgtcggccccggtacccgtgtatcggtgtcggcagtcgttcgcttgtgcgcgtggtgaccgtgttagtgtgtccgctcggtagccgcgtggtttccacgtgtgcaacccgtgtggtgtttagtggagtccgtttgtcagccactcgcctcagttgacacacgggatccgcttccgtcgacccgtggaccgtctctgtgcactcggtctaccgcggtcctttaggttgacatgtggggtccgcatgtcaacagcgcagccttcctgtcttttctaggctagcgcttacacatgttttatagttgcaaagcttaattataataatccgcaaatctccatgtaacagcattaaacttcggatgatcatatcttggtcatacgaactctgaatcgacccgttcaagtctcctaatgtttgttataacctaaagaaccctgtgttttctttttatgtattgttattgcttctttataggcttgtagctttgcttgtgtgcttcgcgtagcttctgtcgttccggaggttcccgaagcgtggttcgtggtcgtcgccaaaggttcggaaggccgttctctctgagcaaggcaagtcacatcatccttgagcatattgaatcccagtttataaaattattttaatttaaattaatgcattatcgctttatttaaattcccgcgttatcactgttttatttagccatgcctatttacctttgttatgaccttattattattgctattgttattattaccttgttcaccctaggataaacaaaaccccaactagtgggtactctattcatggttccactagtatgaatttaggtagatgcttcgctgattaattaggcaacattaggtggttttataactttagactttgggaattctcatatcatttggacactatggaattgttggtttatggtggaattggacatacacctctcttcctctttcaaaacccctaaaacctgttttcggtggggtttgggtgcatgccagttgtgggaagtagcaccccgaccactataaggattaagctcgggcctctgttgcaaagcactaccgtacttccacatgtctagtgggtaaggcttagtttgtggctcagtctggtcataaacaaaagtacacggatggagatggatgaagtcgggggtcgatggacattctccagggcaaatgaaggctacacgagctgcggcccggtagtcgagatgtcatggcacagggttggtgtcctgctgctaggggctcagtcctgcctgcctgtcccgggggttccggccgtaggtgggattgggtcggtactcttgtctatggctaggatgggttggaaactatgtcacgtcttccgtccgtataccgtggtggtatgtggcacgtggttacacgtgaggaagatgtgtcttgtgggtaaagatgtacacctctgatcagagtataatctattcgaatagccgcgccctcggttatgggcaagccgagcaatgtacccaagtcagtgttttaattcttaaaatttgctcaacaactaaaatgtggaatggttggcctgggttggcttgggacgagctgggacccagggtcgggttgccagttcggtctgaatcatcgtaggccttgggtcaaggcaggttcgtgtgggttcacggccttggttaataatactgtgtagctctaggatcgtctttataaaatggctttgggcaactaagtgacttttaaatgctgtttactgcaaaacttaacccctatattattaccccttgtactcccttgcattaattatgcatctccggtgtggcttgctgagtactgtggttgtactcattcttgctcaatctttcccctcttcagtaagagaatgtttggagaagatgtcttgggtggagtcctggcttataccccagttgagcgcctgtgaagatggagccgtaggcccgctagtccgctgctgtttatttttgattgtcaggccttaagtgcctttgtaataatgtaaatattatcgatataataaagatgtgtcttttatatcatgtttgtgtggtgtaccccggcttttcctgggacggggattaatacactagcgttcgggaaaatgaaattttcccggtcgcgacaagatggtatcagagccatctcgactgtaggataagccaagtggataaaacctaaggacatattttataaataaaactatttgtgaaagtccctttttcctcctttcccctgtgctatttgcaaaatgtttattctcttttcttcctccttcggattttcaactagtactagatggtcaggtcagtgaagaagaagacatcgtcagttgtctgccgaagctccagaagactgcaggatccgctagcgaagtggaggaagcagtgaagccagctatgaagcaggagtgaagatcttgggaacccgtcgcagaacctaagccaccctatagggtagtgttgttagtcgcgtgttccttgcttgtgtgtgtagcgcgtggtttgcatcggggggttgtgatgtaaccatgctaggttgtttgcttaatcaacttgcagaataagtgaaacaaacagcacatcaacaagaagagttagttcctttaaggtcctatccctagttctggtctattctttcctggcttgtttcctctctcacctgaatccctgtaacagatgtttaacagagaaaaaggaaagaatgtcagcgggtatacctcaagtaactcaagttttcaactcaatccaccactggcccccagagagttaacaagggcacacccttggtccattccgagcatgctgtttagttcacagctaccattggttggaagtcaagaccaaaatcagtatgtgtttgatcgagcctttgccacccaagtcaatgagcttccaatgccagaagagcaggtccccttttgtcatgattgtagagagcaaggacactatgccctgaattgtccatgggtatatgtcaaagaagccccttccctggtttagcagggcagacatcgctaaaccagcctcctcacaccaagtcaagcttgcagcctagtgtgcaaagtagagagctcaacggagagaatccattgaatcccgggaaatgctttcctcctagcctctcgtaccacgtggggtcacatactaagcaagccaaaggcaagaagagtaagaatcagaagagaaaagcaccgatgcgaactgaagaagaagtacgtaagatgactattaccagcaccgaatggcctccagcagggataactattcctagacgtcaaagaggaaatactttccgaggtgcacgacagttgacccagcacctcttaagccatggtggcagagtatctgatagtgaagggtcagatcaagtctcctcggatgatgaagatgagtctccccgacatctcggcgaggaagagatggaatcaaaggcatgcacccgttgcggggaaattgaacacgttgctagcgtgtgtctcacactctgcactcattgtgaagaagaccatccaccaggggagtgtcccacccgcaaggtcacatgttttctgtgcgaaggtacaaaccatgtgcccaaggattgccaactcagtgtgttgttgaccaagaccgcagaaatccaacgaacaaccctacgattgtctcatcagctagtcagctccaacagcaacatcgacgatatcatccacagcaccaatgctcctctcgctgcacctgactctgcagtaagtcatagcgataataccttcagcaccaaccattctctgcaccgaccgcctcagcaaagaattgtcatcgatggaagaagttgtgtctctccccgacctactccaggccgagccaaggacaatcaacctccggagggcgataccaagcagaagaccgttattcgcctcaaccagcaatcagaaggaaacttctcctgtgaatgatagcaatatgcagtcctat

SEQ ID NO: 22986 - DNA, 10395 bp, Oryza sativa
tgtagccttcatttgccctggagaatgtccatcgacccccgacttcatccacctccatccgtgtacttttgtttataaccagactgagccacaaactaagccttacccactagacatgtggaagtacggtaatgctttgcaacagaggcccgaagaccggtccttatatggccgaggtgctactatcaaaaccatgcaccccgagcccagcctaaaaccattttggggattttgaatagaaggagcggtgtgaagccaattccacagtaaccaaaccattccatagtgtccaagtgatatgaatatttcccaaagtctatagttgaaaaaccacctaatgttacctaattaaattgcgaagcatctacctaaaatcatactagggataccataagtagagtgtccactagttgaggttttgtttattctaggttgaacaaggtaataataacaataacaataataataaggtcataacaaaggtaaataggcatggctaaataaaacagtgataacgcgggaatttaaataaagcgataatgcaataatttaaatcaacataattttataaactgggattcaatatgctcaaagatgatgtgacttgccttgctcgctttcccaaacgtcggcttcaacttccacgaagagcgggtcttccgaagctgcagcgtctacacgaccaacggaaaagaaaaggcttttactctaataaactccacataacagcagaaacaaagcataaaaatgggttcttgacttcttaaggaaaaattagagacttgaacggtccaattccgagttcaaatggccaagttatggccatttgaagtttatatgctctttaaatggatatttgcgaatttcttcatttaaattttaattttaaatcggatttattgcgtcagccgaggggaggggcgcgcggaccgggtccacgggagtggggcccacgcggcagcctcacggtccacggtggaccgggtgtacacggcttacgccggccggcgccgtgggtcccacgcgtcagccgcacctgagggcgcgggcggctgacggccgggccccacatggcagccgcggggcgcgcccgaaggcggcctcgccggcacagccgactggaggcggcgcgcccgcgcccctatggtcgccggcggcggccataggcacggcggagcggcggccgggagaggggagggaagggggaaacgaaatgggcggtccacggttcaccccgggtcgacggcgacgacgggaacggcgaccggagcggaggaaggcggcggcgcggctcgggtcgacgaggacggcggtgttccggcggtcggcgggcgaaacggaggggtggacgaggtcggcgaggacgcggcgaagccgaagaaggcgacgccgaagcaggagaaggtccggggcgacgacggcggcggaccggagctcggcggtgacggcggagagagggagcgacggcgcgagctcgattccggcggagagagagagcggcgagaggcggaaacggcggagggaggcacggggagtgtttatatagggttgggagggggagagagcggccggatgagggggaatcggccgcggaagatccggccgccattgatgcgctggcgaggtttagggggaaatgattccgagcgaatccgagggagagagagagggagaaatggggggaaagggggagggaatcacggggagtgatttccccctctttattgcgcgcgtggacggcgggaggcggcgggattcgtggcgacggcggcgctagggcacgggcgaggcggcgggagcggcgcgaggtaggggatgacgggtgggccccacccgtcagcgagggtggcgggcgggcccgcccgtcagcggcgcgcgcgcggggaggaggctgattgggccgcgggggagaggagagagagggagagggaggtgggccgagccggcccaagaagggaaggggggaaaaaaagactttttagggtttttctttttataaactcattttaactttgtttatttctttttaattattatttgtgctctgaaaattccactaaaatttatttacgcattttaggcttttaggaaatatacaaaaatcctccaagccttatttgacttttaacttagcacattttaattgttggaggctttcacaaggattttacttattctatgcataatttcgaggatgtattttagagtcgttttgggacgcgacatcaccgcccgcaagagtacctccaggcccgagcttgttcgtcagtccctggcgtggacatgcttcatggagacccctcgcgccgagcccacgcccttggttcctcaggaggagggagcctctggcgttggtagcacggaggatgcgctgctgctcaccttccgccctggcccgtcgcagaagtagacgagcagttagtaggcttgcgcgtgtattcttctcgtttgtttttctggttgagtcatgtggggcatggttataccggtgtgtggtataactgtgtcgaagcctgtctttattttatttgcttaagcaacttgaaccttaatgaaccaatttaatagcagaaataaattcaagaattatggtagtcgtgggtggttagttttaatagtcagctctctctgtttgctggttctgtgtggtattttcagatggtgacaaccaggagaagttctgctaccggtgaaggcagtcaccccgaaggcagcaaccacaacaaccaaggcagcccacctccacctcctcccccgcctccaccaccaccaccagacaccaactctatcctcacccaaatcctcgcccaacaggccaacatgatggctgctttcctccatcacatccaaaatccgccacagcataatgctccacctccaccaccacccccgcaacattctaaactcgccgagttcctccgcatccgtccgcctaccttctctagctccaataaccccgtggatgccttggattggttgcatgccgtggggaaaaagttggataccatgcagtgcaacgatgaggagaaagtcatcttcgccgcccatcaactgcaggggcccgcatctctatggtgggaccacttccaggctacgcagccagaaggacagcctattacttgggcccgcttcaccgccgctttccggaggacccatgtgcccgccggagtcatggcccttaagaaaagggaattccgggagttgaagcaaggcaacctctccgtgatggagtatttgcatgagtttaacaacttggcccgatatgccccggaggatgttcgggaagatgaggagaagcaggagaagttcttggcaggaatggaccctgagctgtccgtgcgtctggtctccggggattatccggatttccagcgtctggtggagaagagcatccgcctggaagccaagcacaaggaactggagtagcacaagcgtcgcctggcgaatttccgcaaccaacagggggctaaccaaagggtccgctataccaatccctacccagggggatcctcctcgcagcagcagcagcaaccatgctccgtgccccgacctcaattcgtggtgcgcgtcccacagctgcagcagcagcagaatcagcaagggacccgtgcgccccgtcctcctgcgcccgttgtgcagcctggtcaaggccgcagagacgctcaaggttagaaacgtttgtgcttcaattgcttcgagcccgggcactttgcggttaaatgcccaaagctgaggcgccagcaaggccaaccgcctccccgccccaacaacggtggtaaggatgtcattcggggtcgtgtgaaccacgtgactgccgaggatgtgctgacaactccagatgtcatcgtgggtacgttcctcattcattctattcctgctaccattttgttcgactctggagcttcccactcgtttatatctgtgccattcgtggggagaaatcagttgggggtagaaaggcttaggaaccctctgctcatcaccacccttggcgggttatgacagcaaagtactatagccctgccgttcctatagaaatccagagaatcccttttccctcggatttgattcttctggacaccaagaacttggatgtgatccttgggatgaattggttggctcaattccaaggagtagtggattgcgcaagacgcactatcactctgtaccgagggccggaacaactggtggttttctttgcacccccaacctctgtcggcagttcagaacttcatcagataggactgtcggaaatccccatcgtcagagagttcggagatgtgtttccggaagaactacccagtatgccacccaagcgagagattgagttccggatagatctcgctccacgaaccactcctctgtacaagcgaccctaccgtatgacagcaaatgaactggccgaagtcaagagacagttggaagagttgaaagagaagggatatatatggccgagcacttccccctggggtgctcctgtgatttttgtggagaagaaagacaagacaaagaggatgtgcgttgactacagagctcttaatgaagttactatcaaaaacaaataccctcttctccaaatcgatgatctgttcaatcagcttaaaggtgccactgtcttttctaaaatcgatcttcgttccggatatcaccaattgcgtattcgtgaagaagatatcccgaagaccgcattcaccacgcgttacggactgtatgaattcacgatgatgtcgttcggtctgaccaatgctcctgccttcttcatgaacttaatgaacaaagtgttcatggaatacttggataagtttgttgtggttttcattgacgacattctggtgtactcacaatcagaggaagaccatcagcagcatctccgtctggtgttgggaaagttgcgggaacaccaattgtatgccaagtttagcaagtgtgagttctagttgtccgaagtcaagttcttagggcacgtgatatctgctaaaggagttgctgtggaccccgaaacagtgaccgccgtcactgattggaagccacccaagacaatcactcgagtccgcagctttttgggtttggccgggtactaccgaagattcatcgagaatttctccaaaattgccagacccatgacgcagttgctgaagaaggaagaaaaatttgtgtggagcccgcaatgcgagaaggcgttccaaactctcaaggaaaaactagggtcctcgccagttttaatcttaccggatactcgcaaggacttcctggtgtactgtgacgcttcgcgccaaggattggggtacgtattaatgcaagaaagtcatgtggtagcctatgcctcacgccagctacggccccatgaaggcaactaccctacccatgatttggagttggccgctgtggttcatgctctaaagatctggcggcactatctcattgggaatcgctgtgaaatatatactgatcataagagtttgaaatacatcttcactcagtcggatctgaatcttcggcagaggagatggttagaactcattaaggattatgatgtgggaatccactatcaccctggtaaggccaacgtggtcgccaacgctttaagtcggaaaagccgttgcaacactcttggcgtccgtggcattccaccggaacttaatcaacagatggaagccctgaacctaagcatagttggtcgtggattcttggctacgctggaagccaagcctaccttgctcgatcaaatccgtgaggctcagaagaatgatccagatatgcatggactcctcaagaatatgaaacagggtaaagccgctggtttcacagaggatgaacacgaaaccctatggaacggaaatcgggtatgcgttccagacgatagagaacttaaacagttgatacttcaggaagctcacgaaagtccttattccatccaccctggcagtacgaagatgtacttggacttgaaagagaaatactggtgggttagtatgaagcgggaaattgcagagttcgtggccctttgtgatgtgtgccagtgtgtcaaggcagagcaccaacgaccagccggacttcttgtcacacccagaaattctcgaaccagaatttctaagctgaatgtgcattaaatccctgtccaggaccagccagggtacacaaacgacaattgttgacatacagacccacgtcttacaaaaatataaaagattacaaatgcagcgggaaagataaaagcgagctaaaccgggaagcttgacttcagcagcgggcgactccactccacaggcaaaccttgacgacagcgacgaaaccaacctctctgagatggctccaactgagaagaacttcaactttggtgtgggggaaaagagagcaagactgagtactaccccctgtactcagcaagtcataccggaagaggaggtatgatgcaggatataaccaaaggaagctatgggttcttttgcataaagcaggcatttcaaagcagtagttgaaagcaataaaacagctatagtaattaatcaatattaaccaatcactgtccaacgctacaccacgttgcaacaggcccaaccaaccacctgaactacacaagttcattaagttaaactaggggtgagactaatcacggtgaatctggttgatcgcccataaccgcgggcacggctattcgaatagttttactctggccagaggtgtacaactgtacccacaagacacgattccacacatgtcgccatgccccgaagtatcaccatgatactgcaaagggggaaatcgtgacaagacccttcacataaccctcccctaaccatccacaccacgctaaggtttcacccccacccctcaaaaggcagtgggcggtcccctcttgcgccgcggtgaatccggcagctggacaaccgaacacctcggccgacccaactccatcacgcccaccctcgccaccggtgcctaggaaagggtcgagctatacttcagatcaagcagttacccactcccgcttgtggtaagcacggtaagtctcccaggtttcccgtgaaccggtccttaactgccatgggtgcgaccagcaaaaccatgcactcacagcccgccattcagaatattttaattaactgacacccttgcggtggcaccaatctaaagctatgccaatagtcagagtctatgtaataatgtgatccccatttgtgtactagttgaactaagcatggctaagcatttcctaagccaacatctagtcattttgatacccaagttatcaatggcataagataaccaatatgtggctgaggaataggacccatcccacattacattgtaaaagaatgcaacatttaatagaaatgcgggatattggtaaattgggtacaatatgatcaaacgtattgcatgacttgccttgctctcaaactgatgagacctcagcaacgtcttcgagaaactgcggatcaacgaaacggccgaaacctacgcgacaaacaaagcacacaagcaaaacatgctataagactactgaaacaggaaacaaaaccatttttaatggattctttgcatttttcttgatttactgagacttgaatggacttaaacggagctcggatgaattacttatgaattttagaagataaactgtgtttttactaataaagaaaaagtccttaattaattattgcgcaataatacccggggctgacgtcagcgaggggggcggcgtcgacaggcggagcccgcatgtcagcggcacaaggggagagggagggggcgccggcatgtggaccccacgggcaatggctcaagggggaagacggggtggcgcccggttggctcggctcggcttcaaagccgaccggcgaccatggcgaccggcggcggcgcgcgagcgccggtaacggcaagcgacggcgcgggaggcggcggtggacggcgcacaggccggcggcggcggccgaaggcgatggcgagcgcagggagcggcagcgcgtgtgggacagagggaaggagggaggagaggagctcctcaccgtgagcacggcggccggcgcgaaggatgaagacgacggcgatgaccggtgatgcggaggcatggacgggcggcggtgacaccctaggagaagatggagaggcgttaggataggagacgacgaccacggcggcttgaattgccggccggagatggaggggagggaaaaactcaccggctcgcgaggggagaggcgctccggtgggattccggcaacgcgaggcggtggctgggaaagctcttgcggcggcgaagctaacggcggtggcgggttggcgcggcggcgactctagcagcgacggcgctagcagcgagcggcacgagcacgataggaggcacgggagagtgcagtgaatgagggaaatgggagaggaggtttgggggagcgtttttacgggcgagggaggggcggaaacagccggggatggcccctatttggctggcgatgtggggagtggagggagagagagaggtggattcgaatgcgaatccctcccatttttgggcgggcgcgagagcgggaagaggtgggggaggggcggcgacatgggcgcagggcgcgggagaggcgcaggaggcggggaaggtgggcagcgtggggagcggtggtttcggcggtggttggcgccggggcgtgggcggctagaggtaggggacgaccccgacaggtgggccccacctgtcggtgcccgaaagagaaagggagggagggaggacttcagggaggggaaatgtcacgcccggaatttctatccaaaattccaaacgcttacatgtgtgtgaaccctcgtccaggaatcagccgaggcacacaataacaaattgataatagagtacaattattactctaattaataagcgaataaaatgtcattacagaggtagatagttcctctcaatcaataaagatctaagcagcggaaaaataagataaacggcgcggacggctccactccacaggcagcttgaccaaggctacacctaaacctccacaccatcagcatcattgtagaactcttcctctgatgaatgattgcaaggtgagtatatgacatactcagcaagccacgcagcaaatatgcaagtgcacaggataacaaaggatggcataatagggtttcatttgcaaaaacagcatttaacaaacttttcagaatttaataaaacagttgagtattaattaaacaatattaatccaacgctatacaacataccctgttgtataggcccaaccattatgtacaaccatcccagctgcacagttctatctccaaaccaggaatataccattccaaaccaggagctaatcaaattattaccaattatagcatcatttactatggtgagaagggtgagactaatcacgaaagacattgttagacccgcccataaccgcgggcacggctattcgaatagttttactctgatcagaggtgtaccactgtacccacaagacacaaccccacatcatgtcgccatgtgcctcaataccaccacggtacctcggaaaggagttgtgacaataccccttgcataacacaatccaccgcagcgcaccttcctggatcataatcacccccttataaacaaggcatggactccccagcgacccccgtgggcttatctccgccacttctcagtctggtgctccgcaatgaaccatgttatacaaaagataaagccgttgcccacgctggcttgtggttggcacggttaatgtttcacaaccgaaactcgtgaaccggtccttaattgtcatgagcacgaccatcaaaaccatgtgctcacaacccaccattaccaggttttagttggcacattaattaattaaccaatcacgattgaccatcgtgaaatcattaaataatagtgagtcataagttatcccaatagtgtgctaatgtttctaagcagggctaagcaattatatctaatatctagttgaaccaatatataaagctcaactagtcaaattataataacccaaggtatcaaggaataaagtaatcaagaacaaaagggctataacaaacaataggttatttccacccaatgacattcgaaaataaatgcaatagttgaatagaaataatagctttaaataggatcaacatgctcaaagggttgtttgggatctgtgtgacttgccttgctggccttggaactcttcaaattcttctcctgcgaaaacggactctccggaaacaacggaatctaagcagaaaagagcaaaatcaccaaaacagcacataaacaagcatgaacagtacatgtggatatttttaacctgtagatctcaattttagaaaaatttagagacttgaaccaactaaatcggagctaagatgaattagttatgaatttttgaagattaaatcggatta

SEQ ID NO: 22987 - DNA, 14371 bp, Oryza sativa
ccggctcacgggagagggcgaagatgacgtcgacgatgacgtcaccaccggcggcggcggctcggcggctcggacggcgcacgctcaccggcgaacggcggcgctttggcacgaactgaggacaccaacgggtagcggacggcacggcgaactcaccggcgaccaaagcgacggcggaagaccaacggacggcgacggcgacgaggttgaaacggcggcgctcttcggcatgacgacggcgacgatgctccggcggtctccgacggtggcgaagcggcggacgaggacggcgacgacttggcgagcacgacggcggtcttcccgagcgacgacgatgactggaacggcggcggcgcacggctggagcgacggcggcgacggcggcgctagggcacacggcgctagagcgctacgggcgacgagaggcgaaggcgagggtggcggccggtagaggagacaccgggggtccttttaaaggggctaggaggcgacggcgaaggcccacggcgaccggcgacgcgaaggaaacttcgggttcgggagagaggaaagtcgatccgatttgacttcaaatctatcgatttccaaaccgatttagccgatgattccaaaagagaaaaggttgaggagatctcgaggatcatttgccctcttttgattcggccggagaaggaaaggggcggccggatttggaaaggaacggcggcggcgcgaaactagggtttcgggcggcggcggccggaggttgacgacgaccctgacaggtggggcccacctgtcagcgggagagagagaggagagcggcggcttggactgggccggctgggctgaagagagagagagagcggttttgggccgactttcggcccaaagccaaaagagactttttaaaacctttttcaatttaaattatttatgaaatgcaattccatttattaaaaatacttccttagctcaaataaatcccagaaaaatctaggaattatagaattaagcaaagtatttaatgaaattttatctggccccattttatattggaatttattaattaaaattagatcttctcttctaggctcttaaaataaattctaaaaattccatttaaacaacaatttatatattttgaattttcagggtgtgacaggaaaggaggagcgggccggcccaggaaggggcgccgagcgcggggagagagacgggccgacggcccatctagagaaaaaagaaggaaaagaaaaagaaaaagaaaaagaagaaaggatttttcctgggatttaaaattgcactttggtgatttttaattgattaaaattatttccaaggctctgaaaattccactaaaaatcttgttaatgcattggaaaatggggaactcaagaaaaattccaccacgctatttccgattattaattgcatttattaactagggatttagctctaggttaattaagataatttcttcgggcaatttatttaaccaatttttaaagcaagaaaaagggggggatacttcagggtgtgacacttctccaacctctccaactaccagaatggaaatgggatgaaattgggatggatttcatcaccggacttccaaaaacctagggcggttatgattctatatgggtagtcgtggatcgactaaccaaggtagctcggtttattcctgtgaagaccacctatggaggaaacaaactagccgaactctacttcgctaggatcgtgagtctccatggcgttcctaagaaaattgtatctgataggggaagccaattcacctctcacttctggaagaagctccaagaagagttggtacccgattaaatttcagcaccgcgtatcacccgcagacagatggacagaccgagcgtctaaatcagatcctagaagatatgctccatgcctgtgttctagattttgggaagacctgggataagagtctcctctatgccgagttctcctacaataacagctaccaagccagcatacaaatggcaccctatgaagcgttgtatggacgcaaatgccggacaccgctattgtgggaccaagttggggaaagccaagtgttcgggaccgatatcctgagagaagctgaagctaaagtcagaaccattcggcataatctaaaggtggcacagtctcggtcgaaaagctatgcagataaccgacgccgtaacctggaatttgcagtggatgactttgtgtaccttagggtcacgccattgtggggtgtacacaggttccaaacgaaagggaagctagcacctcggttcgtgggtcctttccgtatcatcgctcgacgcggagaagtcgcttaccagttggagctgcccgcatccttgggtaacgtgcatgatgtgttccatgtgtcgcaactcaagaaatgtcttcgagtgccatccgagcaggccgattcagagcaaattgaagttcgcgaagacttgacctacgtggaaaggccagtgaaaatcctggacaccatggagcgcaggaccaggaaccgggtaatccgtttttgcaaggtcgaatggagcaaccacgctgaggaagaggctacttgggaacgtgaagacgagctgaaggcagcccatcccgatctcttcgccagttcttccgaatctcggggtcgagattccgtttaaggggggtaggattgtcacgtcccaaaacgactctaaaatatatcttttaaattatgcctagaataattaaaatccttgtgaaagcctccagcaattaaaatgtgcaaagttaaaagtcaaatcaggcttagaggatttttgtatatttcctaaaagcctaaaatgtgtaaataaattttagtggaattttcagagcacaaataataattattaagaaataaacaaagttgaaaaatttttataaaaagaaaaaccctaaaagtccccctttcctcccttgggccggcccagcccatctctcctcccccctctctatctcctctccccgcggcccactcggcctctccccgcgcgcgcgccgctgacgggcgggcccgcccgccaccctcgctgacgggtggggcccacccgtcatccccgacctcccgccgcctcgcccgcgccctagcgctgccgccgccgcgaatcccgccgcctcccgccgtcccgcgtgcagtgaagtagggggaaatactcctcatgattccctctccctttccccccatttttccctccctctctcgcgttcaaacaggcggatttgcccccgcaaatcttgccggcgccattgatggcggccgacctcccgcgccggtttccttcccctccggccgctctctcccccttccaaccctatttaaaccctccccgcacctcctccgtccatttccgcctctcgccgccctttcacctcgccggattcgagctctcgactttgctctctctctacacgatcgccgcccatcgtccggccgtcgtcgtcgtcgccctggaccgcctcccacctcggggccgcctccttcggcttcgccgcatcctcgccgacctcgtccacctttccgtttcggtcgccgaccgccggagcgctgccgaccccgtcgacccgagccgcactgccgcctccctccgcttcggccgcctcctccgtcgccgccgtcgccccggggtggagccgtggaccgtcgcctcctttcccccttccctcccctctctcggccgccgctccgcggcgccggtggtcgccggcggcaaccatcgaggcgcgggggcgccgcctcccgccgaccgcgccggcttggccgccctcgggtgcgccaagtggctgccgcgtggggcccagccgtcagccgcccgcgccctcgggtgcggctgacgcgtggggcccacggcgccggccggtgcgagcccgggtgcgcccggtccaccgtggaccatgaggctgccgcgtgggccccactcccgtggacccggtccgcgcgcccctccccctcggctgacgcaataaaccctttttaaattaaaatttaaatgaagaaattcgcaaatattcatttaaagagcatgtaaacttcaaatggccataacttggccatttgaactcggaattggaccgttcaagtctctaatttttccttaagaagtcaagaacccatttttgtgctttgttcctgcttgttatatggagtttattaaagtaaaagcccttttcttttccgttggtcgtgcagacgctgcagcttcggaagatccgctcttcgtggaggttgaagccaacgtttgggaaagtgagcaaggcaagtcatatcatccttgaacatattggatcccattttataaaattattttgatttaaattattgcattatcgctttacttaaattcccgcgttatcattgttttatttagccatgcctatttacctttgttatgaacttattattattgttattgatattattaccttattcaccctagattaaacaaaaccccaactagtggacactctactcatggtacccctagtatgaatttaggtagatgcttcgctggttaattaggcaacattaggtggttttacaactctagactttgggaatattctcatcacctggacactatggaatggatggattattgtggaattggattcacacctccccctctattcaaaatcctcaaaatggttttaggctggggtcggggtgcatggttttgatagtagcacctcggccatataaggactggtcttcgggcctctgttgcaaagcactaccgtacttccacatgtctagtgggtaaggcttagtttgtggctcagtctggttataaacaaaagtacacggatggagatggacgaagtcgggggtcgatggacatctctagggcaaatgaaggctacacgagctgcggcccggtagtcgagatgtcatggcacagggccggtgtcctgctgctaggggctcagtcctgcctacctgtcccggaggttccggccgtaggtggggttgggtcggtactcttgtctatggctaggatgggttggaaactatgtcacgtcttccgtccgtataccgtggtggtatgtggcacgtggttacacgtgaggaagatgtgtcttgtgggtaaagatgtacacctctgatcagagtataatctattcgaatagccgcgccctcggttatgggcaagccgaacaatgtacccaagttagtgttttaattcttaaaaccagcataacaactaaaatatggaacggttggcctgggttggcttgggacgagctgagacccagggtcgggttgccagttcggtctgaatcatcgtaggccttgggttaaggcaggttcgtgtgggttcacggccttgattaataatcttgtatagctctaggatcgtctttataaaatatctttggacaactaagtgtcctttaaatcctgtttactacaaaccctaaccccttatattataacccccttgtactcccttgcatttattctgcacttgtgggtgtgtcttgttgagtacggtggttgtactcagtcttgctcaatttttcccaaacccagaagaggagttcctggaagatgaaggctttggtgtctagctcgtgcctgccatcaagcgcctgtggtcgtcgccctagtcttccgctgtttttcgtttgtcttcttgtgtgctgggccttcgccgcccatgtaataaattaattatttacgcttccgcttgttaaactctgaattgtatcaacttttggtgtaccttgcctcctgggacaaggaataatacacgcacgtaaggaacagccgttgggttatttccggtcgtgacaattggtatcagagcctccttgaccctaggacgagatttagatcccaagccttagcaatattttcgaaataaaaatccattcttatttgtgaaaatcctctagtctctctccgtcttgctgcttcatttatcatcaaaagctgatccctaaaatgtttatttctttttctcttttgtctttgtttgtagatggccggcagcatcaaccgtcgtggcctggacctgactggcttcattttggagctgcggggcatgtgcgttgtcctggggtatccgcatggagtggactaccagggcaagcagctcccggagcaggagggtgacgatgcagagccccacgctgcttgggaggtcactgcagtgatcctcactggctcacccgagaggacttcgttggcagtcaccgcgggtggagattctttctccgccgcttgctagagcgccgtgctcctcgccatcggcactcttcaccagcgctacctggacgagttgcagcactcgccctaccgctaccaccctcgtcgaggaggagcccgcgactacgtgtcacgtccgataaattcatcccgaaataaaaatcattctctaaaaggaataatagaattaattaaaattcgaaaagaaattggcaaacactaaaatacgtacaagaaaaattcaaatgtggcctggagaatttttgttaaattctccttggtctaaaaggagccctcaaattttagtggaattttcagagcacaaataataattaagaagaaataaacaaagttaaaatgattttataaaaagaaaaaccctaaaaagtcttctttcccccccttcccttcttgggccggctcggcccacttccctccctctctctctcctctcccccgcggcccaatcggcccctcccgcgcatgcgccgctgacgggcgggcccgcccgccaccctcgctgacgggtggggcccacctgtcatcgcctacctcgcgccgcgcccgccgccgcccgtgccctagcgccgccgccgccgccgaatccgccgcatcccgccgtccccgcgcgccataaagagggggaaatcactccccgtgattccctccctctttccccccactttcccctctctctctccctcggattcgctcggatttattcccgcaatcgtcgccggcgtcatcaatggcggccgagatttccgcgccggtttccttcctccccggccgccctctctcactcccgtccctttataatcgctccccgagcctctctcctccgtttccgccactcgccgctcgctctttccgtcggattcgtgctcgcgccgtcgcaccttctctccgccgtcgccgccgagctccggtcagccgccgtcgtcgctccggacttcctcccgactcggcgtcacctccatcggcttcgccgcgtcgtcgtcgacctcgtccgctcctccgtttcgcccgccgaccgccggagcaccgtcgtcctcgccgtcccgaaccgcgccgccgtcttcctccgctccgatcgtcgtttccgccgccctcgtcgttccggggtgagccgtggaccgctccgttcgtttccccctcccctcctctctctcgggtgccgctccgccgcgccgttggtcgccggcggcgcccatcggggtgcgggtgcgccgcctcccgtcggccgtgccggcgaggccgccttcgggcgcgccccgcggctgccaggtgggcccggccgtcagccgcccgcgcccgcgggtgcggctgacgcgtgggacccacggcgccggtcggcgtccgccgcgtgcgcccggtccaccgtggaccgagaggctgacgcgtgggccccactcccgtggacccggtccgcgcgccctctctctcggctgacgcaataaatccggtttttaattaaaatttaaatgaagaaattcgcaaatatccatttaaagagcatataaacttcaaatggccataacttggccatttgaactcggaattggaccgttcaagtctctaatttttccttaagaagtcaagaacccatttttatgctttgtttctgctgttatatggagtttattagagtaaaagccttttcttttccgttggtcgtgtagacgctgcagcttcggaagatccgctcttcgtggaggttgaagccgacgtttgggaaagcgagcaaggcaagtcacatcatccttgaacatattgaatcccagtttataaaattatgttgatttaaattattgcattatcgctttatttaaattcccgcgttatcactgttttatctagccatgcctatttacctttgttatgaccttattattattgttattgttattattacctcgttcaccctggaataaacaaaaccccaactagtggacactctactcatggtaccactagtatgattttaggtagatgcttcgcttttaattaggtaacattaggtgattttacaactctagactttgggaatattctcatcacctggacactatggaattgttggatcattgtggaattggattcacacctccccctctattcaaaatccccaaaatggttttaggctgggctcggggtgcatggttttgatggtagcacctcggccatataaggaccggtcttcgggcctctgttgcaaagcattaccgtacttccacatgtctagtgggtaaggcttagtttgtggctcagtctggttgtaaaaaaaagtacacggattagagatggacgaagtcgggggtcgatggacatctctaggacaaatgaaggctacacgggctgcggttcggtagtcgagatgtcatggcacagggccggtgtcctgctgctaggggctcagtcctgcttacctgtcccggaggttccggccgtaggtgggattgggtcggtactcttgtctatagctaggatgggttggaaactatgtcacgtctttcgtctgtataccgtggtggtatgtggcacgtggttgcacgtgagaaagatgtgtcttgtgggtaaagatgtacacctctgatcagagtataatctattcgaatagccgcgccctcggttatgggcaagccgagcaatgtacccaagttagtgttttaattcttaaaaccggcttaacaactaaaatgtggaatggttggcctgggttggcttgggacgagctggaacccagggtcgggttgccagttcggtctgaatcatcgtaggccttgggttaaggcaggttcgtgtgggttcacggccttgataaataatatggtatagttctagaatcgtatttacaaaatagctttgagcaactaagtacctttaaatgctgtttactgcaaaccctaaccctttatagtataactcctttgtactcccttgcatttattctgcacttgtgggtgtgtcttgttgagtacggtggttgtactcagtcttgctcaatttttcccgaacccagaagaggagttccttgaagatgaaggctttggtgtctagctcgtgcctgccgtcaagcgcctgtggtcgtcgccctagtcttccgctgtttttcgtttgtcttcttgtgtgctgggccttcgccgcccatgtaataaattaattatttacgcttccgcttgttaaactctgaattgtatcaactttcggtgtaccttgcctcctaggacaaggaataatacacgcacgtaaggaacgcccgttgggttatttccaggcatgacatgtgtccacactattaatttggtatctctataccatgatccataagacattatcatcaattaatacatgtgttgatcatataaacgtatttgttccacatatgatatttgatcagggatcctttagaaatagcaacacataacataaagagtctgatgaaagaatcacatattcattaaccaataatgagtttatctattttaagaaacaaagtcggataaatatgtaaacatagtgtgtgacacgatcatctctatgattgcctctagggcatatcactaacactgaaaacctttcgttttgcccacgagacggttagttatctagaatcggctccgctaaccggtttagttaacaaacccatcttgctttagcttttgctagatcgaggtggttggcgactctaggatcaccacaaggcgtttagatgctgcgatcgtgtgcttgtcaacttgtcacaaaaagttgccaacagtgatgttaacggtttattagtgaaaaacataatttataaatacaagttttatatttgtattctaagcaatttaaacgttaatgctgaataaaaaactccattaaaagtactctaaaatcaagtctaaaatattgaaatacaaatatatagatggttaaatagaaaatttcagcaactcaaatgcgaaagcaaaacaaaagatgaaagtactaaaatagaaacataagaaccgaacaaattgaatgccgcgcgtggataatctttgcaactatgcaacttgccatgacaaagagtgaaaaacgcagagattatatcagcacggaaacgagaggagacttcagaaaacggcgaaggatgctgcccggaaaaaataaactcccttaaattcctatgcatatcttgtgctccgcagaccaagtaaaaacttaattaagcacatgcatttgacgccttttcagtttccaccatatccaaatgttcgttctccacaagtcgtacgtgcacggctcaaactcaccttttttttatttcaggtcaaatgtcctggtaagttaaatagactgcatgtttaggagaacaatacccttgtgtcttttacgaaaacttttcagactagacctctatattttccttggcacaggaaccatactcgctctaagttagtagcgcggaatcatcttctctcacgcatcgctaatattatattatctcacgaccaatgagtttaaatggaatattctaaccagtgatgggaggttctcggttaaatctctttatcttgcattggtgtagaccggagtttccaatagacaaaaagaatttagaagatcaaagccctcctaaagattaagatattcttatggtacttacgtcgggcagtagttttaacaagagataatctgattaaaaagaataggaggaaacaagacttgttcttaatatcacgaagagaaaactgttaaacatttgttctttgattgccgttttgcccacgtggtttggtccttaatccactttgcttgtaatattactttacataatagtataactcgtatatatgtttgggtgtaggataagaagaaaaccacacaatttgtggcaacgaaaacaaatgttctttttcctaaattttttgtccaatctttgatcaattatatcattgtatattcctctcaaaaaaattatatcattgtgttgtattcgttaaatttcactaatctataggtattttaatcaaattatcacaaaactatatatttaacaccaaatttatcttaaacctatagatttaaggcctacatattttagagtttaaatcctagcaccattattactttggagctataaacattgtagttttgaactaaattttgggttctggtagtgagtagtgactgtatcgtcggtgtagaagcattagccaaatacttcatggcattataactcatttttataagttagatacataacgatttatgaaagcacggtatcaatttgaaaaggtcgtctatcaaatgattaaattggttccggattccaaattaaaatacttgctacgtatgcagtatgtcgttatcaaacgtgatggatctggttatccttattagcacgaggggttacttcagctttgtgggcgaagttaattagttgaccataagttttaacgtttacttgtacacataccgtgctttcatatctttatatggtacgcgtacacacataccgtctagatgacctcttttacgtatatatataagttagaggtcatatctttaattaacaagccacgcagtgttgtttcaggggagagagagagagagatgcgttcttgcggcatcagaggtgtcattcgccaccatctggcgtggctggtgctaattttgtgctcatggcaggttgcagctgctcaggctcagcaagcaccaaaaaccgatccagtcgaaggtaggcgtatagatggccaaatgggccgcccggcccggcccggcccaagcatggccgtgcctaggccaaggcttattgggccggcacggcccgaccaacacaccgggccgtcccgtgccagcccacgggcggcatccacggcccaggcacggcccaatactactcgggccgtgccgggccggcccgaaggcacgatggtccatcgtgcttcctcatagaaaaagtctatttttggtcgctcaactttgtgggctgtgtttaaatggctggaaaataagtctattttgtatacctcttatcttgggccttgccttatatgattatttaagtctattttaaatccctatattttttttatttgaccgggccgtgccgtgccggcccagcgtgccgaaggtgcggcccaagcacggcccggctgtcgggctgggctggcacgggcacaaccccagtcaggccatgccgtccttggccaaacagccgtgctttgggccgggccgtgggccacgggccatatggccatctataggtaagcgagcaattaatcatgcacgcgtacgtatatacgtatcacgcatgcatatgcatgtctctctagtttggttttcctccatgtagctagatcgcaggagttgtaatttgtggttgataacattgatatggtgtccccctcttgccgccttgaaacgaaagagttagagaaatcttatatatttatataaagttctatcctatatatttttataaagtccattcctaaccgtagtaattattactatttatatcttttcttattaagccacatcatccgaattgtttttttattccttcgatagttggtagtatattgtgcaaattatctctcatattttcctatcttattaagtcatatcaccttagttttatatttaagatgatgtacttggccacatcactattgttgtgattttaaatgaccaatctagtttaaattattataaataacatcttaattgtacgtagtatttttctacagtagataaagatggttaattcattaatcgcctagctagcttccatccgcatgattaataatggagagtttaattaaccatgcagcggctgctctgaacacgatactggggagatggggcaagaaggcatcgccggagtggaacatcagcggcgagctctgcagcggttttgccactgataaaactgactgggattactaccccaacatcaacccgttcatcaagtgcgattgcacggacagcaacaacaccctctgccacattaccagactgtacgcacactctctttatctttatcgtggtttcatcatatgtgctccacgcagtgcctgaaagagcccatgcatacacacgtatatgctgcaagtatacaaattaaaaaacatatatatataaacaccagattattaatattaattagtatctccaaggaatgcgtagaggaatcagaaaagtctatcctaaattcggtacatatcttccttaaaaaaattgtacatatctgctggacccaaatggaggtattaatttggtcctccggctgtatatatgtatcccaaacacagttctcttatcagtatttttacttgttttttatgcaggagggtaactaatttgaatgtagttggtcaaatacctacggagctacagaatctcacacatctagtggatctgtacggtatccaagacttctcttcttaattaatcttgctactagtcgcatcgggaaattcactagcttgtaattagcgaattaatttgtgcattctcgtctagtaattagccgatatactagaaacgacaattcaataatccaatataataataacattagatattacttacaaataaaaagaaaacaatagcttacaaacgatatagcattagcttcagctctagttccacgcacagctcaactgagatataagccagatgtcttcttcctcaaaaattttcttcaactgagatttgatgattattgtatggcgagtacatggaatactccataagccacacagaaaaaatacaggtgcatggtgatacaaaggaaggtatgatagggttcatttgcaaaagcaacattcagcaaaacaatataaaatcaacactgtacaacatacctatgctccataggcccaaccatctctaaacaaccaaacccgactacactgactaaagtccatacaaagagctaacaaattatcattaccaatttatttatcattaataagtagtgtgtgactaatcacaaaaaaaacactgttaggcttgcccataaccgcgtgcacaactattcgaacagttttactctggccagatatgtactaatgtacccacaagacaattccacaacctgtcaccatgtcatcatgtgcccacgcttaacatgtcaccatgtgtgaaattctaacaagaccattcgcatagcacaactcaaagtag

SEQ ID NO: 22988 - DNA, 1097 bp, Oryza sativa
ttatatcgataatatttacattattacaaaggcacttcaagcctgacaatcaaaaataaacagcagcggactagcgggcctacggctccatcttcacaggcgctcaactggggtataagccagggctccacctaagacttcttctccaaagcttctcttactaggggagggaagatagagcaagaatgagtacaaccacaatactcagcaagtcacaccgggagatgcatgattaatgcaagggaaacaaggggtaataatataggggattaggttttgcagtaaacagcatttaaaagacacttagttgcccaaagctattttataaagacgatcctagagctacacagcattattaatcaaggccgtggacccacacgaacctgccttaacccaaggcctacgatgattcagaccgaactggcaacccgacctgggtcccagctcgtcccaagccaacccaggccaacctttccaccttttagttgttaagcaatttttaagaattaaaccactaacttgggtacattgctaggcttgcccatatccgagggcacggctattcgaatagatttactctgatcagaggtgtacatctttacccacaagacacatctttactccgcattccatggccttggaacccatcgtaaacatgtgacataacccttcacccatcctagccgtgaacaaaagtaccgacccaaccctgcctacggccggtatcccgggacaggcaggccaggattgagcccctagcaacaggatctagaccgggtgcgccacacgcataggggtgagaccacccgtgtactagtccagtgccatggcatctcgactaacgggcaccgacccgtgtagtcttcatttgcctagacatctcgattaccgagccgcagctcgtgtagccttcatttgcctcagagatatccatcgtcgcaacgacttcatccatctctatccgtgtccttttgttcaggactagactgagcaccgagttaagccttacccattagacatgtggttagtacgatagtgctttgcaacagaggcccgaagaccggtccttatagtggccgaggtgctactagcaaaac

SEQ ID NO: 22989 - DNA, 2817 bp, Oryza sativa
ataaaagtgggattcaaatcattaggacgttgcctttttgcattaatgttatagactgaacatccatcaagattcacaatgtataagccattcatcatgggtgcatggaaatagaaaatgtcattataatagactgaacaaccattgtccacaaatctaaaaccataaccctctgcttgcaaacaagaagcagagataacgttcttacacaaagctggaatgcaataacaattatttaactccaaaactaatcctgacggtaaagataatggcatagtgccgaccgcaacagcagcaactcttgctctattgcccacgcgaatgtccacttcgcctcttgctaagctcctacttcttttcagcccctgcaacgatttgcatatgtgagcaactgaaccggtatcaaatacccaagaatcagtagaggaagtagcaagattaatttctataacattaatacctgagatggaactctttccatcctgctgcttctacttgagctgctctaggtatttcttacagtttctcttccaatgacctgtctcgttgcaaaagaagcactctgcatccttagcgggccctgtcttttgaaccttggtcttagagttgctagtactcgtgatctcatcagagtttagctttctcttttgaccactcttcttgttgttgggcttgcgcttatgcataaccatcatatggttggagtttttcttaatgctttcctcggcagtcttgtcgcgaccgagaaaatttgcattttcccgaacgctagtgtattaatccccgtcccagaaaaagccggcgtacaccacacaaacatgatacaaatggcacatctttattatatcgataatatttacattattacaaaggcacttcaagcctgacaatcaaaaataaacagcagtggactagcgggcctacggctccatcttcacaggcgctcaactggggtataagccagggctccacctaagacttcttctccaaagcttctcttactaggggagggaagatagagcaagaatgagtacaaccacaatactcagcaagtcacaccgggagatgcatgattaatgcaagggaaacaaggggtaataatataggggattaggttttgcagtaaacagcatttaaaagacacttagttgcccaaagctattttataaagacgatcctagagctacacagcattattaatcaaggccgtggacccacacgaacctgccttaacccaaggcctacgatgattcagaccgaactggcaacccgaccctgggtcccagctcgtcccaagccaacccaggccaaccattccacattttagttgttgagcaaattttaagaattaaaacactgacttgggtacattgctcggcttgcccataaccgagggcgcggctattcgaatagattatactctgatcagaggtgtacatctttacccacaagacacatcttcctcacgtgcaaccacgtgccacataccaccacggtatacagacgaaagacgtgacatagtttccaacccatcctagccatagacaagagtaccgacccaatcccaacctacggccggaacccccgggacaggtaggcaggattgagcccctagcagcaggacaccagccctgtgccatgacatctcgactaccgggccgcagctcgtgtagccttcatttgtcctagagatgtccatcgacccccgacttcgtccatctccatccgtgtacttctgtttataaccagactgggccacaaactaagccttacccactagacatgtggaagtacggtagtgctttgcaacagaggcccgagcttaatccttatagtggccggggtgctacttcccacaactggcatgcacccaaaccccaccggaaaacaggttttaggggttttgaaagaggaagagaggtgtatgtccaattccaccataagccaaccattccatagtgtccaaatgatatgagaattcccaaagtctaaagttataaaaccacctaatgttgcctaattaaacagcgaagcatctacctaaattcatactagtggaaccatgaatagagtgtccagtagttggggttttgtttattctagggtgaacaaggtaataataacaatagcaataataatgtcttaacaaaggtaaataggcatggctaaataaaacagtgataacgcgggaatttaaataaagcgataatgcattaatttaaatcaaaataattttataaactgggattcaatatgctcaaggatgatgtgacttgccttgctcagagagaacggccttccgaacctttggcgacgaccgcgaaccacgcttctggaacctccggaacgacagaagctacgcgaagcacacaagcaaagctacaagcttataaagaaacaataacaatacataaaaagaaagcatacggtactttaggttataacaaacattaagagacttgaacgggtcgattcggagctcgtatgaccaagatatgatcatccgaagtttaatgctgttatatggagatttgcggattattataattaagctttgcaactataaaacatgtgtaagcgctagcctggaaaagacaggaaggctgcgctgttgacatgcggacctcacatgtcaacaaaaaggaccgcggtagaccgagtacacagagacggtccacgggtcgacggaagcggatcccgtgtgtcaaccgaggcgagtggccgacaaacggactccactagacaccacacgggctgcacacgtggaaaccacgtggctaccgagcgggcacactaacacggtcaccacacgcacaa

SEQ ID NO: 22990 - DNA, 783 bp, Oryza sativa
atggcataccaaaaagggaaagtaaggcaggtgcaatttccggaatattgattggtgcaatagttttagtattagcagcattatttggagtatttacactgataaagaagcggagagcattggcacaacagaaagaaggtatgatttatcagtacataattcaaacatcaaaattgtcaactggtttattcttctcatctatactaaaaataacatgcagaactatacaacctggttggacgacctgatgttttcagttacgctgagctcaagctagccacagacaatttcaattctcaaaatattctaggggaaggaggattcgggccagtgtataaggttcttaatttatttccataattaatcatgtacaactgcaactggttataaatttgtgtgattttggcatttaagtgttgtgttttagccacatttgtctatgctcaaaatatacatgtaaaaactttatcagggtaagctacctgatgaaagagttatagctgtgaagcaactttctcagtcatctcatcaggggacaagccaatttgtgacagaggttgcgacaatttcagctgttcaacatcggaatcttgtgatattgcatggatgctgcattgacagtaaaacacccttgttggtttatgagtaccttgagaatggaagcctggatcgagcaatctttggtgagttcacttctgcaaaattgccaccctcggcacttatagaattgtattttcttagttcacaaataaaactcacactacaacaaatataccttgtaga

SEQ ID NO: 22991 - DNA, 2209 bp, Oryza sativa
aaaatgccattacatatgaggcaaattttaaagtgccgaaaagatgtctctataagataaatttaacaaagtatgctaaaaatatctctaaagtgtctctagaataaaaatattttaagcgattttaaaagtgactctaaaaagtgtctttagactatagagcttcaaaacttagaggcgttttgaaaattgtctctacaaaagagcctctacataaggtttggtttttgttgtagtgtcattgcttcatgactaataattatggatttttcttttctgcatttttgtaataatttgcgttccttatgataactgagctatttatgcttgtaaaggtgacagcaacttaaacctagactgggtaatgcgcttcgagatcattttaggaatagcaagaggcctaatttatcttcatgaagagtcaagtatacgcattgtgcatagagacatcaaagctagtaatgttctacttgacactaatctcgttccaaagatctctgactttggacttgccaaactctatgatgaaaatcaaactcatgtgagcactagaattgcgggcacattgtaagaatattttaccacttatcatcttatgattataacatcaatatgaatgctactattaacctgtcttatcttttttaaggggttatctagctcctgagtatgcaatgagaggccatttgtcagaaaaggctgatatttttgcattcggagtggtcatgctggagactgtcgctgggcgaccaaacaccgacaactccctcgaggaaagcaagatctgtctccttgaatgggtatgctggtctatgatcttcccatacaagaaaacttcaattcactgtgtattgtcttttgcttactgaaactatatacaataaaacttcaatttaaggcatggggcctgtatgaaaaggatcaagcacttggaattgttgacccaagtctcaaggaatttggcaaggatgaagcttttagagccatatgtgttgcacttgtctgcactcagggctcaccgcaccagcgaccgccaatgtcgaaggttgtggcaatgctgactggagatgtcgatgtggctaaggtggtcaccaagccgagctacatcactgagtggcagcttaggggtggtgggaacagcagcaacaccactagcagctaagcagaagtttgtctccaggttaagtgaatttaaagtagaaaatgcatgggtcatcaagattggtttgcgacaatattgtatgtctttttctaaaaaataattatgtgttgactaaattacagcaaataatggaattacttatccttaactcggtcctggtaataaaagtttgctcctaataatttgtaaatggtgaataaccgtggtgtattcaatactcaataaatgttaatagataaccctcaatctgtaatggccagtgcaatgcagaggtaaaattctgtcccattgttaatttcatgaagagctgtctctcccatacttttttcagatttttatttaatttctaaaagttgtagtacaaactagtaccaaaacatttattaatcattacaaaccagtactaacgtgttttgaaaggttttaaaatccatttgcgaaaggttttaaaatccatttgcgaactcctcctacgtactagtacgaatttgtgaaattccgggttagaacccgctaacatgtatgttttgaaaatgggttgataaaatttaaaatttgatagatatgagaggttgaacacttcatcattatatttctgtaccataaataatattggtggcgttttgaactcctctatcatgatatttcaaaattgtaccgatatggtatagaacgggtagatttgggacaggttagtaattgttgtgcgtaaaccctggatttattgcttagatcaatcatataaaattcgtatggcctctggatcactttaacttcacaacattaaaagatgatgaaagtaggaaacttaaaacgtactctaagatttatgttgcgttggttgtgggggacacagagaaaccaggctacatctcttcttcacctgcccgttcagtgtaagatgttggtaacatctgggaatcacatggaatcaacacatgagttctttcaaatgaatgtcttagtaaggctgaattttgccagaaagggtttcttggaaattttctttattgcctcttggcacatctggaagcagagaaatgggtt

SEQ ID NO: 22992 - DNA, 6823 bp, Oryza sativa
ttagttatgaattttgtaagattaatatgctttaacctaatacagaaaactattatgatttacgacgcaataaagatttattttgaagaaggaaaagggcttttcttacgtcagcatgacgtcatcgtcggcactgcacgggaccacgagatcaccggtgctacagggctcggccgggctatccaagggcaccatcgtggagaggacgacgaggtgaactcaccggtgctcagaacaacgacggacgacgacgaacggcggccggcggtgagctccaacggcggcgcggctctgggcggcgtcgacggcgggattccggcgggtctcgacggcaacggaggagcggacggggtgcggctccactcggcgaacccgatggcgacaatagtgagcggcggcggcgaccacaacggtggcgtggggcggctaggcttgcggcgaccactaggacggacgcggcggctgtgctatggaccacggcggaggacgtggcttcagggcaatggtagaggacgacaaggggatcatttacataggcacggaagctcgagatcgatcccacaccgagaggaatcaaagccgtaaaactatagggttaggtggagagataaactcgaattcgaattcgatttggataaactacacgaaattcggctccgattcttaggggaaaaggaagaggacgatgaggggataaatttccctcatccaatcgaactcgggagcgacgaccagcggcggatttggtggggaggtggtggtggtcgggctcggcttgactggccggaggtaggggatggccccgacatgtgggccccagatgtcggcggcttagagagagggggaggggcggcttggcctgggccggcagggccgcgtggctcgcgcgcgcgaggggaagagttgggccggaaaagggcccaacagattaggataggattttaaaaattttcctaattaaaataattcgtgaaatgctatttcatttaataaaaatacttcccttgctcaaataattcacataaaaatccaggaaatagataaacaagcaaagtatttaataaaattgtatctatctcaattttatgtgcgattttgctagtttttattagggtttatcttgtaggtttttaaaataatttctaaaaaatgcattaaagaatgaattattaaattaagcgattctgagagtgtgacatgtagggagaatacttccataaaagatgcccgtggtgccttaggccctctttttgcatgtgtatagtattatgtacacattggatgacatggcgttggacctgttcgaaatagtgctgggacagtatgtcaacatcttcattctggtagccatgccctacaatttactcacccaacattgctgcggaattctagaggcactcttaagtttcagtagtcagtatggactgcaaatctctgcccctatacagccaatatcaaattgcctttttcagtacaatgagctccatatcttgaggtatgtatagagattatggataccccatacccacacggcatatatagtctgactgggtatggggtgccatctgtagatagaatatcttttaaagggactcggattaaatttcaaacttgtatgtcaaggaaatatccgggatcctagtcggttacgattgtaacttatctgtaactacctattccgttagggatatggattgtactttgtaatacggacccctcccctatataaggaggggtccgggtgcctctaagggcacgattttctcccagatcatacggtcaataacatactcggcggatcaatccccggacaggagtagggtattacttcttattaagaaggcatgaacctgtataaaattccttgtctctcaacccatccacttttccagcttgatagccacccccttttagtattgccgaaatctcgtttcgacagttggcgtgccaggtaggggtagcgtcaagttcttcgccgactagtgcgatgggtttcatctccggcatcgacgacttcgtcttccctcccgggcaggcgttccggtttggcagcctcgactttgtcaccaacgacttcggcaagatttctctcctcggctcagatccgaaacagtcggggagaggccaggtctccgccccgttcggtatcccgaagtcggccgagatctactccaggatcatcacaaccgagccggccccaaaccactcggacgagatccaatctactccaacatgacccgatcaagacgatggcgcctatcctccaatcctgatgaaactccccgatgacttggctgccatcttcaccataagggcgtcttctccccgtaggcctaggcgggacccgacctcggccccgatccagtctagctctagggaagtcggcatcatactccagcctctcggcacggtttcgacggaacaattggacggctaccttagctcccccggtgtcgactctcgaccgacagagatcgtagagtacgacgacttcggctaccgctacgaccaccgcaacctcgacgacttcgatgaaggctacgaagataactacacacctctctacttcggcattttcatggccgacaacgagacagaagaacagcgccaagcccaagaagcagaagaacagcgcgtgcgacaagaagccgaacgtcgccgactagaggaggaacgctaagcacaagagcgagaacgattgcagcgtgagcaacaggagcgcgaacgggctgcaaaggaggctgaggaccggcgacagcgtgccttggaggccgagcgacgagcacgagagctcatcgggcaacaagacgttgaggggacggcggtttttcgcaccccctagcagaacgcggctgcaccgatcactcttctcgacaccctcctcaaggaagacgcactcaatcaagccaatcacgtcgtcaacatcttgaaccagaccaagaccatgatcaccgcttcggttccagtaaactgtcacagcctgaattttgtttcaggatttataagttatctaataaattattaatagaatttatattaaatgttctttaattaacaagtgaagttaaatgtgggaaataaaatttcctaaatataaatcatggttggatttaatttttattaaattctccatgattaattatactctctgaaattttctcggatttttcagagctcaattcctaaatgatacaaagaacagttcagtaattatttaatcattaatgatctaattataattatgttaagtgcttttcttgtttaaaaatccttaatttataaattgttgtctaaaagggaattattagaaatgatcttaaaagcctagaagagaagatctaattttaatttgttaaattccaatataaaagtgggctagataaaattttattaaatactttacttgattctatagttcctagatttttctggggtttatttgagccaaggaagtatttttaataaatggaattgcatttcatgaataatttaaatggaaaaaggtttttaaaagtcccttttggttttgggccgaaagccggcccaaaccgctctctctctctctctccctcggcccaagtcagcccaagccgagccgcccgcgcgcgtgcgtgcgaccgccgctgacaggtgggtcccacccgtcagtcgtcgtcttcctctcgccgaaaccctagccgagctgcgccgccgccgccattccaaatccggccatccctttccgtttccggtgaaattgattgaggggaaaggatccccgtgatccactctaccttttcccttttggaaacatcgtctaaatcgctttggaaatcgccggatttgagttcgattcggatcgatttgtctcctccgaaccctaaaccttccttcccgtcaccggtcgccgtgggccttcgccgccgctccctagaccctataaattgaccccccaagctcccctatacctgccgccaccctcgccttagcctctcgtcgccggtagagctctagcgccgtgccgcctcgcgccgccgtcgccgccgccactccagcagtgcgccgccatcgctccagtcgtcgtcgtcgctcggggaggtcaccgccgtggtcgccgtcgcgtcgccgtcctcgtccgccctttcgccgtcgctgtcagccgccggagcaccgtcgccgccgttgacccgatcgtcgccgccgctcttcctcgtcgctgtcgtcgtccgttgatcttccgccgtcgttttggtcaccagtgagttcgccgtgccgtccgctacgcgtaggtgtcctccgtttgcgccgccgcgccgtcgttcgccggcgagcacgcgaggccgagccgtcgccggtgatgacgtcatcgccgacgtcatcgttgcagtccgccatggtccggttgtggaccgatggatcttggccgtccgttttggatggatgaatctcggccgtccgttttcgtgaaccgtcgccatgcactcggtcctccgtcaactgatgaggttgttgtcccgatcttcacgacgtaagattgatcttgataactagccgaagaacgaccgataacttgctgcaagcagcgataattagtgcaacctgacgacacgcacaaggagccaaccaccgtctctatacggcagcctgaaccaaggattcgcccaaccacactctcaaagaaccaacctacgcaacctaaactcgaggatcaggagcacggattgggtgccgatgacgcggccgcttctgtaatctccgcgaaggaaaacacaagagaaaaggggtagagaatctctctctggggtttgttagcacacagctgaacaaagggttccgaattggattatcaaaagtctgagtttgcaatggtcttaggggttatttacactagcaacagccctgctagataggtgtgaattcgagatggaaatgaaaagactaaaaatgtgaaagggcctccacgaaatggcttctgaagtgggttcgcgaggctgttggtcttctggagtggtgttcagtaatttggcaataactccaacttgggaagtccaaatgatgcaccgtcagttgcgttggaaagttaacttcactatgttttgaaccatgtatacatgcaccacgaaacattgtagattggtacagttttgaacatgaacttgtaccaacgtgctgactcagcagactcctggccttcagagcagtcttcacaaacgtacttggttctcattggtgtgaagtccaaagtacttggtattggtggcattggaaagctgacttgataagctttccaaagagtcctcatttacttccatagcttctgtaaattgagagttatgagcagttctttgaactggtccgttttgcactgcagttggtccgttttgcttcactggtccgttctgtactccagtgatagaatccaccgatccactttcatcctcctcatgttgtatgttcctaagcacaactaaagtagaacacttaggtagtataacattctcagaagtactgaaattaaaatcagttaggaatgaattcacctgaacttgtagtttcttggcacgacttcttgtaagtggaccttgaattgtatcctttgtgtttgatgatggttgcttggtacttgaagtagcatgcacggttgggatgtcctcatcatcctccccctcttgaaaaggagtcgacctcgacgactctgaatcttctagtccaaagaatggtgttaagtcagcaacattgaaggttgaactaacaccataatcttcaggtagctcaatcttgtaagcattgtcattgatcttggacagcactctgaatggtccatctcctcgtggcatcaacttggatttgcgcttctgtgggaagcggtctttgcgaagatgtacccaaaccaaatctccaggctcaaatgtcaccttcttgcgattcttgtttgcccatgcagcatagtacttggacctcttctcaattgcttctttggtcttctcatgaatcttcttaacgtaagttgcacgcttggacgcttccatgtcactcctttcctgcaatggtagaggcaacaaatcgatgggagaaagtggtttgaaaccatatacaacttcaaatggacacatgttagttgtagagtgtactgccctgttgtaagcgaattccacgtgtggcaagcactcttcccattccttcaggttcttctttatcaaggctcgcagcagcatagagagtgttctattcacaacttcagtttgcccatccgtttgagggtggcaagtggtggaaaacagcagccttgttccaagctttgcccataaggtcttccaaaaatagctcaaaaacttggtgtcacgatctgaaacaatcgtcttgggcatgccatgcaacctcacaatttcactgaaaaatagagaagctatgtgggaagcatcatcgcttttatgacaaggtataaagtgtgccattttagagaatcgatcaacaacaacaaaaatcgaatccctccccctctttgtcctaggtaatcccaaaacaaaatccatgctaatatcttcccaaggagcactaggaacaggtaagggagtatataatccatgagggttcagttttgacttagctttgtgacaggtgacacatctttgcacaagtcgttgaacatctcttctcatcttaggccaatagaagtgatcagctagcatgtcataagtctttctccatccaaagtggcccatcagtccacctgcatgtgtttcctgtaataacaagagtctaacagagcaatgtggaacacacaatttgttagctctaaacaaaaatccatcatgtatatgatatttttcccatccttttccag

SEQ ID NO: 22993 - DNA, 2390 bp, Oryza sativa
atatttacgaagtaggaggacccgagccctcctatcgagacccacacacactaaaccacccggagagcttagctgcctaggcttgccgtcccacaaacgagcttttgaaggccagaagctcctgcaacactccaaggatgactctcattttctaccacttgcaagatcgtcacaactctaggattggcgccattgaaaacatagtcattgcggtacttccaaatcttccaagccactagggtcaccaaagagttaatccccattcgcaccttcttcggccgattcttggtcgcttggctccaccaccttagaaagcggtcggtagagggctaaggcgctacctcggctaaccccagcctcaagaagattgccgtccaaacttggcgagaaaagacacatgagatcaaaatgtgttggatggattcttgacttagatcacaatggggacagctcaccgagtgctgcagcccacgcctagccaattgatcagctttccaacacctatcattgatagccaaccaaatgaagaatttgcatcggaggtgaccccaacacttccaaatacacttccaacacctattaaataatttataaatccctgaaacgaaatcaggcactacaccatggcatcagattaccaacagacatctgttggtaaaaataaacaatcattgatagactgtatgttagtaaaagcttttggcaaaccatatgtcagcaatactcatatgtcagcaatactatgtaacaagatatgttatatgttggcctttgctgacatatctgtagcaggctaccttgtgacatggtgtagtgagggtgtggcactactaaagagtcttgctactaaagttacgctattgatcaaggctttgcacaaaatataacttccatggctctctttgtgaacaccagcaaatgcttgtcagctattcagcatcatttttgtgttggctaattgttctagtttatttttatgttcttttcaggaactttcggaataattacttgactggtcccattccaccattcatcgggaaatttacttcaatgcaatacttgtatgagttactgctcgttctagatcatgttccatctattggtcattattttttgttaattattgttaatcatctcaaggtcattatctttgaatccactatctggactacttccaaaggaactaggaaacctcaccaatcttgtttcattgtaagaaatcttttctcacacgtggattaatcttcaactgctccctctgctacgaactactcatgcttgtagctttaaccgtcaattccagcacttttcgtatatatatagttgaacattttccaccctcctccatttgaaaaacaacttatgattatgaatgcgcatagcttatgtctagattgtaagctagaagtgcttttttttatggagggagtacgaattatacattatgaaattatttctcatgttgaatctaaatgttaaactatacaaatttgtaaaaatggatatttaggaatacaaatgtttgacttacaacaaaagcagaatgacagatagtatgaaacgaatggagcatatatttggactgcatgaactgatataataatacaagaaatagcaatcacataagttctaataaaaaaatcaaaactactactaaataggatgtaataggcatgtcagtgtaactcctgttcatgtggtttttcagatgatcaagtaagattaaacagcaaggacttgaacatattgtaatgatgaatattgtgggtccaatagcacatcgggaaaactatgcccttttgctattagatgatgacaaacattttaaatcacttctgaaatatttcatttttcttttaggggcattggctcaaacaattttacaggaggccttcctgaagaactgggtaacttgaccaaacttcagcgattgtaagatacccccattgatttctagcttcttatttctacttgtaaaagaactaaatttggaatggccatatctattgtcgaacatgataatatttcaaactttcaacaacaggtacattgatagttctggattcagtggtccgttcccttcatcgttctcaaaacttcagaacctgaatacattgtattgtcaaaaacatagccacagctattatatttgtcatgttttcaagctaagtgatattttggtctgcttgcaggaaagcatcagataatggattcaatgggaaaatacctgaatatttgggcacaataactaatttggtagaaatgtaagcttcttaacatatcatttgttcttactgttcagagatagatgaatctgtgcaagataaattactgtctgtatatcacattgtctccattcagacttaaacaatagcatttttgggctgcag

SEQ ID NO: 22994 - DNA, 2606 bp, Oryza sativa
acaatacgctgaatgttgcggtgcagtcctgacataaaacgtgcaattgattgctcttcatcttcataaacattggctctaatcattgccttctccatctctttataatattcatcaacactgaggcttccttgcttcaaattctgcagcttgtcaaaaagatcacggcgataatgtttagggacaaatcttgccctcatttctctcttcatttcagcccatgaacgcacatcgccttggccagcttcttctctttcatttagcatttgctcccaccagattagagcatagccatcaaactctagagcagccatggcaactttcttccgctcagaataattatgcaaacgaaagattttatccaccttcaactcccatgtaagatagacttcaggatcagatcctccttcaaacttgggcatggtgaattttaatttgccaaatctctcttcattgggctgatttcgcccacgatttcctcggtgacgacgatcatcacgatgaggctgttcaacctcttcgtcagtcccactttcttctagtccatgttctcttccacgatcagcacctctaccaccatttccacgaccaggatgtggaggtcttcttgcatttgcaacaacacgatctctccgtcttcttcgttgttctcttgcaaggcgagcagcagcttctccttcggattcttcatcttcttctccatggtgacttgcatttgcatcttcaggaggaggctctggcaatcgattcataagtgcttgaacattggctgttagtgcctccatgctttgcttcatctcattgaattgtgccatggtgacacaatcctcaatctcaacattagaacccatcttcctgtcaagttagtgatggcttgcaacaaatatttgtggaatatgtggaataggaaaatatatgtgcaatcacacaacctcacctctctaccgaagctcaagtgagttccctgcagattacagaggaccaatgcgaggtggtaacttgagaatgatggttgggagaatgcaagatcagcgttcctatgacggtggattacttgtggagcttggtggggatatattttacaaggaatgcaatctgaattctcgctattgtaaagttaaatcacagtccaaaatgcttagtgctgaccacaagatatgaataacgtaaatagatcaaacacacacgcaaagataattcagttttgatgcaaacaaggagtatgcttaggatgcaagtgttgcaatcagacctaagcaaaattttgcaccaaaagatagataacaaactgattgtgcaacttgatataaaattcagaacatgtgcacataaacaaactgatctttcaacttttctttctcaaactttcctcaactctttttcttctctctttttttttgtaacttttctttcttctctttttttttgataaacttttttttatatatataactaagaacaagaacagatatgaaacttatacacttttctttttgtagaaacaagacacgaccgtcagcgttctaacttgataggatcaaagtttacgcgaaggatgataccggtttctgaatttttttttatatatatggatttgcagatgtatgaaagaagctcaaaggacacgcaaaggagaatatgatcagcaactaaaacaagactctaatggactgaaaattaactaaactcacaagaataacagattgaaacaaagggctatagcagaatatttttatggctttttcagtggataggacgaacacaaatatatatgtagctaagggtaaaaatcctaccgttgcaaccgaggctctgataccagatgatgaggttgttgtcccgatcttcacgacgtaagattgatcttgataactagccgaagaacgaccgataacttgctgcaagcagcgataattagtgcaacctgacgacacgcacaaggagccaaccaccgtctctatacggcagcctgaaccaaggattcgaccaaccacactctcaaagaaccaacctacgcaacctaaactcagaggatcaagagcgcggattgggtgccgatgacgcggacggttctgtaatctgcgcgaaggaaaacacatgagaaaaggggtagagaatctctctctggggtttgttagcacacagctgaacaaagggttccgaataggattatcaaaagtctgagtttgcaatggtcttaggggttatttacactaccaacagccctgctagataggggtgaattccagatggaaatgaaaagactaaaaatgtgaaagggcctccacgaaatggcttctgaagtgggttcgcgaggctgttggtcttctggagtggtgttcagtaatttggcaataactccaacttgggaagtccaaatgatgcaccgtcagttgcgttggaaagttaacttcactatgttttgaaccatgtatacatgcaccacgaaacattgtagattggtacagttttgaacatgaacttgtaccaacgtgctgactcagcagactcctggccttcagagcagtcttcacaaacgtacttggttctcattggtgtgaagtccaaagtacttggtattggtggcattggaaagctgacttgat

SEQ ID NO: 22995 - DNA, 2468 bp, Oryza sativa
atgcatctcgactcggtttgggttgtgtgttgatgcaagaaggaaaggtggttgcctatgcatctaggcaattacgtcctcatgagaataactacccaacgcatgacctagagttggcagctgtggtgcatgcattgaagatttggcgtcattatcttttcggtaaccgtacagaggtgtatacggatcataaaagtttgaagtacattttcactcaacctgatttgaacatgcgtcagcgaagatggttagagttgattaaagattatgatatggaaatctactatcacccggggaaagcaaatgttgtagccgatgctcttagcaggaaaagctactgtaatatgtcagaaggtcgacgtttaccttgggagttatgccaagaatttgaaaagttgaacttgggaatagtcagcaatggttttgtggccgctttggaagctaaacctactctgtttgatcaagttagagaggctcaagtgaatgatcctgatatccaagaaataaagaagaacatgagaagaggaaaagccatcggttatgtagaagatgagcaaggtactgtgtggttgggagaaagaatttgcgtcccagaaaataaggagttgaaggataccatcatgaaagaagctcatgaaactttgtattccattcaccctggaagcactaagatgtaccaagacctaaagcaacaattctggtgggccagtatgcgacgtgagatagcagaatatgtggctctatgtgatgtatgtcagcgggtcaaggcagaacatcagaagccagccggtctgttacaaccgttgaagattccagagtggaagtgggaagaaataggaatggattttataaccggcctacccagaacgtcggcaggacatgattctatttgggtagtggttgataggttgacaaaagtcgctcacttcataccggtcaaaacaacctacacggggaataagcttgcagagttatacatggccagagtggtatgtttgcatggcgttcctaagaagatagtgtcagatagaggtagctagtttacttcgaagttttggcagaaattacaagtagagatgggtacccgtttgaatttcagtaccgcttatcacccgcaaacagatggtcagacggaaagagtaaaccaaattttagaagatatgttgagagcctgtgttctagattttggtggaagttgggataagaatttgccgtacgcggaattctcatataacaacagttatcaagctagtatgcaaatggctccgtatgaagcattatatggccgaaagtgccgtacgccgctcctttgggatcaaaccggtgaacgtcaagtttttgggacggacatattgcgagaggcagaagaaaaagtgaagattatccaagaaaggttgcgcgttgctcagtcacgtcagaagagctatgccgacaatcgtcgcagagatttggctttcgaagaaggagattatgtataccttcgggttacgccgttacgaggtgttcatcgtttccagaccaaagagaaattggcaccgcgtttcgtgggaccttttaagattgtgagtcgaagaggtgaggtagcttatcagttggaattgcctccgtcaatggcgggaatacatgacgtgttccacgtgtctcagttgaagaaatgtttacgtgtacctacggaggaagcagatcctgatcgtatagagcttcaagaagatttaacttatgttgagaagccagtcagaatcttggaagtaagcgagaggaataccaggaatcgtgttatacggttctgcaaggttcagtggagcaatcattcagaagaagaagccacttgggagcgagaagatgaattgaagtcagctcatcctcatctcttcgccagttcttctgaatctcgaggacgagattccgtttaaggggggtaggtttgtcacgccctaaaaatcgcctaaattaaaaatacattgtttaaatcatttttagaaattaaaattaaaagcctacaagctaaaccctaattgtctaggaaaattttcaacgtaaaattgagctagataaaattttattaaatactttgattgttcctctattttctagaattttctgggaattatttgagcaagggaagtatttttaataaatgaaacaacatttcacaaattatatttaattaaaaagttctgaaacccctccctaaagccgttgggccgtttttggcccaacatccttcccctctcccgcggctgagccggcccaaaaccggtccaacccgtcgccgccgccccctcctctcgggagaccgacatgtgggccccacatgtcggatccttccccttcctctagcagccggccgagccgtgcatgacgagcccgagccgccaccttgcgccctcaaatccgccccaatccggccaccccgagtccggatattagaggggttttaatccccgtatcctcctctatctttaccc

SEQ ID NO: 22996 - DNA, 1483 bp, Oryza sativa
tgctcattcttgcaatattcaatcatcagaagaggagtatctcagtgaaggtgatgatctggaggattaggcttgttctggttaagttgcctgtggagtggagtcgccatagctgttccgtagtttgttatagatttattttttttcgctgcgtagaaggatattctttgagaggaactatctacctctgtaatattttattatttgcgaatattctatagttgttcatttgtactctattatcaatttgttattgtgtgcctcggttgattcctggacgagggtttaacacacatgtaagcgtttggaattttggatagaaattccgggcgtgacagattggtacttggtttgttccgaagcctggggttggcacttgctgccgaacggttggcacctgagcagtgttgccgaagtcgaactgctgtcattgactccacggcgaaggtcccgagcctggctgaattggtggcaacccattgggcgctccttgacttgtattccctaccgggtgagccgatggggttgtgcttgaaatgtagtggggttggttgagttgctaaaggaaagcttggagttgcgcctgcagagccgaagcccattccaccactggttgtggcgcttggccaggtggttgatgctgcccggcgaagtacaccggcggctgtgcggctagtggcggagagggctaggtcaccacttgcggccggacttgaggtggggcatagcctgccgaatactgaaggattggagccgacgtggccttggtcggccttgtcgcctcgtatgcttgttgttgttcttgcatttggcgaagcatgtcttggagccgtgtcatattctgccgcatggcttccatgtcggcttcggcttgcgcttcggggtccaggctgatttgggcctatacaacggcgagcgcagttggtgccgccggctgtgatggggcggcttgaggcaccaccagttggtttgtcgaaaggatctctgccctggtctggagtgcccttgccgccgcagccgccttcgccacgtcggccttgttcggcacttgcactgaggttgcggaggccgaagacggttgtgatggcgcgggggccgaaggcggctgtgatggcgcttgtccttctccatcttcggccacagacgccgaaggctctgctccttcctcggcggccatgtccggtccggcgtcgctctccttccgcctgacaaccttctccttcacgaccctcttcgtggcattcgctctcagtggtttcgctcggagtccccacggtcggcgccagctgttgtcgaaacaacaactgtatacgtcgaaggacgtggttactcaacagtggttgggaaaatgaagtgtactaaatttttaatttcacttgggatcccccgttacatagccctagggggctatttatagccctattgcaggctctttctactaggatctaggttgtacaggggaatttatataattacccttata

SEQ ID NO: 22997 - DNA, 1651 bp, Oryza sativa
gaggtgtatgttcaattccatcacaatccaaccattccacagtgtccaaatgatatgagaattcccaaagtctaaagttataaaaccacctaatgttgcctaattagtcagcgaagcatctacctagattcatactagtggaactgttaatagagtgtcgcgaccgagaaaattgccttttcccgaacgctagtgtattaatccccgtcccaggaaaagccggggtacaccacacaaacatgatataaaagacacatctttattatatcgataatatttacattattacaaaggcgcttcaggcctgacaaacaaaaataaacagcagcggactagcgggcctacggctccatcttcacaggcgctcaactggggtataagccaggactccacctaagacttcttctccaaagcttctcttactgaaggggggagaaagatagagcaagaatgagtacaaccacagtactcagcaagtcacaccggagatgcataattaatgcaagggggtacaaggggataataatataggggttaagttttgcagtaaacagcatttaaaagtcacttagttgcccaaagctattttgtaaacacgatcctagagctatacaatattattaatcaaggccgtgaaccctcacgaacctgccttaacccaaggcctacgatgattcagaccgaactggcaacccgaccctgggtcccagctcgtcccaagccaacccaggccaaccattccacattttagttgttgagcaaattttaagaattaaaacactaacttgggtacattgctaggcttgcccataaccgagggcgcggctattcgaatagattatactctaatcagaggtgtacatctttacccacaagacacatcttcctcacgtgtaaccacgtgccacataccaccacggtatacggacggaagacgtgacatagttcccaacccatcctagccataaacaagagtaccgacccaatcccacctacggccggaacctccgggacaggcaggcaggactgagcccctagcagcagggcaccaaccctgtgccatgacatctcgactaccgggccgcagctcgtgtagccttcatttgtcctagagaatgtccatcgacccccgacttcatccatctccatccgtgtacttttgtttatgaccagactgagccacaaactaagccttacccactagacatgtggaagtacggtagtgctttgcaacagaggcccgagcttaatccttatagtggtcggggtgctacttcccacaactggcatgcacccaaaccccaccgaaaacaggttttaggggttttgaaagaggaagagaggtgtatgtccaattccaccataaaccaacaattccatagtgtccaagcgatacgaatattcccaaggtatagcgttatcaaaccacctaatgttgcctacttaatccgccaagcatctacctaaactcatactagtgggtactctatgtcacgtcctgataaattcatcccgaaattaaaaatcattttctaaaaggaataatagaattaattaaaatttgaaaagaaattggcaaacactaaaatacgtacaagaaaaattcgaatgggtccggagaatttttgttaaattctcgggctgcaggaat

SEQ ID NO: 22998 - DNA, 2763 bp, Oryza sativa
aatgagaaatgcatggagaagcttcatagagatggacttctacactcttttgattttgaatcatttgagacatgcgaatcttgtttacttggcaaaatgacaaaggcacctttcacgggtcaaagtgaaagggcaagtgaactattgggactagtacatactgatgtatgtggaccaatgagctcaactgccagatgtggttttgggtactttattacctttaccgatgactttagtagatatggttatatctacttaatgaggcataagtctgagtcctttgaaaagttcaaggaatttcagaatgaggtacaaaatcatttgggcaagacaatcaagtatctacgatctgatcttagtggagagtacttgagccttgaattctgcaatcatctaaaggagtgtgaaattgttccacaactcactccaccaggaacgcctcagtggaatggggtgtctgaacggaggaatcgtacattgttggacatggtgcgatcaatgatgagccaaactgatctgccgctaagcttttgggattacgctctagggacagctgcgttcacactaaatagggttccatcaaaatcagtggataagacactatatgagatatggactgggaagcgtcccagtttgtctttcctaaagatttggggttgtgaggtctatgtaaaacgtttgcaatcggacaaactcacacctaaatcagataaataattctttgtggggtatcctatggaaacgaaaggatattatttttataattgggaagagggcaaagtgtttgtcgcccgacacagtgttttcttggaaaaagagtttatttcacgaaaggatagtgggagcatggtgcgatttgaagaaattcagataacaccggaaaacgcttcaacgtccacacaaccacaagctaagcaagatgttgttcaataggttgaacaagttgttgttgaaccagttgtggaagcaccggcttcacgaaggtccgtaaggatacggcgtacacttgcgaggtatgcgttgttaactacaggtaacgtgatatattgttgttagacaacgatgaacctactacctatgaggaagcaatggtgggaccagactctgagaaatggcttggagccataaaatctgaaatagaatctatgcatgtcaattaagtttggaacttggttgatccacttgatggtgtaaaagccattgagtgcaaatgggtctttaagaaaaagacagatgaagatggaaatgttcacatctacaaggaacgattggtggcggaaggtttcagacaaattcaaggtgttgattatgataaaactttctcgccagtcgccatgctagaatctattcggattgttttagcgattcctgcctatttcgattatgagatatttcaaatggatgtcaaaacagctttcctcaatggaaatctcgatgaggatgtgtacatggcacaacccaagggatttgttgatccacaatcagctaaaaatatatgcaaattgcagaaatccatttatgggttgaagcaagcatctcggagttggaatattcgttttgacgaagtagtcaagacgttgggctttgtcaaaaatgaagaagagccttgtgtatacaagaagattagtgggagtgcactggtgtttctaatcctatatgtagatgacatattattgattgggaatgatattcctatgcttgaatccgttaagacatcgttgaaaaatagtttttcaatgaaagacttaggggaagcagcatatattctgggcataaggatctattgagatagatcaaagaggctaattggattaagccagagtacatacattgacaaagtgttgaagaggttcaacatgcaagattctaagaaaggtttcttaccgatgtcacatggcattaatcttggcaagaatcagtgtcctcaaacgactgatgagcgaaacaagatgagtgtgattccatatgcctcggcaatcggatccattatgtatgctatgctatgtacacgtccagatgtttcatatgcacttagtgcaacaagctgataccaattagatccaggtgagagtcactggatagctgtaaagaatatcctgaagtacttgagaagaactaaggatttgttcctagtctatggaggacaggaagagctcgttctaaatggttacactgacgcaagcttccaaaccgacaaagatgcgtgcgcacgtcttctgaattggtaagcaatgcgtttttttttcagaaaaaaaacattctacaagaaagttgctttaaaaattatattaatttatttttcaagttttttagctaatattgagggcatggtagagctccaactccttaatttagctccaggagatgggattggagttgtgttgtggagaagtttaaacctagctccacctctctagttcattttatgagaacgctctacccagctccgttcctattttaggtgaagttgaaactgtttggctagactctagctctaagagaggtagagttggagctgtgccaaacagatcttgatttaatcatgagctaatgaattgctccgtttcatgtgcaagggggagaagtacccaaccggaacattcaagcttagcctaaggctgagtttaggaggtggacttagaaactccacatccccgcacagaaaatggtattgcccattaacgcttaattaattaagtatgagtctaaaatacttcaaacatagattaatatgatttttaaagtaactttctatagaaaact

SEQ ID NO: 22999 - DNA, 1345 bp, Oryza sativa
tcgtcctttctctccgccgtcgccgccgagctccggttcgccgccgtcgtcgccccggacctcctcccgcttcggcatcgcctccttcggcttcgccgcgtcctcgccgacctcgtccgctcctccgtttcgcccgccgaccgtcggagcgccgccgtcctcgtcgatccgaaccgcgccgccgccttcctccgctccggtcgtcgtttccgccgtcttcgtcgtcccggggtgagccgaggaccgccgcttcgcttccctcttctctcctctctctcgggcgccgctccgccgcgccggtggtcgccggcggtgaccatcggggcgcgggcgcgccgcctcccatcggccgtgccggcgaggccgccttcgggcgcgccccgcggctgccaggtggggcccggccgtcagccgcccgcgcccgcgggtgcggctgacgcgtgggacccacggcgccggtcggcgccagcagcgtgcaccaggtccaccgtggaccgtgaggctgccgcgtgggccccactcccgtggacccggtccgcgcacccctcccctcggctgacgcaataaatccgatttttaattaaaatttaaatgaagaaattcgcaaatatccatttaaagagcatataaacttcaaatggctataacttggccatttgaactcggaattggaccgttcaagtctctaatttttccttaagaagtcaagaacccatttttgtgctttgttcctgcttgttgtatggagtttattagagtaaaagccttttcttttccgttggtcgtgtagacgctgcagcttcggaagatccgctcttcgtggaagttgaagccggcgtttgggaaagcgagcaaggcaagtcacatcatccttgaacatattgaatcccagtttataaaattattttaatttaaattaatgcattatcgctttatttaaattcccgcgttatcactgttttatttagccatgcctatttacctttgttatgaccttattattattgctattgttattattaccttgttcaccctaggataaacaaaaccccaactagtgggtattctattcatggttccactagtatgaatttaggtagatgcttcgctgattaattaggcaatattaggtggttttataactttagactttgggaattctcatatcatttggacactatggaattgttggattatggtggaattggacatacacctctcttcctctttcaaaacccctaaaacctgttttcggtggggtttgggtgcatgccagttgtgggaagtagcacctcggccactataaagattaagctcgggcctctgttggaaagcactaccgtac

SEQ ID NO: 23000 - DNA, 7558 bp, Oryza sativa
gatctacgcggaggatttggggtacatgtctaccccatgcctttctccaccttcagatgtcaacgacctaaatccgcctgaagaccccaacaacataagtgttctgcacccagctttcatcgacgacggtgacattgatattatccaggaggacatttacaactttcgatatgaccagactcctccaagagatgctcagtcaccggcaacccggttcctgcgccataaacgtgactagttttttgtttagtttacttaatattcgccactaacaattttatgtgttagaccatgtgtttatctattcacattgcccgtactcatagacttgaagaattttatttgttggtgtgctgccttccgcttttttagtgaataaaaagaatgtttccttgacacctattttgtgccgtggaatagaattgcaacaccgaatagtggagttaaactataacttgtcagcttaggtgatgatttcctctggtttatgcaggtgttatagttaaagaataacttttgttttaggtgcctaatgtgcgcacacactgtatgtgtttttaacgttggattccagatccaaatcgcacaaaccaaacaacaatgaaaagaatgaaaaatgacttaattaatttcaaatgaaatactcaatggtgagtgtaaaacatcgtttaataatggtaaaaaacaagacgagcagcataaagacggtgttatataaatttatagtgattatactgtcttcatgcggactcgctttcataaccactggaagattcgtccgcatgtgcttgctcgtcgtctgtaaaaccagaacactctgctgcatcttcagcccactcgtcgtccaaacatcttcgtagcgaagggccctctctgttgtatctccttgttgtactagcgaccgcagtactagccgtgcttccagcatgcgtaccacggcctctacccttgcctgttccccgtggcctgcctctctttcccttaccccttcttgaaatttgtaggattcttcgggcaagtatccgcgtagtgcccatccctcagatggcaccacccacatttccttatgcacaactttttgccctttgctccaagttgaacttcttcctccgggccacgagtccttccttttttcctcgacttgggggggggggctccctgctaattttggcgatttcaactcgtccaacaacgccttcctgcatattggtgtcaaccgtcgcagtagtgtcgcgcggtatctcctctatttggctgcgcagtcccttcaaaatagccatagctttgtcaaatgctaccttcgatttgcatgccgccctaaccactccaaacgcttcaatcatcatcatgtttgtcctgtaattttcttgaacaccatcggtccagttgcctctcggtcatgcctgtcaaatggcacgtcgctcttcactttctttgtgtacctctttaggatgtaggcagcgggtatcttctcaagttgtacatgaacaaatgcccggagcatgtgtgtgcaaaacatgcctacaagacataaaaaaaaaaagaaatcaattggaccagcttatttgtgaagtgcgataaaggattgctggaatttttaatgcgtgcataaatcaagcttgaggttggtatgaaaaaaggacatgtatgctcccactgtttgcactcgcatgtaaacacccctgcgtcaacatctgcaattagcttgaattgcttctgacaccaatcgtgtttttcagaacgtttggtgtgtgatactatccacccgttgcggaaatcgtggtcttgtgaaatcctcaagtcggtgctgtcctgtagcgcctcctcaaacaatctgaaagccgccctggtgtacagtctcgacatctgtataacaaatggccacctcacagccaacattggctttccctgcacaaaagagaagtcattagttgtgtgtgagttaaagtttaggtgaattataaaagtgatgtaataccgaatcccctctgtacagaatatcactaaccgagcatgctcttgtttcagcagcctccttctccttcctatcagttataacctccaacattctcctagcaaaacggtggagcgtagtttgctagtcaacaaacttgtgcttcaccaacttgttcatgctctcactgcgctgcgtggacgtcatcctcccgcagtagtccttcctgaagaacgcaggcacccacttctccctgatatcatataaagctttcatgatgggacagccctccaaatcatacctctttaagaattgatcccaggatgtttcaaactcataaggtttgtaagtttgattgatgcacaacatcatgtctggttcaatttgttcgttccgttcaaaaattgtgttcagcgggtcagagtggcagttaaggatatgccatcgacacagccggtgtattatcccagggaagcaccttccaacagcgacagccattgcaggatcttgatctgtaaaaaaaaaagaaatggcgtaaaacatatcatacaggatgtgaagataaatgggagtaacgcaaatattttatggtggatgacagtaggaaggtttatttaaatagacttgcctgtcaggatgcagcgcggagcagggaaattcgccatgcacttgttgaaggtgttgaataaccactcaaatgactccgccttttcgtctctgagcaagacacatccaaacagtgtgctctgcatgtggtggtttgcaccaacaaacattgcaagtggcatttcgtaaatattagttttgtacgtggtgtcgaacgttaccgcatctccaaagtcggcaaattcagcttggctgctatcatgactccaaaaataagtttttaatgacaccattttcatcgagctgggcgtcccagtaaaactttgggttttgcaacgtgcactcgttgaaaaactccaacagcttgttgatgtcgtttgcattttccatccggacattggctgctttcctgcgtcgttaagttaaaaaagaactaattgaaatcaacatgtgtgactccatgcaagaaaacaccataaatacttcaggaaagcaacatcacaaaaaaggaaaaaggggttattttgaagattcacctgttctctacgtcgcgggtcgtgaatgggattttgtccaggcctccatgaagatcatatagaacgcccatgatacagctttgcggcacgtgactttcttgcattatgtccacaatcttcatagccgtgtcatcatgattcttatgtgcacgcatgggctttaccgccgaaggagatggcgttagagggtggttgtgctgtagctcgaccacatcatactgtaccgatgagagcacgccaccgtcatagttgtgcctcagcttcacataagccttgcaccccattttcttggatggtttcttccgttctctatcacaatctgcgacctttgacacatgcttgccctctctcgtacaacacacctcgtgaatcgatttgtgcgtgcggctcttcttgatgtcaaaaccagcgtgatatgcatatgtcttgtagaagttgtatggatcgtcgtatgtagggaaagccatacctttggtgggcaccatgtgcggtggcacgcaaggaccctgttgaataataaacgaaaaattcgtacttaaatggacgatgaatagttgaaacattacgaaagttttgagaccattcaaaatttattgtggctgctgaatatgacatgtggagtgccagttaaaaaatggcttgtggccatttgctagcgtattcctgatgtgtgataagccggtggtactgtcatgtgcaatgtgtaagttaaaaaattacttgcgtattcttgttactaattctttgaataaatgaaaatacctagcaagagtggtagattctcagttataaattaacctatatcatgaatatatcgttattagatgttcataaaacatagatggtcttggcatgggtattgagttacattttaactattgaaagcgataaaagatgcttctcggtaaagaatcaaacacgtggggtatggatcattgtgaaagtaaaaaaataacttgattcttcatgaagctaattatttaaagtaaatcgaaagtacatagcacgagtgctaggtttagagctataaattaacttatagtatgaggttatcactcttagatgtttgcacaatatagttggtcctgccttgggcgttgagtttttttggaactatcgaaagcgataagaaatgattctcggtaaagaatgtcacagtgaaggtatgtcatgaaaagtggtaaccatatagaaacatcacatcattctacgatttgtgggatacttagtttcgtcatacgaaaatagcaacaaaaagaaacattaaacgtggttggacaaagtgtgcgtttagtgcaaaactattgcaatgtagccgtcgtagatgataaccactaaaaaatgggtttgaaggaatggaacttacatggctatataccctattcggcgtgggggttgcaatgtcgttgtcatccaaacacggtggcatccctcgagagcaaatgtctcctgcttggtgcatgggggtgcattgttgatcgaggagtgactagcggagcagacgacgtggcgctggtgatctccggcgacgccatgagcagccaaggaagagccgccgctggaaggatgtgctccgagtgccaccactaactggcagctagcatggtttatgattttttttttattttgtgtagtgtttctctatggacggatgctttggcaataatgacggatctgcatgggttgcacgtccggttttgtggtgtttaattttgaaaagaaggaatcgtgagttaattgtacggtaacgatttgtccgataaatgctcaggccgtttctttttttttttcaccgaactaattattttgaaacaaacgctgtggtgataataaacggtactgtcagattacgagttgtaaatagactatagtgtagtgaaattgtcgcgaccgagaaaattgcattttcccgaacgctagtgtattaatccccgtcccaggaaaagccggggtacaccatacaaacatgatataaaatacacatctttattatatcgataatatttacattattacaaaggcacttaaggcctgacaatcaaaaataaacagcagcggactagcgggcctacggctccatcttcacaggcgctcaactggggtataagccaagactccacctaaggcttcttctccaaagcttctcttactgaagaggggagaaagatagagaaagaatgagtacaaccacagtactcagcaagtcacaccggcagatgcatgattaacgcaagggggtacaaggggtaatgatataggggttaagttttgcagaaaacagcatttaaagatatttagttgctcaaagctatttcgtaaacacgattctagaactatacaatattatttatcaaggccgtgaaccctcacgaacctgccttaacccaaggcctacgatgattcagaccgaactggcaacccgaccctgggtcccagctcgtcccaagccaacccaggccaaccattccacattttagttattgagcaaattttaagaattaaaacactaacttgggtacattgctcggcttgcccataaccgagggcgcggctattcgaataggttttactctgatcagaggtgtacatctttacccacaagacacatcttcctcacgtgcaccacgtgccacataccaccacggtatacagacggaagacgtgacatagtttccaacccatcctagccatagacaagagtaccgaccctaccccacctacggccggaacctccgggacaggtaggcaggattgagcccctagcagcaggacaccagccctgtgccataacatctcgactaccgggccgcagctcgtgtagccttcatttgtcctagagatgtccatcgacccccgacttcgtccatctccatccgtgtacttttgtttataaccagactgagccacaaactaagccttacccactagacatgtggaagtacggtagtactttgcaacagaggcccgaagaccggtccttatatggccgaggtgctactatcaaaaccatgcaccccgagcccagcctaaaaccattttggggattttgaatagagggggcggtgtgaatccaattccacaataaaccaacaattccaaagtgtccaggtgatatgaatattcccaaagtctagagttgaaaaaccacctaaagttacctaattaaaatagcgaagcatctacctaaaatcatactagtgataccatgagtagagtgtccactagttggggttttgtttattctagggtgaacaaggtaataataacaataacaataataataaggtcataacaaaggtaattaggcatggctaaataaaacagtgataacgcgggaatttaaataaagcgataatgcaataatttaaatcaaaataattttataaactgggactcaatatgttcaaggatgatgtgacttgccttgctcgcttcaacttctacgaagagcggatcttgacttgacttgacttgacttgccgtcggcttcaacttctacgaagagcggatcttccgaagctgcagcgtctacacgaccaacggaaaagaaaaggcttttactctaataaactccatataacagcagaaacaaagcacaaaaatgggttcttgacttcttaagaaaaaattagagacttgaacggtccaattccgagttcaaatggtcaagttatggccatttgaagtttatatgctctttaaatggatatttgcgaatttcttcatttaaattttaattaaaaaatcggatttattgcgtcagccgggagagagggcgcgcggaccgggtccacgggagtggggcccacgcggcagcctcacggtccacggtggaccgggtgcacgcggcttgcgccggccggcgccgtgggtcccacgcgtcagccgcacccgagggcgcgggcggctgacggccgggccccacctggcagccgcggggcgcgccggaagggggcctcgccggcacggccgacgggaggcggcgcgcccgcgcccctatggtcgccggcggcggccataggcacggcggagcggcggccgagagaggggagggaagggggaaacgaaatggcggtcctcggctcaccccgggtcgacggcgacgacgggaacggcgaccgaagcggagagaggcggcggcgcggctcaggtcgacgaggacggcggtgctccggcggtcggcgggcgaaacggaggagtggacgaggtcgacgagaacgcggcgaagccgaaggaggcgatgccgaagcgggaggaggtccggggcgacgacggcggcgaaccggagctcggcggcgacggcggagagagaggacgacggcgcgggctcgattccgacggggagagaaagcggcgagtggcggaaacggaggagggaggcatggggagcgtttaaatagggttgggagtgagagagggcggccggaggggaaggaaatcggcgcggcgatctcgggctcca

SEQ ID NO: 23001 - DNA, 1400 bp, Oryza sativa
aacaaagttgatcctctcatcaagatctacaacttttgtttcggtcatttgtaataaaacaaaattagccatattaatgactacacatatgaagtctttgcaataaaacaataaaacaaaatacttcattcattacaatagataagtacaaatgcatcggtcacaaggttatgccttccatatgatctgaacgagcatatgccacaggctcttggggatcatcgtcaaggtcgatgtgaggtcttacatgaagattacggttgtattcttcttcatcgacgatgttgtcaactcctacaattcggcgctttccatccctcacgatgtgcatcttcttgtttgaagggtcttttatgtagaatatctgctcgatctgtttagcaagaacaaatggttcatcggcgtatcccacctttgataggtctactaaagtcaaaccttccttgtcggctttgacaccagtgcgtatattcacccaacggcagtggaacaaaggaaccttgaacttgacgtagtatagctcccagatctcctcaatgcggccgtagtatgtgtttgacccaatttgatcctggaacgcatctatacggacgccgctgctttgcactctgcttttgtcatcttgtttgacggtgtaaaatgtgtatccatttatatcgtatccttgccatgtgtctacggtccaagtcggtcccatccccaacaactgtactgtctcatttgggatatccgtggacattgtcacacaattcttgaaccattcgttgaaccgagaattatgtaattgacaaccttccctcgtgacaagacggaggaactccgataggatcggcatcggacatgtaattgacacagaactcaatagcctcctcggtcgtgtaaccttcaatgatgctctcctcgggtttggctctgttacgaacgtacgacttcagaactcccatgtacctttcaaacggccacatttcccttagaaaagccaggccacatagttttgtttgcttcaccagatgaacagggagatgaaccattatatcaaagaaagacagtgggaaaaacatctccaggtgacagagggtattcacaatatcggtctgcaacccatctagatcttctggatctataaccttctgtccaattgcattgaagaaagcgcatagacgttggatcgtgtgatgcactttcggtggtagaaagcctctgatagcaactggcaagatttgtgtgattagcacgtggcaatcgtgagacttcattccaacaagttttagatcgtccaatttaacatacttacttatcctcgctgaatagcccgatggaactttaatatccttcaagcatgataacattgcgatcttctcatccttcgacaatgtgtggcaagctggagggaggtacac

SEQ ID NO: 23002 - DNA, 3579 bp, Oryza sativa
ctttttagagtttttctttttataaaatcattttaactttgtttatttcttaataattattatttgtgctctgaaaattccactaaaatttgagggctccttttagaccaaggagaatttaacaaaaattctccgggccacatttgaatttttcttgtacgtattttagtgtttgccaattcttttagaattttaattaattctattattccttttagaaaatgatttttatttcgggatgaatttatcaggacgtgacaaatccaccccccttacaagaatctcgtccccgagattcgaggaggctagcaagaagataggttgggtggtcttctcttcttatttgacttcttccgctccgtcttcacaaactttcagcaaaacttcaccactcggaactgcttggcttgacctcctgttgcggatggaatcttctcttcacctgacttgaaccagggtgcaccttttagctgactcagactaggttgcggtagtttaatgatgcttccgttccagaacttctcatgattcatatctttggagtcaacctcatacaagttaccacttcatgtcatgcgtcaacactagcttgtcattactaggataccatgtttgtcatcataagaatatcatgcttgtcatttacttctaacttgccaccaactgcctcatattagctttcctggtctccgggtgatagctacttctgctatttgatgcaagggtcgataactttgcctttgaattatgcttcccaagagaaccaacttatcccacttgacatactttgacgtcttcccaaatggctttactgctggatttgttattgtctaatcattatcctgccaaatctgaggcttcgttgttagatgtgattttaatctgacctctgtagattatcttcgaacatatcacttgattcataactgggaatagctctcacgaacaagcaactcggattcactttctttatgttcagtttactttccactattctcttcatgttgtcatcatttagcattcaacgtattcctttgcaccttcagccttgatgtgttctttctcgatggatcgattgctaggaaagtgcgttgaacgatactagtgcaagtgcttttattctagtagcatctgatacaaagcccaaggttgaaccgagctttagattccactgttcaggttttacttcttgacttcttggtcatgtcacaaaagtttccatccttgtccccatagaagtacttctacctgtggtcatctctcttactcgtgaattcacctactttaatgacagggcaactgttgtagggttgattgctatcgggagtcttcctcgagtgacacaaatcatggttctcgttatcctttatcaatcacctttcgacctacttcttttcccagtaaccaaacatcttttccgatctcttccattaatcacctttcgacctttctcaaccaggtactcttcgctccgggtgttgaggatgcttctggggcaatgaggtccttgggcgtgctgtctttcagagaaaccttgaagtagttcgtcaaaagctagactgacgattgttgcctttgatccgaagaagacacatctgaaactcttagtccaaacaaatgtctctttggttgatcacttgattttcttcgccatcaatcgctaggttatttgatgcataacagattatgagcttacggaaatgagaccctaggtctccctaatcaacaacaaaatgtacacaactcacagcacttgcaatcttaacatggatccttcataaacttatcaaactcattcattatctcatgtttctctgttattacatgattgacggggaacaactataaaacaaaagtatttgaacactgatataagagtattatggttgcttctgactagcgctaggcttaacaggtactgcatttgctccagtgaccacttggcgattggcatgtctgcttccttaacaggtactacagttgtaacagacaataactttcttacgctcgggttcttcatcttgtacttgatttttttggctgctgtgctggaacatccaaaggtataatgccgatactggcctctgtcttgtcaactgatggctggggctgaaattgagcattgacaccttgtggtaatgcactcgctggagttggagctgttgcaacgcgggctataggactgcttcgggatgcatggatgacaattcgctgaggagcaagcttctgattgcagggagttgcgtggactgacgtgctggcagctatgtttctcggttttgggcacttgtcggcgaaatgacccattccttgacaattgaagcaacagatatcttcccggactcggcattttcttttctcattttgattcctctgtcctggcactggagttaggctgaaactgtaatcttggcgagatttgtgttgccttgatgcttctctccgttggaactggcgggttggttggccatcttcttcgtcagcagaaaactgaattgacaatcttttggtacatgatcagttccttcacaaaagaaacaagtgatcctgctcgttggacacctgtcgggtggatggtcttcctcacaatgaacgcatgtagtggcacacgagctggcaacatgaccgattttctccacaacgagagcatgccttacgttccatttcatcttcatcatctgaggagacttgatctgaatcttcactatcagacactctacctccattagctaaaagatgctctgtcaactgtggtgcacctcggaaggtatgtcttctctgacgttttgtcattcctggtggaggccattctgtgctggtaatgatcatcttacggacttcatcttcggttcgcattggtgtttttcttttctgctgaggacactcccttgcatagtgcccttgctcatcacacataaaacaaatgatacttgcttcttttgagtcaacatgtggcacgtcaccatgggtccttcgggatgctggcggcatgctgacttgtggtgtgagtgcttggactgcctccaactgcacttgaggttgcatctgactcaggttcagaattggcgtctgatgctgctgtagtatctctataagcaattggttctggttaatcaggtgttggaccagtgtcacacaactggtgtctggtgcttcattcactcgggagcttgaggtaccaatgtcctgacttctgaccttattgcctttctcattgtcagccatctgttgcaaaggtttggagagggagagagggaaaacaaaggggagagacagattagaaactaaggatagtaccttaacagatctaagtcttttgctgttatgatgtatgttaggcttattctgcaagttgattaagcaaacaacctagcatggttacatcacaccccactgatgcaaaccacgcgctacacacacaagcaaggaaacacacgactaacgactctaccctagagggtggcttaggttctgtgacgggttctcaagatcttcactcctgcttcacagctggcttcactgattactccacttcgctagcgatcctgcagtcttgcggagcttcagcaaacaactgac

SEQ ID NO: 23003 - DNA, 1118 bp, Oryza sativa
tttccttcgatgtgctcttctcttttcgctttccaactttcctcttttttccaaactcgttggttattcccatcactaagttgtgcacctctgtccctgttagctctgtcgggggtccggctgtatctctgtgtccattgaaattctttctcatattcctatacggatgataccttgggagaaatctcctgtgacccatgtagaccgtcttgtgtgaatgcttcaaccatttgcttcttgtttcctccatacactccgaacacgcccatttccctttcacagtttggccagaaaggttgccaagggccggataatcgttgatggtacaaaacagcatggcatggaggttgaaatactcttgtgcatatgcgtcccatgttcgtgtgccctcattccatagcctttcgaagtcatcgattatcggttcaaggaacacatcgatatcgttgccaggttgtctcggtccttgaatgagcatggcaagcataatgtactttcttttgaaacacaaccagggaggaaggttatagttaacaagcagaactggtcatgtactgtgacgactgctcaaatcaccaaaaggattaatgccgtccgtacacattgcgaaacgcatgtttcttgggtcatttgagaattcctggtaaatcctatcgattgtcctccactgtactgaatctgctgggtgcctcagcatagtatcgactttccgttcttcggcatgccagcgcacaagcttagcttgttccttgtttgcaaacattctcttcatgcgctccgcaattgggagataccacaccacctttgctgggcctcccctctttgacttacttccttcaccttcactctttgctcgtttgtatcttgatgccccacagatagggcagacatccaagtcagcgtattccttgtaatacaaaatgcagtcgttcggacatgcatgaattcttctgacctccaggcccaacggacataatacttgcttcgcttcatatgtcgtctgaggtaaattgttcccctctggcaacagatcctttaacagctcaaggagttctgtaaaactcttgtccgaccagccattactagccttaagcttcatgagttccaacacgcatgac

SEQ ID NO: 23004 - DNA, 9888 bp, Oryza sativa
ttagataaaaaaagcccgtcaaaggtattgctcatacctttgacgggcttctattcaacggcccgtcactggtatccgctcacctgtgacgggctagaaatgaaagccgtcacaggtggcggcccatcacctctgacggcttctaatgtatcggcccgtcacaggtgaggggataccagtgacgggttggaagcaaaactcgtcactggtatacctctgacgggttttcctttcggcccgtcacaggtgaggggatacctgtgacggtccgcggccggatggctcaccggtgacgttatctcgtctgacccgtcagaggtaatggtcactagtgaccaaatcgtttgcccgtcacaggtatcccgtcagaggtgtgaggatctggcgtagtgaatggatatttagtatttatatgcgtaacaaaaagatgtatgaataattaatattcaccacaacagtccctttggactagaacattggatttagtttgggtgaataattattttcttaaataaaaaagtttggggtgattaatggactgctaaccttcttcgtagacaacgccacagaagcccgaacaacggggcccacccactagccacagtaccaaagggtctgtgtcagggtttctctctgattcaacgaagtagtagaagagctcagtgccagtcttctcctcaacaccaatgtacctattgtgtatacattacacatgtacgtgcatatgtacccaattctatgtgatgagtttatgctcgtatagtagtagtatgtagaagaaaatgggactctcggtgagtagtgcttacccagtctcgaggtagaatggcaggcggccatggaagcccgggaggtgagtgatcaccgccgacgacgccgagcacgggagcgtcagtggcgacgacagaagcagaagaagaagcagtaggagaaggcaggtgatgaggcgcggtggctgcacgaggctgcattgccctgcggtggggcgatgatgagaacccatcgtgaggagtggagatccaagaggagcgtggctggcaagtgcttcctctgttactctgctagtgctcttatagctttattgagctctcggcaagccaatgaatgcatggtgagaggccagcggtaaaagggaatgctaaaatactcctctgttttctaatatatataagatggtgttgagttttagcgtgactattcgttttattaaagaattataaattttatttatattgttcaaagtacaagcatgcgtaagatgactgaataaaatgtgtaatgattcactgtgtcaattagaattacacactgcttcctccctctctaaataaatacagtttgagttaaagatatgtaataagtgttgttttatagtggttcactgtatctctttaatactactccgtcattctgaaatataaggccaagcacaaccacttttttcgtgatgtttcataatgtaatgcacaccatatagttaacttagcatctccattttcctaaattagtttttaaaaatcttctaacttcaagatctctaatttcattaggtgcatacattacatttattaaagtgatccaaacgagaatatggtaataactatttcttgatgtttgcgttagtgatggttgtgccttataatttagagtggaggaagcatttcatcattttcttcttgattttagcaattcaaccaatagtaatctctcctcgttttctcccccataccattctcgccacataaatcaaacaaattgcctgctccactcctgattcccctatgtttactgattagattccccttaacattggcatctccagaagaaacttacagggagcccttgcccggtctcaaggtggaacggcaagcggctgtgaaagcccaggaggtggatgatcgcctatgacgccgagcacgagagcagcaacggcaacaagagaaatggacgcaggtggcgaggcgcagcggctgcaagacactacattgccttgtgaggtgagcacccattgtaagaagctccaaaaacactagatggagccttgtgttttaccgcgggatatatggatgcgttaaattaaatgaatatatgttaaatgccataaaatttatagataaatttggtttgggttgaaaaattatgaaaaaagtgtgagaaatgataatttatgcttttatgttgaggtttggaatgtaaggaatggtagatataattgttatgtatgaatgttaagttttacgtgtttagtgagttatgtgatatgcttgcatgttagattttaagatgtactaataattattatgttgaactttaaatgtttagtgggttgtaacttagtagaaggtaaagatttgttttgttttatcaatgcctggaaactcgattattctacaacaaaaccaagggcactgtttgaacaatcaataggcactactaactgattctccatcagacagtatgcgcattagtatgcgacaggggcgtgcggtctcttgtgggcatggtatggcacctgccatagctatgttacggcgtgaatgctctcattacttctttatcagaagtctcgttgaaaggaagcagccgagaatggctgcaccggtgacttgacaagagctctggctcactggctaacctactcgatcgggtgatggaatcagtcaataagacaatattcatcggaacagtagttagctcttagtgattatgtgattaattggttttttgagttgatagaaatttaacttggatgaaaggtgtagatatctaagcagcacgcagcgccaaaagcggcaacaaaaaaatatatgagcaagaatatatgacatttataaagtagggaaaagctcttagctaaaattacttcaattataaaatatgcacagaaaaatacggattataattgttgattgcatttagggtcatatattatatatataataagtacggctgtaatatagtgtatataaatttatttttttattaattataagcatatatcatttagtttctacgtgtcgactccgtcatacctaaactttagtgttgggtacatcattggtatgcgatacaaaaaattaacgtgtcaccatgtcgttgcctcgctatggccgcggcgcccccttgaacaatcaataggcacactactaactgattcccccatcacacagtatgcgatacaaaatattaatgtgtcgtcatgtcgtcgcctcactggggccgctgctccaagcagcgcccgctcgagcacgaggtctggtttggcgcccctgagatcctggaccctgagaggggtcagtgatcgatgttgggactgggaggcgatggtagcactcagggtggtaggccggtggagacggtgatgggaagggaaaggaggaggaggtggtcgtgcccgacatggaggagggaggggcgattctatactgagagatatataggaggagatcttggaggggagcgacagggcggcactgattgggagcaggagtgctggacagtggagttgacagttgtttcggacaaaagaattttgttgttgtttcctccaaattttgccgcaaaatccctcttaaccaaaaggaggtctttcaatttaaggtccttggatattttgattctcaacatgtggcatcttcattatgttgtatgtgcactaatctttccagtttgtgttctcgggactgaatgtggcagctaatcaaaagcagggcttttcaagtaaatttcacacctcgtcgcaatgctcagcgatacaccatcgatcatatgattttatctgacaataaatttcatatttcttttttctatatgattgctaaatatcgaaatatatgagacattttccgcaagtattgtgttcgaaatatcacatgagccattggtattgttatcgcaagaaccagatagaacggtacccacaagccacaagcaggggaaaaatagaaagaaagaaacacatagcttttttttagataatgaagaaacaaataggtagcagtgtgcaaacacaaaaactctggccttcctatggaggaaaggcaacttagttttctgagtagcagactccttcacggcagcgtgggccggtagagaggatgtggagtgtaggtgggacagggtgttgaggctgaaccaaaatcacttcaatgtgcaaactacaattcaccaaccggcaaatatatttcacacattaattgagctctcaacttgccataaactttgagaatagtttatactagcaaatcaggagaataaacacatgcacacaagacacgatgatttacgtggaaaaacctcctcggtgtgagtaaaaaatcacgggaccaacagtctgctccaatcaataatgcgtacaaatggagtcttctctaaaacatcttgaggcatatcacaatagcagctatatcattaagttacatatttgatatcatcaatatcaacaatcacaattaacaagaggtataataacaataaccagagaaatagtagctttttttccttcagtttttagctgagatctcccaaaccacagaaacaaattgcacgaaacttggcagaaatgatagtctatgagtcccttccaagatatccaaaaaaagcccaatcggacatcgtttgacccgtcaaactgatattctaccaaatgccgcacaagctgaaactacagttactcgagctgataaaccaccactcgaattcagtgctctactcaaccaatcctcacaaaactaactgattgaattgctccaagtgagaaatgaactcaccaagtttggtgccaatctatcatgtttgagcctccaatcgctgacttgatgaagatcgagtaagggccaccaagctgaacaaactgcaactcttcttctacactctcctctccctcttatgtgttttgttggttgcttttcttctctccaatggctgctggcatgctgctcactctctctcaatggagactagggttttccttcctatcacagagggatgaggcaatctccacccttgatcatgatatgaattaatggctcatatctgttggacttttaggctgtaatgtgctgagagcaaaggctccacgtggagagaatttagcccaacacagtggaccgactcaaccactagcagaagttgccgttgagcggacaagctgctggaagagggtggaaatttgaggaagggtgttcctgtttttacgcacccaccttagagtgtacttgtcaactataacagcaaaacgtaatggattttgcattttctgaactaaatagagtatcatctatcctgtgctatggaacaaagttgtgtttttttttttggtattttgtgatattggctgtccagctgtggcattaaccgaatgttcttggcattatccagccgtactatgttatccactaaagactaggttatccactaaaggttttgttcaatcctctttcttgaacgttaatgtatttaatcgtacgaatttggttaaatagatgctaatttttatataaacttgagtcaaacttgtctaactcagaagagttaaaatattttataatattcaacagagagaataataccaaataaattagccaaagttacaaaaaagaaacatgtttcacagtatcaaacaaaactcaaccattgataaacctaacatatatgaccgaagtcaccaaacaccacgcatgatctgacatcatctaccattcaggatacataaccttaacctaacatatgaccaacttttgtatgaatagtttaattcgcatgaatgcacacacgtcgaggggtgatggcgatttgctttcccccatcgtcaatatatatgaacagactgtgtctttcctgatgatgtgccgccaaataaaaacttgatttaattttcttttgcagattaccgctagcaatctccctatcagttcgacacccagcggtgtggaattcgtatatacaagtatggttcacacaacaagggtgcaaatatctttgacatgctcatgtttggccacttcagtctcatatctatggatcgaatcagtacggtattagttctcacattttgtgaattccaaacgaccaaaactagggttaaattcaaaccagaaggcattcgaacaattggccaaagctaaattcatgacctttcaacagtaaacaccttgtaatttaccgttatttttttgttgtttctgcagagtttcaggcttacattgctcaccgtgaacctctgtatcggatgtgcctttgattagtatttatttaaggatgactgaacatggcattcactattctctctgtctctttgtttactaaataatgtcccctgacaatgttatactagggactgttgggcagtttgtgcttatgcacgtaacacctgaattttaatatcactagaaaaaacgcgcggctttgcacgcgtggtacagtgagcctggcccattgggcctagtgaacaggtaacaaattaatacgcatatatggaatagccagattaatagtagagataactaaagcttatattagagcttataagttggctataagattgtctctatatttctttttcctctctctttatcttacttataagaatttaatgtgtttaccttgaagcatgtgtagagttagattttactcgaaagccaacactatatatatatattttaatctctatcatacacgtaagtttatagcccactattatttttgttctaagagcaaattttatgagcaagttttatagcagaggtgattgagaccaccaatttattcacatcatcaactaattaattaagatgtagcatatgtaataaattgtctctaacataccggctccaattttcatccaatccacaccattcttttcttggagtttgtgaagagattacccctttcatgaggggtggttacttctcacatactgtcttgtagctcgtgctgcaactaactaataatatgtagtctatttttcttcactctccttcgatgttctatagctagcttattgctttatattgtacttgttctaaggttgcattcgataaagggacaaacaaaggaaacgtccatcatttttcacccatatgtcggagtgtttttacataaaaatatctgtagaaaagttacttttttaaataatcatatttctatatttttcatgtttgaaacagtcctaaatcacctgatgaagcgataatggcacacctcttttacgtatctcattttttccctcttctctcaaatatagcctaaggtatgtttgtaacttaggaaaataaaatacatggaagaaaacatttggaatataaaacacataaatacaggtgtaaaacatagaaataaaaaaacatactccctccgagttgataatacttgtcgttttggacaatggtacggtcttaaaaaaacaactttgaccattattttttattataatatgtatataaatgttaacaaatatatgattttattgaagtactttttaagactaatctatacatatagtcaccatatttcaaagacaaatattttagaaattattcataaccaaacattttaaggtttagtctcacccttgtccaaaacgacaagtgttatcagctcagagggagtagaaagtttaaaaagattaatatttggaacgtaggattttttagtggatgatttaattacatccggctaatttattttaatccctaactaaagtaggtattattaattctttgatcctcaagatctggtggtgaaaggaagcaatagctgcctgcttgcctgggctttgccagccgtacggcggcaatgtgagaaatcagcgtcagcaacgtggtacagttcattgatcagcatacaccgggtgtttgcactacatgtatgcatagtaatggcgccggctcttctagaatcatcacacggcataattcgcatgggctaccgatcaatggcctattggggcctgattacggagaaatttctggaggcctgcacacacgcacgcaagagcgtttcgtcgatgcctgcacgagcggatgcgagatcgtttcgtcgagcctcttatgcgaaactggagttgccacgtggcacgtttctccttttgatggtttgcattgaattcgtattataagatatcaatcgcagtaatgtttagttactttgtcaaaattaaaatcaattataatttatttaacttgaatcgtaaaaccaaaaattttgcactccttaacaaacaaaaccatgcaaaattacgctccataagtgagacatatttattgatatgcgacatattgaaaaatcaaaatgaatataggaaattagaaacagattgttcagcatgtctgcttccaatgaagaaatcaattatctttaaaataaccgtaaactcaaattctgttagtagttttttcataataggacttgcttgtgtcaatgtcctgattaattttgaaatgttgaaacgactctggtagcactaatttacctccctgtccttccctgcattcctccaaccacatatacctgtgtttagttaagcgtaaagtttggattttggttaaaattggagatgatgtgactgaaaagttatgtgtgtatgacagattgatgtgatgaaaaatgactgaagtttggatccaaactttagatctaaacacaagcctaccgtcaactggaagaatagcttccagtgctagctagcagcagttttgatcgattctgcccccgaaagagaggtggatgcggatatgcacatgcaaatctgcaacgccatgggcttgcttgtgacgatgcgtacttgattgaactgacaaccattgcgtttgcgtcgaaagcagttttttcagactgccaaattgtattttcggaggtggtttctcgatccgaccgcccctatgggaatgactgttaaaatacatgaaaacaactacgtagtacgtacatgtaaaaatacatttccacgtgcatctccttaagatgagtgctatggatattttcgtaggctgatatctaaaacatccgactatatatggaaatgctctttccatggaaaggaggttaacatgcccgaccatacaatacttttcaatccaaggaaaacaattccaaattcacatccacaaattccccaaattcgtcctaaattccccaattgacaaattaatatgacagtctctatctatccatatgagtttgtctagaaagaaaaatctgacaactgcaaatggccacaatgacaaactctgttcccctgccaaataaaaaaaaatgacaaaaagataagttcacgaagatcactgctcttagttgaagtgccaaagattgagcagttcggcctccacgggctttacatccggagaggtcaggcctccagatctcctctgctatgctccttcttgagctctatagatagagaggacaattttgggaggacacttaattctcgaatgtgggggtgttgagctcgccgatgatgtttcctcactgatcccactaaagccaccagtagcctccacatcgagatccatatttaggactccatgccagatcgactcttctcgggctcccgggctcccgggctcccggccaggacaacatggaggagggtagcacggagtgttttcaatgcacaattgttttgatcgatgcaatttaaatgtcatgtattaagaccgttatgatctatcacgacaaaatgtttgattaagccacaacgttcaattgcggtgcataacaagagcagcactatgtttagcaaacatagattaaggatacactgtacgtgtaactaatcacataagaactgaactcactgaaatatagtcaaacgcaaacgtgggtttaaaacctactacttgatatacaaaagagcaaattaataaaattaagtagcattacatggca

SEQ ID NO: 23005 - DNA, 1693 bp, Oryza sativa
tattgagggtaagaaatatttccctatattcaggtttaataaataatagggtagcaatgaaatgctcatcactgccttcctcagcaccagcattaacaattaactccatgatctcagaaataccgcatcctacttcactgattctcacggatgtttctgaatttgtttgcttctcattctcaatgggatgaccaaaagctgaaaccacataatttttctgaggatcgatcaagttattcgggatatcattagaagatttttgtaattttgcctcctcatttcgcctattaacatccttatgaatgatcccagcatcatttgaagcaatggaacatttctcgataccaataatagcattgacaactttattagcttcagttcctggtaaaaccgaatccagcacgccgtcaaagattatatttagcaaatcaacattctcaagtggttcaaagtgaaaattttcacaatccgtcactgcctgaagaagagttgaaaggataacatgtcagagtaaaagtagaaaaaaatctagctatagatgaaaaggaagttatgcctagttgcatctaatagagcaagagagtggactatatttatccatagtcagctaccaacacaagaaaatatcactacaaaaataatactcacaagctccaacaccattagttttttttcatacagtagatatagctaaagtaattcggcgcagtccatataactttttacatttgttggagaaaataattatgaacctaaccatataccaaggagggtcagaactgaaatggtatatattaagagagtgcatgtcatggacattgagctaatcttgaaattatggaattaaggaagtactagaattgaaaactaaacacgagtaaaacttggtatttattatttccaatgtttaaaattattgaatcatagaagagctataataattgaatccaaaattaactctttacaatttcgtatttattaatcctagctaccatacttatttaatgaagaaaaacatgaaattattaattttaactctcagaactattaaatgataaaatacaaaggaacagaataaaagtataacatcagacattatatacagaatataatctataagatgtgcatttctttagttattactaatcataattttaaaatcattaataaattgaattgttttattttgtatgaacttaacattggtggttaatttgtagtctagagagaaattaaccagaactgcggaattctgatcaaacatacccagataaaatatttgttaaatctttagttcagatattttatttgttttcttttgatagcagctgctaatcgatgacataattgtgatacattttgtactctactgtcaccatgtcatcttataaactgctacataatagtattaaccacaaaaaaaaaattctagccatcattaacagcaaaacagtttggtgatggatggtcccagtgttaattgcatgattacctgagcaatgtgatgtactatcttatctgggaccattttttgcttgagcagatcacgaataagacgaatctttccaagtatttgatgtttcactagcctttctttatcccgtcgctccatctcttgctctcgtccagtcaatttgtagatgtcggctcgaacattgcgagcaatttcaaatgcttgttgacatttgtccga

SEQ ID NO: 23006 - DNA, 12815 bp, Oryza sativa
taaagtataataattagtgtaattttatacaatgagttaatctgtaaaatatattacaaccagtcaacaagaacttaattaatatacctcgcgcagtttgagaagttgatcccttgtgtaacggatttgctcagcaggctgaaaacatgaattcccacgctgcagcagatcactacaaaattaatcagcatggcaaaaggtacaaaccacataaaaagttggcaccccgcgtcttgccgcgggttttttagttttatcgttaaacaaaatcgtagttttaaatggttaggtgcaactctgtatatatacaaaatatataataatgtggctttatatatatcttatgttagtataatacaattcatgcttcatttttccaagcgtcattgtgtattgctataatatatgaatattattttcatgtgcaatatgggtattgttgtagttagacaatttgcatctctctgcttcattcaagttttttttatgaaaattgattcaggtaacgataactaataattatatgctatctaatcatgcatagtaaaataaaacacacatctttaacaataatttgagttatgcacaaaatatataacagtgctatgtgtgactatgaggtggagcaaagggaggtgattgtataactaataaatgattgaattggatgaataagtagcttcttgatcaaacggttgttatctttgtactaatgtgatctgatgtcttaaaattgttgatgatgtggcttcttgcatgtcttgctttatagaagtaaatgccctttactaggtatcaactatataagaagataatataacacgagttgcacacataaataatgatgcagtatcaagtattgtctcaagtctcaactcgttttcatgcttggctctcccattggatgagctattgcagctcttgctcctcaaaccactgctatccgaccttactcctgttcatgtctacccttgttatgcactacaagtatatcataggcattggctaatgcttcccactcaaaacatgtttgaattaagccaacaaattgtagtattcgactatcaaacttcaagacagttcagtttgcatggaaattgcctactaggagaaaggggctcttttgtttgagtatgtactgccaaatcgatctcttagtgccaaccgttaggtaagtaattaatggcattaccaatgttttggatgaatagggttataatagcaaccatatagacaatgcaaataattgcatattaacccaaacatttagcaggtctatatttaacatgtcaaatatttcatggtgcaagttcgggatcacaccatatatagaaattaaagcctacaatattttgaacaaaacttacctgaaaatcatctttagatggaacaggttgctcatttaattctccatggtcaaggaccgagtaaatgttcactcccgaggatatttgattggtttggagagagccatcccacttctcatgacctgagcctgaatttggatggtgaaacttgcaattactgccaaatttacagattccgcggttcatgtagtatgagcacaatccagtcccctgcggaattacatatatcatgttttcaccaatcaaattgtaatttatgaaatattgaaatggcagtattaaaggagccatgttgagatgaatgaagaagacaaagagaattaaagcttgctaaaaaaagatcggcttaacataactttgtggtgaaggaaataaccccacaagaaaagatgtacagaaaaacttacaggacgaagtggaagcccaagaaagttcagctttacatgctcagcttcactttttccttcactatggtggcagtggcaagctttccaaggaaaatactgaaaaacactttgtttaagaaaaataatacttccttctaatgacgtaatatttatgcatacattgatttctgaatgtagggatgggccatcgtgcaaaatataaaagaagatttttttacaaaaatgttttgagccgatgcttgtgatttgtaaagaactcgcatttcctccatccttccctttttgttctgactgaattcacagaattgcaaatttagtaactaaactatcgactacaatattatatagtcattttcaagttaccacaatgttagtggacgaaattatcagaaaactgtaactccactacgacctggattactttaaataagaaaattgtcaactgaaaatgtttgatatataccaagcttgtctctatcaaaaagtagtttgacaactttaaatgttcattttatccaaatagatcctagcactccaaacacatattcgggcacgtgaatatcttaatgaaaatgtcttgaaattagacgttataggtttttccgagctcttctaaaactgttatgcaaaccttgttttcatctgattttatatgaaaaatatatcaaacgttgactaatcttttttgaagggaatgttgtccaaacattagcataccggcatgtttacaaacattatatagcatacctgaatatactcccttcattaaaaatatttttcatagatgacgtcatcatgttatgacattatgtttaatcactcattctattcaataaatttataaaaatgttatttattttattttgttgcgacatgttttatcatttaataatgtttaagtaagacttatacttgagcatgtttgcactaattttttaaataagacgaattgaataatcaaacattattctaaaaatcaaccggataagctagagaatatgataaagctagcctatattcaccgagcaaagaaggccctaataacgaacgtaccacttgctgctgaggcaggcggtcgggagggtggttgaacctgcagttcatcccgtacttgcatctcccgaacctcaggtagtggaggcagtcgtgctccccgggccgttgcgggtgctccagcttgtcgcaaccgccggcatgcttcgcagggtggttgtacaggcagcgcatcccgaacttgcagctcccgaactccacgtagtagctgcagtccggcactccgggtcgccgtgggtactcctgcggctcaaccgccgccttcggttccgtctcgccggcgctgctgctggtgccagcaggccgccggtcatccaatgtcttcaccgtgctgctggcatgttgctgcgagggcgtcggcgaaatggcggcgggatcggaggcggaagaggaggtggtggtggccatcggagtggaggaagaacggtggtcgctgttgcaacactcgcagaggatttgcatcatagctcgatctctctgtactatgtctcttggttggaggagttaatttggtttgcttgctgcttgagagagagagaggtggtgatcgaggtagctagagagtggtgcgtgttatagtgagaagaaaagggggcgggaaaggagaaggtagcgtatgtctttcggccaaaatgatgtggcatatgtccttgttccttaacggtggaggactgaaggatgtgcatgcatatgcatgaccagttggtccacttaggcaagcaggtaaaagggaatgggagggaactaaattaagaagcgtatagatcgtaactaactgctgtaactcattaacactctctctgttaatttggcagatatagtttcatatctgtaatagtaattgcgttatggccaactgggactgtctagctctcaatgatcgacctgaaaatccatacaaatttcagtcacttttcaaccgtccaggttgctcgaatattcatgcgccagtacccttattttgatgtcttctcttcccctctgtctctctccccaacacgagcgcttcagatcgagcgtactcatcctcgagcgccaccgtctcgcccgttccagcatgccaccaccgggcttgctggctgtacgttaaaagtgcttacgagtaacgaggcccgcgaaaccggccggctcctcctccatctcttcttccctaagccggtggtggcaccattgccctgcatcgccctggtacagattggttatttggttaacgattgatactatagttcaggtagctccataaaaaaaatcgtaccatgattttatatttaattcaaaaataaaaatttgaataatccttttgctaaagcagagaaattttgaaatttttgagcagaatcagataatagaatatatgaaaactagtgaatctttaatataatatctagaaattttggtccaaaatattgaaacctacatcctaatgtaccaataaaagtgtgtagcaaccggcaatcctaagtactgggactatacaagtggaagcaacttgtgcgcaggccttcttctgcattaggaggcactagcaataatatagaacctacatgtcaatatagagtactgcagggatcctgttccagtgaaggttgcctctattcagagttgtcaaggggtggtggcaccctcgttgtggtgggggaggactggaggaggtagtttgtggtaaagaagcgtagggaggttttcacaatatggctgctttccaacagaactaaataaaacatcattttccttcacctccaagataaattgttctaggtaggatgggagagtggtctattctagtcactgatataatatactcgtgtgttgcaatgggccagacccatacaatttgggatgggctaggaaggtcaattgagatggatagggaaggcggattgaggataagcaccggagatggtggttacgaacatgaaggtgtgaaagatacaatgcacggcgatagtaagaagaggtgatggaaggcgaacgactccgcttttaattagtagagatatgcattgggcatcgtttacagtttcaatgacgaaccatcgaagtggttctaatggtccaaaccattataagttagggacaattacgttcttgacactacttttagatgtaattgtgatgttctcctaaaataggtttgtgaattttcctctgcttttttaaaatgaagttgccatataccccaactctggatgaccatttggtaggcctccaataagagattgtgaatattagataaaattaactgagaatatatgaaatgaccattataccttctcattgcactcatattggttgaaatgaccattataccttctcattgcactcatattggttcacctgatccccattcctaaatcaagcctaaccctagatatagtggtaactttggcggctgtgcacgaatgagccagagtgaaagtagaagacgaagtcccccaaaccgcactggtgattgttggcgtaggggatgtagtcatagtagtcgtgcggaagaagccgctagctttatcctaaagggttcaccggtgatcagcagcaggttagcggcgaccttccggttgccacctaccctgctctgggtcagccaaatgttctccctgtaacgcttaactgattggatagggtttagggttttcagggagaagatgatcctggagagatatgatcatcatctgtccacgacatcggtctcccctataaatatggcgctgagggagaccgggcgcaatccaaaatatggaaggttttggcgctaccgatcaacgtgcatcattaaagaaactaatagtgatttggaatgagtagattacgcgggcatggggtgaaaattaaccacgcgtgatctcctccggttttcttgtcgagagatcaaattttgccagcaatatatccatggcttgcttatggggagcacagtgaaaaattaagttattaaggaagaccaacgcaaactttggtagcaaaagggcccgtatacatgccccaccacaggagacaaagtgaaaacaaatggaaaaaagaaggcaacacacgaaaagtgcttttgaaccaaaccgatttccttttcactcttgtatttccttaacgcccaaggacaagctaacttcaggctttcttctttgcagatggctgagccaaagcacacggttgagcagtggaaatctctcctcattgtatttttttactactacctccatctcataatatttgtatttataggattcaaatttatcccaaaataattatcataatagagtactaattatcatattagtcacttctcgtttaagtttattgctattttgccctagtcattgttccactcttatctatacatcatttaaggaaaaatttgctacaggacactccaaaaatatgtaattagctgtaggacataaaaaaacatgaatttgcccgaaaacactccgaaagtatggtaatttgctgcagtataccgaacgcattaaaatataatattcacccaattgacgagagagaaaccatacaaaataacatatttgcccttcttcttccgacgctcacttgcagcgagctccattggcttgcccatggcggacaaccgctcagtgtagtcgacggcgcggtcgtgcggcatgccactgtcaccggcctcgtccttaccaccaagtccccacctgaccgcgagcgcgtcaccgagctcatctcccgcttccgtggcgccacaagctctggtggtctcctcgagacgttgcacgagctcagggacgtggccgctgtgagcgagcctaacaggaagctcctcacggccgtccccggcacggtggagtgctggagtgatcgattgacaatagcaaagattcacatatataggaactatccattttctgctgatggagtgatggctggttttgcttgacttgttgcttgctgagttgctgctgcacctgcaccgctatggcgccatgcgaccttggctggtttgccattgcctgctagcttgccaactaccatgccactgccgccgccaggaacccggcggcctcacccctcctagccttcgcctgccctcctgcatgccgcgccggctctaggctccacagcagccgccgttcatcgatggggtgacgaggatttgggtcgtgtcacgtcctgataaattcatcccgaaataaaaatcattttctaaaagaaataatagaattaattaaaattcgaaaagaaattagcaaacactaaaatacgtacaagaaaaattcgaatgtggcccggagaatttttgttaaattctccttggtctaaaatgagccctcaaattttacttgaattttcagagcaccggaaatatttattaagcaacaacaacaattatcaaagtttattaaaaagaaaaacctaaaaataatcctccttcctcctttgggccaagtcctccctctctctctccctcggcccgcggcccaagtgctctcttcctccctctctttctctccctctccttctctccctccttctcttgggcctccccttcctctcccggcccactcccttttcctcccctcccgcctgggccacctcctggcccaagccgccccacctagccgccccagcctcccgagccgcccccccccctcacgcgcgccgcacgcgcgctaaccgcgcgccccgcgtgggtcccacgcgccgggtcgtcgtcctcctcccgcccggcctccttcctctctctcccgtgaaccctagctcctttcctccctcaaatccgtgcgatttactcatgggattccaaaattaaatagggggaattaatccccattgattcctctttgattccccccaatttccccttgattcgtgtcctctaacgcccggaacggccgcgccattcccggccgccttccatggccgccggccgtgtttcccgtcgccgttccgccctctcccatgcccggctccctcccccatcctataaaatggaaccccctcactccgttctatcattttagccccctcccgcgctctcccgtggcctcaccacctctccccgccatcctcctctctctcccgtgccgccggccgcctccagccgcctctcccttctcgccggagcgccgtccggtcgcgccgtcgccaccagcagcctcgcagccgcctcctctcccccgggccgtcctccgtttagcgtggagagcaccggaggcgcgttcccgccggcgttcagtggcgtcgccgccactacaccgtctccggccggctcctgttcgtcgccggtacgccgatcgatgcctccgtctcctccttcgataccacggcatcgtctccttccccggccactcctcggtttcgccggaacaccgccgtgccgcgccggcctctccatccacctcgccggaatttccccggtcggcccttcctccacccgtgcaccgtcggccgcgccaccaccacctccggcatcgcagcggcgagccggtgacgtcgtcctcggcatcgcctcctctccatcctcgtcgttgccgacgtcccttcggtcggccgctcctcctcgccggctcctcgtctcgttgtgccgccaccgtcgtgggcatcgctgcggcgtgtcccacgccggcctcacctctgtgcagctgccgccggctgccatcgtcgtctcctcgccggccccggtcgtcatcgttgtcgtcctctcgtcgttcccggtcgtcgtggcgttcgtccctctgtcaagccgttctcgtccatcgtccgcgtccgtcaagtgtgccgctgcagccccgtcgtcttcttcgtcctcgcctccgcgtcatcaagccctgcgccggccgcgtctcgccttcgtccaaggatcgccgccgaagtcgttccctcgccgttcgcctccgtcgtccccgagccgtctccgccgcgctcgttcgtctttgtcgttcccacgcctcgtcgcgtggtggtaaggatctctccctcgtcgccctcgtcctcgtcctttcggtgtcgccccgtacccgttgtgcggctgtcgaccccggtacccgtgtaccggtgtcggtagtcgttcgcttgtgcgtgtggagaccgtgttagtgtgcccgctcggtagccacgtggtttccacgtgtgcagcccgcgtggtgtctggtggagtccgtttgtcggctactcgcctcagttgatacacggggtccgctttcgtcgacccgcggaccgtctctgtgtacccggtccaccgtggtcccttaggttgacatgtggagtctgcatgtcaacaagcgcagccttcctgtcttttccaggttagcgcttacacatgttttataattgcaaaacctaatcacaataatctgtaaatcttcatataacagcattaaacttcggatgatcatatcttggtcatgcgaactctgaatcgacccgttcaagtctcctaatgtttgttataaccttaagaaccctgtgctttctttttatgtatcgttattacttctttataggcttgtagctttgcttgtgtgcttcgcgtagcttctgtcgttccggaggttcctgaagcgtggtttgcggttgtcgccgaaggttcggaaggccgttctctctgagtaaggtaaatcacatcatcctttagcatattgaatcctagtttgtaaaattattttgatttaaattaatgcattatcgctttatttaaattcccgcgttatcactgttttatttagccatgcctatttacctttgttatgaccttattattattgctattgtttattattaccttgttcaccctaggaaaataaaaccccaactagtgggtactctattcatggttccactagtatgaatttaggtagatgctcgctgaataattaggcaacattaggtggttttataactttagactttagggatgctcatatcatttggacactgtggaatggttggcttgtgatggaattgaacacacacctccccctctattcaaaactcccaaaatggttttaggctgagctcgaggtgcagggttttgttagtagcacctcggccactataaggaccggtcttcgggcctctgttgcaaagcactaccgtactaaccacatgtctaatgggtaaggcttaactcggtgctcagtctagtcctgaacaaaaggacacggatagagatggatgaagtcgttgcgacgatggatatctctaaggcaaatgaaggctacgcgagctgcggctcggtaatcgagatgtctaggcaaatgaagactacacgggtcggtgcccgttagtcgagatgccatggcactggactagtacgcgggtggtctcacccctatgtgtgtggcgcacccggtctagatcttgttgctaggggctcaatcctagcctgcctgtcccgggataccggcagtaggcagggttgggtcggtacttttgttcacggctaggatgggtgaagggttatgtcacatgtttacgatgggttccaaggccatggaacgggagtaaagatgtgtcttgtgggtaaagatgtacacatctgatcagagtaaatctattcgaatagccgagccatcggatatgggcaagcctagcaatgtacccaagttagtggtttaattcttaaaatttgcttaacaactaaaatgtggaaaggttggcctgggttggcttgggacgagctgggacccaggtcgggttgccaattcggtctgaatcatcgtaggccttgggttaaggcaagttcgtgtaggttcacgtccttgattaataatattgtgtagctcttggatcgtgtttacaaaatagctttgggcaactaagtgacttttaaatgctgtttactgtaaaacctaacccctattattatccccttgtacccccttgcattaatcatgcatctgctggtgtggcttgctgagtacggtggttgtactcattcttgctcaatctttccccccttcagtcagagaagctttggagaagaagtcttagatggagtcctggcttataccccagttgagcgcctgtgaagatggagccgtaggcccgctagtccgctgctgtttatttttgtttgtcaggcctgaagtgcctttgtaataatgtaaatattatcgatataataaagatgtgtcttttatatcatgtttgtgtggtgtaccccggcttttcctgggacggggattaatacactagcgttcgggaaaatgaaaattttctcggtcgcgacaggtcggccggtcggggatggattggggaatcaatggaggattgggagaagaagaattgcaaaacggtcattttgtgtggtttctctctcatcaattgagcggatattatattttaatgcgtctagtgtactgcagcaaattaccatacttttggagagttctctggcaaattcatgttttttatgtccgatagctaattacgtattttttgagtgtcctgtacaatcatttaatgaggagcaccatagtatttcttctcaaaccttaatatatgctaaacaatctagaattactattattttagaatctagaattactattattttagaatggaggtagtaatacattatattgcaaattctcttaagtcataccatgaacaaattaaattttccttcacactaaagattaaattcataacaatgaacattatatattaaaaaaaattgattgagttgaaagttctcaaaaaattttagttgaaagttttaagatgagttgaaaaggagaaaagagaggagagggatgatatagaatgaccgggaaaaaagaaaaggagaaatagaaaacgtaacaaacaagagaaaaaaagacaccaataagaagagggagaggggcatgcgagacgaggcgatagaatggtgtgggtcgattgggttgggttgtgttcgaaacgcctaattggtgaacagtcgcgcgcctccctctccgcgcggcgaggccatgtggcgtgcgtggagagggggcggcggaacggcgcgggagggaggggtccaggtacgatttttttcattttttctgttttttttcttccgtacgtttcagttttcgttctttctttctttctgtttgtttctttccgtattttttttcagttctttttcgttttttaatacgttcttgaatacatactttgtatacatatattttttagtttgtatacatacgtatacaaatttatatacacgtattttttggtgctttcatacgtacgcacacaaactatatatacatgtgtatattttctatacattaaaatgtatacatataaaacaatatatatctatacatacgtatgtatatactgtatataagtacatataaactttgtatatacgtatacaaagtttatatgtatgtatatacatatacatatagcagtatagtagtaagagagactagaggggggcagctgattgcgcgcgcgactagtcgggggtcagcgccccctggttgtgttgggctgggaatagggtgtatagtagttattctaaagtcatacgagtgatatgaaaccaacttaaacacagatgacgtattaaaaattcggtaaaaatactatcactttttataatagttgagataaagatagtgataggttaatatgatgataaagatcctcatggaattgctaaaactaatttaaatctcagcgtttcactgatcaacctaatttaggtcgggccaatgtctatcaaccaatctaagctgtgttcgcatgagtgggatgggaacatattccctccgcacggaaaacggaacgatccattagcgcgttattaattaagtattagttattttttttagaaaatggattactttgatttttttaagcaacttccgtatagaaactttttgcaaaaaacacaccgtttagccgtttgaaaagcgtgcacgcgggaaacgatggagagggagttgggaacaagggcttgcaacacacagtttacgtacatctctgcatcccagtccaccacctccacttgaggctactggcgatgaattcatcctcatcc

SEQ ID NO: 23007 - DNA, 8949 bp, Oryza sativa
cttgggtattacgtttccttttatattatggagcggcctaaagtcctgatttgataatattgtaaaatagatttaggaaaccgatatcgtattggttaaggtttctatcttgtaatcctgccccccatcctatataaggtgggcaggaggccctctagggggcatgagacaacctgatcgtcagatttatactatactcggcggattcaaatccccaaacaggagtagggtattacctctcattgagagggcctgaacctgtctaaatcctttgtctctgcatccatccacttttaggtctcttgcgctacccccttttattattgccgaattcatgtttcgacagtcggcgcgctaggtaggggttgcgtcgaattacccatctataagtgtgatggaatcaacttcagaacaaatgctcagatcaatctgatcaagttcgatggcttgaatcttcaatcccggtttgtctgttctaatctgatttgttgttattagattgattaatcgcagattaaactctgggtatcttttgtgtttaccttatgcatgattgttgaaatcaaccgtcatcgccggctcaccttcatgtcgtgtccgcgtgatcttctattaatgagatccgccggcttcctccgatgacggcgttgtgctgatggaccattaagctagccatcggctacagggccagatactcagatttggtgatggttaatttttttttaattaatcaccgctggcaagccggccgacgccgacttcttctgcaaatcgatgaaaaagcagacagcatgcaccttaattatatccagatcattaattttctattgctaattggattgatttctgattacaaattaattaatgcttttttggctatttcgttggcatgtattcatgtactccgtatcaaacaaggaccatggtgggcagcttgttcggcttcatgacatcatctccgcccagcagatcagatggatccgcctgatgcgccccacggcagcctccacgctgcaactggtgctgctgcctcggcgtcctccctgcgattttcctggagtgaatacatgcatgagttgatccatcgatcaacgtgcactatttacttatataatcacgcgtatatttgcatggatttcttttgagctgaccgcatggcaaatatcgtcacggccacaactagaaccatcaattcatcgggttctttccttttaacttattattctatattattagattgatttttaatctcagattaatctcttgctattttttttgttgttgttcacatataaaattacgcggcactattgaggcgattgatgctggtcatggactcgaggcgtctcagctttccggtcaatcggccgcgagtccactccgccggattgtcctcgccaccgccattgctgatagcaacaacgacttcaccgccggcttgcctccgtcgccgccgactggtgtctccgcctacacggctggcctgttatgctgccgtcattgggcgtttacgacttcaccgccggctcgcctccgtcgccgccgactggtgtcaccgcctgcacggctggcctgttatgccgccgtcgttgggcgtctatgacttcaccgtcggcttgcctccgtcgccgccgactggtgtcaccgcttgcacggctggcctattgtgccgctgttgttgggcgtctacgacttcactgccggcctgtctccgtcatcgccgactggtgtcctcgcctatacggttggcggactccgcctccgttgatgggcctcgtcatctacactggcttgccttcatcgccgctgcctagtgttttcgttgctactgatggacgactttgtttccacattggccacctctatcgtcaccgagggaaatatcaaaaagctaagtcatcactaattttcttttttatatgatattttccttttcctctgcctcactacgtcaactggttcgtcgttgcctagtgagtcgggggctacagatgttatatcaatattttttcaacaattttcttaatatttatcttgattgctcgcgacataacctgagtacaaaagtgccaatcgagttatggagtttcatcttcctatgctttccgtttggtttgctaatggatagttgcctttgggctgattcctagcacccgggggctcgttggatggaccgaataacgcaaggtgctaagtattaatcggaataaatcaaaagcatatagataagataatttattttctgctctttacagttacaaaagtacccgagtagtaaattctgattcgtgaaactttgttccattaatgacgaactcatgtcactcatatgcatgtttgggaagtgcctaggccgactcccggtgcttgggggctatgactactcggacagagcgtttaaacgtaatgagtgatctgctcggggaaatcaaaattgacaggaggagaaatacatatttataaacattttaaaatacttttatttttctcgagtattatatttacatcagatactactcatcctatatgtttgttctgcaggatccagatccagatatgcacaaaagggattcatggctttaagcttatctcttacgctcctgtaagggatcagtcagaacatcaccaacggcttgccgtcatcgccgccgactgttgtcttcgcctatacggttgtttggtcacaccaccgttgttgggcgtctacgtcttcaccgaccggcttgccttcgccgccgccgactgttgtctccgcttgcacgactggcctattatgccgccgttgttgggcatctacgtcttcatcgaccggccgcctcgtccgccgccgactggtgtgtccgcctgcacggctggcctattatgccgtcgttgttgggcgtctacgtcttcaccaaccggcttgccttcgccgccgccgactggtgtctccgcctacacggctggcctattatgccgccgttgttgggcgtctacgtcttcaccgaccggccgcctcgtccaccgccgactagtgtttccgcctgcacagctggcctgttatgacgccaactgatgctatcttcttcacggctggctacgtcgccgtcaccgctaatagtttattcacttccatggctgcatgattctgccagtgttgattggccttatcttcatgaccgctggtcatctcgtctgctgttgactagtgccctcgcctctacatctgtttataccgctaccactactgatggacatcatcgtcttccgtcactgactggttatgccgtcgccgactggtgcttttatcttcacaactgcgcgtcttcactaccggtttgcttctgttgccgccgactcgtgttcacttcatcacggcaatgcaactttgtcatcatggtagagcgacttcatctttattatcttcggcaccggcaaactctattgccgatacttcgcaagttttgctacttcatcaaccacgacgtctttgtgaacctcgacatctcggcatgcgatgccgtgttattttactacaacaagtggctctccaatattcaggatttttacttggacatcttcaacacatatcttcaatcaagcaatgactactcgacgataagaagctataattctcgattctatgttcagttgtttcccaactaaacaaatagtcgggggctacacaaatatatggctcaaaattcgacaagctttatgtcaagatgaagcaatcaattaatcagccaacgagtcaactctgggagtcatcaattttgtcttcgcttcaaagcagttggttaaaattaaatttacatgtctgggagtttggagtcatcaactaatcaactcatatcagattcaatgagttgaacaacagcatatacttttctctaagtgaagcatctgcaacagctatagcaccaagttctactgccatctttataaatcaagaggtgttgcatcaatcttcatcacacacatgccaacattaagaaaatacttgagcttcgatatcttctcaacaatttaatggattattgtcactgacatcatcaccagcacctctgcttcatcggctctgacattccgccgttgctaatggatgactaagacttcgccaacttgctatttcgccttcacggttgacctactatgcaaacgctgatgagcgtcttcgtcattatcatcggctactacaccgctattgactggatcaccgacatcgtcatcttcatcaacatcctgtcaagcctcttcatcatagcttactctactgctattgatggggaacttcatcatcatatttgatcatctctgttgatgcttatcatcattactgtcggttacgtttgtcgtcgccgactattttcttcatcttcatgattggtggatttcgtcatcgcctttgatctgcctcgtctgtcaccgactgattatttcgctgccatggctacacaactttatcgctgggcaccttcatcttcattgatggctgacctgactgctgccgactggtttcttcgcctccacggctgtgcaacttcatcacttttgattggtatcactatcttcactaccactaatatttttgccacctctgctaggcaatattatctctatatcggtcgtcttatctctatgccaactgcgtcagctaccatcaatgaacaattgtgactacgtgctcaggggcttactagctcaaacacaagtattataccttcaatttggacttgctctggatacatgcaatatgaattcgtgatcatgggtctattttctatgctcaaagactggactatttattattccccataagggttacaaacgaatacttgcgccagtcgggattcaattattatatctattttggagtattccataagggataatcactcagatcagaagctattgatatgagctacacttggtctatatcacccggaagatttattactcgggagcatgttatatgcgtcatcctttaaagggtgtcgaaggcatattttttggcctaggcctaatatgtctgcagcccatattttcaggtgtggcctgtcacgttcttttagggacttaggcactttttgcttaggccaaagtgcgcgtgatcaagtgcccaataccttaaaatccttttatatcgcagttactcaactttttaggagttggtacaatgcatcttaaaaggtgtcaaacagtaaagctttatatagctgccccgctgacttttttatatagtcaaggcactatttgggtttatcaagcaattgattggatacaatatcgttgctttttgccacgtaagtgtgcatttttattgaccaatattatggcttaagctgattatacattgtggtcattttctaggcggttggtaaatcctttatgagtttatttacttggattttacaccacatatgccatatatttccaggtgtggtgaaaccatgtgtcttttagggactaaagcacgtctgttaaagcagtgtgcgcatggcgtatgcccaatactttggaaatttctttattcgcagcattcaagtttctttatagctgttttgctatgtgaattttctatgatgtagttaactttaggttgctcacatcaatttttacaaagcagtcggtatatcactcggttcatgttatttagggattcacaccgcatatgctacatattaatatcaagtcgcttggttgaccataattattgaaaccacttggttggttggataatttattccttgactatatgcttggtttgttcaattaaccacatagtcgggggctacacctatgaggtgcatctagtcgacgcacctgactttatttttcagccctccacagtcttcatatttggtaaaagtactcgggagatcatggcgaagatgattgaagcactcggctttggagtaatctagtttgagaaaagattatcttttcgactgtgaaggtctcaggggctactgtggagattatgggtaccccatacccacacggcatggttatccgactagtcataggggatagcttatatctatggaatatgtaacagatcatgacttgggtattacgtttccttttatattatggagcggcctaaagtcctgatttgataatattgtaaaatagatttaggaaaccgatatcgtattggttaaggtttctatcttataatcctgccccccatcctatataaggtggataggaggccctctagggggcatgagacaacctgatcgtcagatctatactatactcggcggattcaaatctccaaacaggagtacggtattacctctcattgagagggcctgaacctgtctaaatcctttgtctctgcatccatccacttttaggtctcgtgcgctacccccttttattattgccgaattcatgtttcgacactctcgctgtcgtcgtcgtcgtcgtcccagcgcggcttgtccacgcagtcccgcaacgctgtcaggaggtgcagcttgcacccgccggcctccatgtgcttgcaggttgcggcgacgtcggcgatgtaggagacggctagagcagcatcccacgagactgggccggagcttccctgtcccatggccgccttgattcacaggcttaatgcagacgggttagctagggtttgtcggcgttgtcgatctctatggagatctgaaatattttgttttgtcggcgtggagacgaatagtgtaatatatatatgtaggaccctgcagggaaattgtattgttgcaggaaacctttggtaattccctaccgtgcacggacgacatgacgtcaagctacctgtaaccgatctgcatatccatgtgctgattaattcggactctactacgaagctggcacacataaacattatgttatgtaaccactggaacggatatcctcatctcaatcgggcggtaagccccatctcaatcggacacagcgtccgtcacaggctagaagtcactgatgtgaagagttatctcaatcgggcaaacggccgtcacggatgaacatatctcaatcgggccctaagtaaagctcgtcaccgatagctttgacccagacgaccagtcaaactatagcccgtcacaaatgacctatcttaatcggaccacaattagcgcccgtcacagatgactactaacctttatcaggcctaaactagagcccgtcacagatgactgctgacctcaatcgggcctaaactagagcccgtcacagatgactactgacctcaattgggcctaaactagagcatttagttatggcccatcccagatgactataatccacaaaaaaaaaaaattttgttttttggctagtctcaggcctttgctagccatgcccgctgcagaaatgacagaaacaaacacagatatccaatatccccagctccccagcatcacccattcatatacatatgcattcacatacacagacatcaatatatttcacacaaccacacattcacagccatcacatatttcacatccattcacatatttcaaatccattcaaatatttatcatatttcacctgcaaaacggagttaattggatcaaatatttatttagcaagtcttaacataaacatatgaaatatatacataaatataagcatcacagttacatcatcacagttgcataataagtgttcacaattgcctaaacataaaagttcaacattattcattattttagtttaagcctaaacattcctttggggttaattatttcgcggaggatgaagctggctatctcctcgcgaacctcctcaaagctggtaggcagagacttggttattgtgccctacattgtcataatttcagattagttgatcgatcatatataaggactaaaatgtagttagtctatcacaagagaccaccgacctcaaactcagccaaagtcttcaacttttctctttacagaaggtgcatgttgtggcacacatggaatccgcactggtcacctatttgtggatgagggtgtcatgtcctgtcttctgaggcttcctctttacacgtattgggcccacgcttcatctatcgctagttgaattggggtccaatcatagtttaggtagtgatatgtactccacttaggtgttatgaccagaaggatccaatgggcactgcggcattaatatagtgaaagttaattaagtactgaaggaatgtgtcatgctattgtgtatatttagataacacacttactattgattataggcgcacataatgtacttcttgtctcggcgggaccacaaggtgtcgtagatgtagttgaccattccttgacggtcattctggagatttgtgacagtgaccacttgtggatcaaggaaggcaacttccggtgcattcttctgacaccattgccaacttaacctacacacaggataaacgatcttataagcgagttaatccgattgttattaccagattgagttgggcgacaatacttacaaggagtagcacttaaggaggcttgtgtccaccgctcggagactgtagaggtcgaatagatccttgaacgttagccaagcaatgtccttctctgcggccggcacgagcttgatgtcatcttgcataatactaaatttctgcctccctatgaccctgcagatagacctaaatcggctcaatattttctttggagatgtcggcaaccctacggcgtccgccgatgttatgcggaaccgttccttagggattttgttccctgtcctaggagtacgtgccctagaggacccactagttgtcgtcgacattggttcgccttgctgagacatcgtctactttttttcaaaacaacaaaaatacacaattcagtgctacaatctattacaatgaattgaatgtcacttataaataaatgaagcgtataaataaactaaattgcacatctcacagtaatagaatgaattgaatgtcacatataaataaattaaacagggctgcaggaa

SEQ ID NO: 23008 - DNA, 5491 bp, Oryza sativa
cacaccttctttccaaagaatctccagatcgtcgataacaggctccaggaatacatcgatatcattgccgggttgcctcagaccttggattaacaagcacaacataatatatttccgtttaaagcataaccatggtgggaggttatagttcgcaataagaactggccaagtgctgtgagtactactcatgttaccgaaaggattcatgccatccgtacacagacatatcctcatgtttctagggtcggcagcaaagtctttgtgttttcgatcgatattcctccattcaatcgaatctgctgggtgtctaagcataccgtcattccttctctccgtggtgtgccaatgtactaacttcgcttcgttcgggttggcaaagattctcttgaaacgatcaatgataggtagataccacacaacctttgccggaccacccctctttgacttatttccttcgtcagcacttttctttcgcttgtatcgagaagccttgcagacaggacaagcatccaagtccgcatattgcttgtggtacaatatgcagtcgtttggacaagcgtgaattctacggacctctaaccccagtggaccgagaacctgctttgcttcgtatgtcgtctcgggcaatgtgttctcaataggaagtatagccttcaaaattcctaaaagatctgtgaaactcttgtctgtccatccactacttgccttcagcttcattaggtccaaggtaactgacaacttagtgtgttttgctttgcatccagcgtacagaggcgtctcggaatcactgaccaacctgctgaacttcattccatctctctcattctgggctgggtccttaatgtcacataacatgtcttgcagcagatcgtgatccacatcaaccatttcaccgcccaatggagaaggtataaacatgtcatgctcatcttcatctttctgattatgcgcaccacttctgtctgctgctgctccacttcctgattcttgctctccatacttcacccaacatgtatagcccttcatgaatcctcgttgtatcagatgaccgtgtacgtcctctccgctatcaaacatattctcattcttgcaatatgcacatggacaacacatgtaatcattgtttcttctattccgatcctcctccgcgacgttcataaaatttattacgccctttctgtactccgtagaatgatgtttcaaattttttgcatacatccaacttcgatcaattgctacaaaataaaaaaaacaaattacatgcacatcttataagatcagtattgcaaaagtaagatatgatgaaattgctcaattaatgattaattgtacttaattgattgatccattttgatcacttttgggaattttctgttttccttggaaaaaagacaaaaaatcgccccctacagcctcccaccaaaatagttaacagtgggatacagttacactaggtggttgggggtatttatactgtgcaacaaatatctgtaacggttctaaaataatcaatcgtgacgggcatacaagtaatctctatcgggccttaataaaagcccgtaaaaaaagagtgccatctgtaacaggcattaaacttatctcaatcgggcctctagttggagcccgtcacagattaccctcttctgtgacgggcttcttttagggcccgattgagatatggaaccctcatctcaatcgggcctcaactatggcccgtcacatataagtgtcatccgtgacatgctttagttttatgccgatataccatggttgtgcgaccatatctcaatcgggctgaagtttcagcccgatcgagattacttccttgtgacggcccgcaaattccagtcttgttaagagtcgtcacagatggaaggatctgtactagtgaacagaggaaaaaatatatatcaaaggtgttgtacgtcacatttatcacatccaattcaatttttttagtattcaaaatttgttccagaaatcttgtcacgttagaatacactttgtcacatttatcacctcaatttctattgtttctcaatcctgcacctaattaactacagcctgataccctatatcatttattaattgggggcattgtgttcatttcttactgaacattagtctttgttaaataaataacagctataacgatagcaattgtgggactattagatgcttcattgattgtttgttaaaacttatttcacggtagtcaaaacactcaagaatcagtatttacgtacacgcagtcttgaaaaactccatccaatccctttccaagcctatgcatttgaagcgcacgggagaaaaaaaaaagatccaatgcattggctcgattctagtcgatgtaccaagttgctcctagttgccccaaatccaaatcaaaatccccaaatcacaactcacatctcacaatcctcattagacaaaaagttcatccaaatccaaatctccaattctccaaatcacactcacatgagacggacgtcaagggcgccgcggcggacgatgacgagcggcacctctgctggtggatctccaaccataagtccacatgccagtcctgtgtgcgcaagcagtggtgcctcgacgagctctgcgcgtgccaagtgcttattagtggttttgtggcataatttgtcttataatagttatgggtgtacctattaggggttttatagtattgtgggtaacatatgaggcctagtgttggtatttctgatgccctcacaaactacacccttaagcacacaaaattcaagcaggtgcaatttgcaaatgtttttacatgtgaatgtgcttcacgtcaaatattcttgttgtttttcatatatatgaacaagcggaatcttcgtagagggtaatctcaccacctatatagcatatggtgagtgtatgcttaggcaaaaaaattagccaaacactgcctaaccctcatgtccactcaggcatgttcttaattagggcatcaaccaaacaccaccctgaatttgtgtcatgactgcacagagaaattttgtaagcaagattaagcaaccctcaggcatggaaaatactccagcaggtttctcgggatagcaaccaaacataccctattgatatctttgacaaaaagctaagtgacggcatcattgaaaaaaaaacaatatttacagatatcatctccaaaaaaaaattggtttgtaattgagtatgtatatcatgctattcgctgttattgtaaaatcaaagtgtgttttaattataattctctgatgaacaattggcatctaagattattggttttgatatctggagatttttggcgaagtggttttggagatgattggatttgcaggtgttaaacaggtgctgttgatttgtcgggttcggtcagatcgggcaggtgctgctagtcagaccggccagcccgcggtctgaccggccgactctgtgttggttttggtttcgggttgtttgtttggatatccgtgattgttttgtgtttatgacttctagatggaaactatgcatatgtaatactgttgtttgctactaatgagtcaagttggaggtagcttcgtctcgaaatatagtttctttgtttgcttcatgtgtatgtgacttgatgcctcgggagagtattgccagtgattgatcgggagtcagcatggggataaggcgatgtccgtgacggtcagatatcatgcgagatacttaggctagttcaatgcacgtggttggtgaagatttcatatggcatacgatggaggtattgtgtgcgtatgggatgcagagtcgaatttggaaggagtccaaatttggtatgattggagtttgtaaagtttgtttcttgtacgggaaggtttcctagatagattagaacttctagtacgggtttggttcgtagctttaggctttcctttatcgcttttgagagcattgagttgatagtttagttagtgtttcgagtttagtcgagatattcgtgaggagtgttcttgttgcactttgtaacacagagagaagtaataaagtggtcatctactttgagagttcttcgatttgcgttttctcgagtttggcggtctaaccggtgaaacaccggcggtcagaccggtggcattgcggcggtcagaccggcggagtacctgcggtcagaccagcgacggcgtcaggcaacttcaggcacagctgctgatcttggcggttcgaccgtacgttctacttcggtcagaccgacgatattcgagcggttcgaccggttcgactacttcggtcggactgcgatcagtcaaatttgagggtaatctttaattccgcaaagagtttgggtttttgggtataccaacaattaacccctctctggttggattagttcttatatttcgatcctacaagtggtatcagatccttgttttcttctttggattttaaccgatctagagtttttgccatggctaataagtttacaactaagccccatattttcgatggaacggattttccttattggtgtaataagatgcaatcttacattatggctgaggatcttgatatttggagaaaagtttataatccttatgtgattcttgatcaaattaatattgttgctttaaaaactgaatttgaaaataattgcaaagctcgcaatattcttttgagtgggatttctcgtttggattttgatcgtgtttcacatcttgaaactgctaatgagatttggaacgatttgaaaaactttcatcaaggaacttcaaacattaaagaacttcatcgggatctttttaaaaaggaatacataaaatttgagatgaaacctggaggctttggatgactatcttactaggtttaacaaaattttaagtgatctttgatctgttgcttcttcttatgatataaattacacacaatctgaggtttctagttactttttgaatggtcttgtcatgtttatttgggagatgaaaattatatcaattcaggagtctgttgatatatctacttttactttgaattcgctttacacaaaactcaaaacacatgagatgaatattctttctcgtaaaattgactctaagtctagtgccttgatttcttcctcaacttttttgaatattggtgcttcttcatcgaattctactattcttgctttaattaataccatatccgatgagcaactcgaacagttcgaggaggaggacttggctttggttactaataagttttctcgagctatgaataatgttagatactggaaaagagatggtcagatatcatgcgggatacgtaggctagagttcaatgcacgtcggtggtgaagattccatatggcatacgatggaggtattgtgtgagtatgggatgcggagtcgaatttaaaaggagcccaaatttggtataattggagtttgtaaagtttgtttcttgaacgggaaggtttcctaggtggattaggacttctagtatgagtttggtttgtggctttaggctgcctacctcatgtata

SEQ ID NO: 23009 - DNA, 3657 bp, Oryza sativa
cgcttttgagagcattgagttgacagtttagttagggtttcgagtttagtcgagatttttgtgaggagtgttgttgttgcactttgtaaacacagagagaagtaataaagttgtcatctactttgagagttcttcgatttgtgttttctcgacttcggcagtctaacccgcgaaacaccagcggcattgcggcggtcagaccggcggagtacctgcggtcataccggcgacggtgtaaggcgacttcaggcatagctgctgatctcggcggttcgaccggacgttgtacttcggtcagaccgacaatattcatacggtcagaccggttcgactacttcggtcagactgcgatcaatcgaatttgagggtaatctttaattccacaaaagtttgggtttttgggtataccaaccactcacccccctggttggcttagttcctgtgttttgatcctacaattattactagtacaatgtcgacactttgttccacaatataaagtgcacaaaattatgataaaagttgaaatgaatgaatcagtgaatcaccatcagcactgtatggtgggttacataagtgttcactttgtctcgtgggttctcgactatagtttcttatctattttgtgataaaatttgtcataaatatttctccagaatatttcaggttttttcatgaatcgtgtgcacatccattagtatgctccctgctaactaatgaaataaatgcaaataggtaagttaacttataaaataaaatataaataactctagtatttgtataagcaaaagataaagtacttggcaggtgacagagtgttatgctagtattaaaatgtctaggattttacaaaatttgcggagaaaaaaatattcagcaagtttcatttattgtcatcgcactgttggtagaattggatttacgaccatattcatgataaatagtgggtgcgttctcttctccatgtcatagttctttatttctagaagggccaaatggacgattatggaaatgacaagtttcatagtctgtatggtgagaaatgcaataggacatggaggcactaggaatttctattgtagtagctgtgacagaccttgatcatactaacagttgctggagacaggaaaatagattgacagcaaagcttctgaatgcatttgcacggcattgtttgcaagtttctccatcgcatggtacttcaactccttgctacgcctccaatcgtagcaacgtggcatccggtggctctcagctaaccaaagaaaccaaggactctggtactcacaggatccatacgggatcgaggcacatgcttattgctagtggccaagagttgctgaagtcaccgctgagttcaagagttgctcgatgaagtacctactagaatataactgttctgcagattcggctgtacacgatcagaaggtattgctagcattgctagctgcttgattcttagcatatgccaaacttcagctgtatcaaagtcaagccagcaagatggccactcgcaggcagggtttacgattccgatatgcctttccttttcgggcactggcggaattcgaaatttcacgaaatccggtgggaaaccggtaaattctgaacaaatttcataaactaaaatttgaatacaaattccttgagtttgctgacaagttctcgaaaaccgatcggttttagcgaaattccgatcgatatcatcgaaatttcgatcagtaatttataatagaggtaatttgctgaaattcttttctttcctcatgtaagtttcagtaaatatacacaatatatttttttttcgaaaatttatatcccaatagattccatgaatatcatagtatttataagattttatttgattttttttctttttttatcaattcaaatttgaatttggatgaaacttctcgaaatctcagacggtttctactttcgagcctcatcgaaacgtcgaaatttcgcgaaatccaaccggatttcgtcggaatcgtaaaccctgctcgcaggagcaggatcgtctccactctccactcaacacggaagaaactcctctaacgtactctcttcgttccaaaaaaaaattaattctagatttaaatttgagcatagtgtatgtccatattcaaactcagcattattattattattttttttacggagggaatagtgtctactggcagagctacaggggatggcgagcagcggccaggccacctccaatgaaaaaaatcctctcattaaaactaattaatcacaaaggagttggttaattggcctcatttaattaatactccagcaggcagccgtttgggcctttttaattttgattgctgccgtgcagtcatgatggtcttggcttaggcaaatggtgctacctgctgactttaggatacactacatgtatataaatccaattttattgctttaaatataaaatcgctagttgcttgcttgcaaatcgtcaatcacccgaattattaatctcatttggttacttcatattattagtgattactacttaagaatattacagctcataaacaaattggtactccattttgcaaacattattttttatgctttttagtttatgtggactttagattctcttacaatcttgaggaggaaataacatccttccaacatatagtgcattttcatacgttacccaggaaagcataacctatccatacaacgagggaaattagtactaataacttatggcgataattaacccttagcaaaaaaacattagtttagttagggcaagtaaaattgccacgtaggattagataatgaggtgaaggacagaagttaggagagagaatgaaccacctctcatgcatggggtaaccttcacacaattttcaagaaaagtgaaaaatgatgtgagtaaactagtgttggggtttgtgtattagatgtgatatgttgtatttgttgcctcttaattaattagaagatgacatgttttaaattagatgtggcattcacctctatcataatacttgtccttacacgatcacgtccatatatacgctgtagttgcagctatttcgtttctttgactaagtgcgatggtaaaggagatccagtaccatttgtgccaaaattgtttgtgacggataagatggctgtgttttcaaataatcgatacaattaattcattcacgcagacagtagttgtgttctatatcccttttcccagcgcgtattcccttatttttcgtacgcacctttccctaactgctaaacaatatttttctaaaaaaaatctataggaaaattattttacaaaatcatataaatttatgtttttaagttttattagctaaaacttaatttattctgcgctgatccaccattctgtttcgcgctttgtgttctggcttaggggttctctggtgctcactataagaagaaaaactgagtgaccacttggagaatttgtcacaaccttcgactctgcagcatatatacaaaacagtttcttcaatatcttagataatgaaatattacaaatgtttgctgtatttgttcacttatgttgtggctgatctgatcatataacgtatcaattcttcgagtactcattcataaagtagtactccctccatttcaaaatgtttgacaccgttgactttttagcac

SEQ ID NO: 23010 - DNA, 1395 bp, Oryza sativa
tttgggatctgtgtgacttgccttgctggccttgaaactcttcaaaatcttcccctgtaaaatcggactctccgggaacgtcggaatctaaagagaaaagaacaaaatcaccaaaacaacacttaaacaagcatgaacagtacatgtggatatttttaacatgtagatctcaattttagaaaaatttagagacttgaaccaacaaaatccgagctaagataaattagttatgaattttcaaagattaaatcggattaaatcatttatatggattttaattgaattatgacgcaataatgaattatttttgaaaaggaaaaagagattattgcgtcagcggctagggttcacggcggcggctcacggaaacgaacggccgggatcgatctatccaaatcagacggccgagatctaaacggtctacgaccggtctacggcggatggcgtcgatgatgtcagcggtgacgtcatcaccggcgacggctcggacggcgcatgctcgccggcgaacgacggcgcggcggcgcgaacggacggcacctacgggttgcgggcgacacggcgaactcaccggtgaccaaagtagcggcggaagatcaacggacggcgacggcgtcgaggaagaagcggcggcgtccttcggcttgacgacgacggcggtgcttcggcgacctacagagacgacggaggggtggacgaggtcggcgacgacttgacgatcacgatggcggccttcccgagcgacgacgacgaccggagcggcgacggcgcaaggctggacgaactgcggcaacggcggcgctaggctacacggcgctagagctctaccggcggcgagagacgaaggcgagggtggcggcgggtagaggagacaccgggggtccttttataggggctagggggccgcggcgaaggcccacggcggccggcggcggtgatggaaaggttagggttcggagagagagaggaatccgattcgagatcgaatccaccgatttccaaacgatttagccgacgattccaaaagtgaaaagatagaggagatctcggggatcatttcccctctattaatttcaccggaaaaggaaagggatgaacgaatttggaacgagacggcggcgcggctcggttagggttcgggcgtggcagctgcgcgaggaagacgaagactgacaggtgggccccacctgtcagcgagcgggacgcgcgcgcgcgggcggcgctcggctgcgggctgacctgggccggggaggagagagagaggtttgggccgactttcggcccaaagccaaaagagagatttttaaaactttttcatttaaattattcatgaagtgcaattccatttattaaaaatacttccttagctcaaataaatcccagaaaaatctagga

SEQ ID NO: 23011 - DNA, 14028 bp, Oryza sativa
gcggtggatgagttgttcttgctccgaagtgagctccatgtcatcatgaggtatatcaatacctgtacaaacatcattccaaatacttggatgcaaagagattagatgcaacttcatcttgtgcttccaagcagcataatatgtctgatcaaattgaggagcacgccctgaaggcacggagacgaagttgtgagagggaatggtaagtttgctgtaatcaaaaggtatagtagctcccttgggtggtggagttcccttgctactcgcttcatcttcatttcattttccccgttctttccccctaagtccgacatcgtggatcactcaaaggtgtgaagcttgaatcaagagcaccaggctctgataccaattgaacgtgcagagatgtagcctagaggggggggggtgaaaaggctttcctgaaattttctcaacaattgcagcggttaaattgacagggcccggaacctcctggtgatgaacaccggaacttccgggcaggatgagtagcccagaacttccggggttcttgagtaaggaacttccgggcagcagagataaattaaactgagatgaaaaacaggtcctagcaagagaagtttaggcacacatcggaacaagatgaagatcgcagaatatcagcagattcacacaaagatcatgcacaagagagacaaagacaattttttcccgaagttcggatcacacgaatcctactctccgttgaggtgctccaaagagccgggtctcgattaaccccttggctcacttatgcaaagatcccagaagaggtccacagccttcaactcaacacttctaggttattttctagaattgagagaccaccaagatccaactcaaaatttcttctagaaaagaccacaagtgcaagttgctctacctaggacaacctctgaaaactcagcacaagaatctttactcacttacctcgtttccttgcggaggtgaggaaaaacttcacaaactttcctacgacatccacaagatctttggaagctcacgggagacacctaaccatctaggagaagatctccaagagtaataagcccaagtgacagcccacaaggtatccaaagtgctcaatcaaacctaatcttcaagccatctccaaaacactcctacactctcatctaatctctcaatctcacaagataggctctagatttgagtggagaaagcaaaggaagcttgggagtggctagaaaaccctcgaacatgaaagaactgaagtggaatggccaaagggtgacctggggatgaaatccatatttataacggctaggtgatgtcatctagccgttactcacatgtttgaactggaaacctgccatgaggttccgggcaagtgctaggaacttctgggcagcacttaggaaaatttttgcaattaaacggcgcccggaagttccggccagaaccttcgggtagccctctctgtcctggggagaaaatcatttttcaaaaatgattccaaaaatcttttgactcatggatatgactaagagcactttgtataccatagaaccacacttgaaacccctcttaatagtacggtttttcctaaactcaatttcgaaagtgaaaaacctagtctaatcacctacagcgattttcgcacttaggaacattcgaattggggggtctccttgcattcttagtcatcacaacttgctttgggactaaactcctgtgaataaacttgataaacacgttagtcccctttaaccacattgtcattaatcaccaaaacccactagggggtttaagtgcatcttcacccaaaatgtggtggctctggtatagatgatacatatattgattttgatctggaggatatgttgtggcacgttgaaccagaggttctagctagtacaagatgagggtttgacaattgggaagcgttggaaagaagggatacgagtgtacgacgagtactgtagggagcattttactctacgtgccattatattcattaccatcaacgacctgccggttaacttttggctcccaggatagcttaagaggaagttcggatgtcttatatgtatcgacaacacgtcatacaggtacctcacctcctcaaggaagacagtgtacatgcgtcaccgtcggttcttaccacagaggcacaagtggcgtaagatggccaacttatttgacaagtccgtagagaacgatcttcctcctgaagcatgaactggtgcacaagtcttcgacatggccaagaagattaaggtcgtgttcgggaaggtatagaagaaggcaatcaagaggaagaaagcaaaggatcaaagataaagttagctcaatcaaatatttcatctttgtagagaacacgactattacagaaaacatggcgggttcgtaaaggatcaaaagaggacaagacttctcgtaaagggacgctggccggtatgtaatcaaatatatatattcgttaagtatatgatgcaattgtttgttcttattactgacgtgtctactgttcttacgcagtgttacaagcaacccaacagtaccaacctatggggatattaagtgtgcgagatgctcagggtccgtgggagatacataactgagtttacagatataagtcatcatgctccttacatataggaaatagtcatttaagtcgcttttaacacatatcatttttcttctattttccatagcttccgagcatcccatatacagcaaactggttcgaccagaaaacgcttctgaacatctgcgcggacttatgccggttcattcgttgcaacatccgcaaccatccaagggagttctatgacccttacagcgaacttgctatggacccccaattcaaaaacctaagggagtgggagagagaacatgcaatagaataaaaaacatctatttttaatattatgaacactagacatgtacatatgctatgtaatatatatatatatatatcgatgtttctaattgtgcttgtataatttatatgtaactttacgattcaaaaatacacaaaaaataatgagtacgtacattttcccaaacggttagcaattgctagggtgactgcacgaatctattatcccgtgcggtcggcctagcacatgctagccgactaggataatagattatcctgtacggtcgacataactgaactgcacgggataatctactatcctgtacggtccacttaacataacgcatgggataatctattatcccaagaggtcctcttaactcgatcgcacgggataatcgattatcccgtgcagtccacgtaacccggccgcacgggataatagagtatcctgtgcggttgggctgcccgcacgcgataatgttgatttttgcaaacacctaggtgcagatgggcgctacctccgcatggaaaaatcggttttgactacatggaaaaatcgaatctgtagtagtgtgacaacactctatttgctgcccgctttagaatctccgggtgcataatcggcagtgaaactgctactagcacctaatgttacagtactacaagaaaaatgttttgtaagagacatttttctagtataatagaggcacttttcaaatgcctttacaacaatatagaggcattttaaaacatgtctaataataagtgtcttatggtgaattctctctataaacgaagagagattttataaaatgtctataagattgtagaggcattttctagagacattaaattgtaccacaaccatataaaaccagtccaaaaaagagaatataataatatccttgcttttgtcaagccttgatctcttggttaaatcattttaatcttcaatgcactaaccaactcacctccatgtcattacttgtatgtttgtttctttagttacacattatcattctaaaaagtatctctacatagtttaaaatgtctcaacaaaatgcctttacatattaaacgcattttatagtgccgaaagaatgcctctataagataagatctaacaaactgagctaaaattgtctctagagtaaaagttttctagataatttttgaagtgtctctacactataaaacttatgatcttagaagcaatttgcaaaactcctctacaaaagtgcctctatacgaggtttttgttgtagtgttaataccacttaagctgtgttcgtacatgtgagtttccatgcgcacgtttcccaaactactaaaaggtgtatatttttgaaaaaaaaaatcttgaaaagttgcttaaaatcatagtttttaaaaaatccattttagctgatacttagctaaacatgtgcaaatgagttgctccgttaaatgtgcgtgggggaaaagttcccaaagtgagctccctgaacgcagcaaatgataatttgctttccacaaacattaatacacattggcatatgtgaaatcaaagtgtgttttgattattatttcatgataaacaattggcacgagagataattgatactgatatttagagatatatggtgaaatggttttggtgccagtcacaccgggtgtcacgcccggaatttctatccaaaattccaaacgcttacatgtgtgtgaaccctcgtccaggaatcagccgaggcacacaataacaaattgataatagagtacaattattactctaattaataagcgtataaaatgtcattacagaggtagatagttcctctcaaacaataaagatctaagcagcggaaaataaaataaacggcgcagacggctccactccacaggcagcttgaccaaggctactcctaatcctccactccatcagcctcattgtagaactcttcctctgatgaatgattgcaaggtgagtatatgacatactcagcaagccacgtagcaaatatgcaagtgcacaggataacaaaggatggcataatagggtttcatttgcaaaagcagcatttagcaaacatttcagaatttaacaaaacagttaattaatttaacaatattaatccaacgctatacaacataccctgttgtataggcccaaccattctgaacaaccatcccggctgcacagttctatctccaaaccaggaatgtaccattccaaaccaggagctaatcaaattattaccaattatagcatcatttactatggtgagaagtgtgaaactaatcacgaaagacattgttagacccgcccataaccgcgggcacggctattcgaatagttttactctgatcagaggtgtaccactgtacccacaagacacaaccccacatcatgtcaccatgtgcctcaataccaccacggtacctcggaaaagagttgtgacaatacccctcgcataacacaatccactgcagcgcaccttcctggatcataatcacccccttataaacaaggcatggactccccagcgacccccgtgggcttatctccgccacttctcagtctggtgctccgcaatgaaccatgctatacaaaagataaagccgttgtccatgctggcttgtggttggcacggttaatgtttcacaaccgaaactcgtgaaccggtccttaattatcatgagcacgaccatcaaaaccatgtgctcacaacccaccattatcaggttttagttggcacattaattaattaaccaatcacaatcgaccatcatgaactatcattaagccatcatgaaataacagtgagtcattaattatcccaatagtgtgctaatgtttctaagcagggctaagcaattatatctagtatctagttgaaccaatataaataaagctcaactagtcaaattataataacccaaggtatcaaggaataaagtaatcaagaacaaaagggctataacaaagaataggttgattccacccaatgacattcgaaaataaatgcaatagttgaaaagaaacaatagctttaaataggatcaacatgctcaaaggattgtttgggatctgtgtgacttgccttgctggccttggaactcttcaaactcttctccggcgaaaacggactctccggaaacgacggaatctaagcagaaaagagcaaaatcaccaaaacagcacataaacaagcatgaacagtacatgtggatatttttaacatgtagatctcaattttagaaaaatttagagacttgaaccaactaaatcggagctaagatgaattagttatgaatttttaaagattaaaccggattaaaacacttaaatcggttaaaattgaattatgacgcaataatgaattatttttgaaaaggaaaagagggtttattgcgtcagcggctagggttttggtggaccgggcgcacgggcggcggttcacgcgaacggacggccgagatcgatccaatccaaaacggacggccgagatcgaacggtccaagaccggctcacggcggacgaccccgatgacgtcagcggtgacatcaccgacagcggtggcggctcggcggaacggacggctcgggcggcgcacgctcgccggcgaacggcggcgcgaggacgcaaacggagggcaccagcacgtagaggacgacgcggcgaacacaccggtgaccaaaacggcggcggaagaacaacggacgacgacggcgacgaggaggaaacggcggaaaccttcgggttgacgacggcgacgaagctccggcgatctccggcgacggcgaaggggcggacgaggacggcgacgacttggcgaccacgacgacggtcttcccgagcgacggcgacggctggagcgacggcggcgcacggctggagcagcggcggcgacggcaaagctagggcacacggcgctagggcttttccgacgacgagaggcgaaggcgaaagtggcgacgggtagaggagacaccgggggtccttttaaaggggctcggaggcggcggcgaaggcccacggcgacggcaacggcgaaggaaagctcgggaagaacaaatccgagacgaactcgaatccaactctttccaaagcgatttagccaaagattccaaaggagaaaaggtagaggagatcccggagaatgtttcccctctattgattcggccggagaaggaaaggaacggccggatttggaagggaaacggcggcggcgcgaaactagggtttcgggcggcggcggccgaaggtagacgacgactgacaggtgggccccacctgtcagcgacagcgagggcgcgcgcggctgcggcggactgggccggctgggccgaggagagagaagagagattttgggccgactttcagcccaaagccaaaagaggactttttaaaacttttttcaattaaaattatttcttaaatgcaattccatttattaaaaatactttcttagctcaaataaatcccagaaaaatctaggaattatagaattaagcaaagtatttaatgaaattttatctgggcccattttatattggaatttattaattaaaattagattttcttttcaagactttttaaaattatttctaaaaattccatttaaacaacaatttataaattttgaattttcagggtgtgacaaacctaccccccttaaacagaatctcgtcctcgagattcggaagaactggcgaacaattgcggatgagctgacttcaattcatcttctcgttctcaagttgattcttcttccgagtgattactccattggactttataaaaacggataactcgattcctggttcttctctcacttgtttccaagatacggattggtttctcaacataggtcagatcctcttggactcctatctgttcaagattagcttcttcggtaggtacccttaaacacttcttcaattgcgaaacatggaacacattatggactcctgccaaagattgaggtaactccaactgataagcgacttctcctcttctactgacaatcttatagggtcccacaaaacgcggtgccaattttcctttggtacgaaaacgatgaactcctcgaaaaggcgtgacacgaagatacacataatctccttcttcaaaactcaaatccctacggcgattgtcggcataactcttatgacgagattgagccactcgcaatctttcctgaatgattttcaccttttcttctgcttcccttaggatatccgtcccgaaaacctgacgttctcccgtttgatcccacaaaagcggagtgcgacacttccgaccatacagtgcttcgtaaggagccatctgtagactagcttgataactgttgttgtacgaaaattctgcatagggtagattcttatcccaacttccaccgaagtctaaagcacaagctctcaacatgtcttccaaaatctgatttaccctttcggtttgtccgtctgtctgcggatgataagcagtactaaaattcagcttagaacccatctcttcctgaagtttcttccaaaaatttgaagtaaactgactgcctcgatcagacactatcttcttagggacgccatgcaaacacacaatccttgccatatacaattccgccaatcgacttccagaataggttgtctttaccggaatgaaatgagccactttggtaagtctgtcgactattacccaaatagagtcatggcctgatgacgttctaggtaaaccagtaataaaatccataccaatttcttcccatttccattcaggaatcttcaaaggctgcaacaaaccggcgggtttctgatgttccgccttgactcgctgacaaacatcacatactggtacgtactctgcgatttcacgcttcatacttgcccaccaaaatctttccttgagatcctggtacatcttagtactaccagggtgcatggagtataaagtatcatgagcttctttcagaattgcatctttcaaatctttgttatcggggacacagattctttcacccaaccatacagttccttgctcatcctccaagaaaccgatagcttttcctcttctcatattcttcttgatttcttgaatatcaggatcattaatttgggcttctctaacttgatcaattagagtgggcttcgcttctaaggctgcaacgaaacctctattgacaattcccaaatttaatctttcaaattccttgcataactccaatggcaactgtcgtccttctgtagcattgcaataacctttcctgctaagagcatctgctacaacattagcctttcctgggtgataatgaattcccatgtcataatccttaattaattccaaccatctccgttgtctcatgttcagatccggctgagtaaaaatatactttaaactcttgtgatcggtgtacatctccgtacgagtaccgaaaagataatgacgccaaatcttcaacgcatgaactactgcggctaactcaatatcatgagtagggtagttcttctcatgcggacgtaactgacgagatgcataggcaaccaccttgccatcttgcatcaaaacacaacctaacccaagtttggatgcatcgcaatacacttggaaacccttctttggatcaggtaaaatcaaaataggagctgatattaagcgacttttcaactcttgaaaactctgctcacattcttccgaccacttgtacttcacatctttctgaagcagtcgtgtcatgggcttagcaatcttggaaaaattctctataaacctccggtaatatcctgcgaggcctaggaaactgcgaatctctgaaactgtctttggttgtttccagttggttacggattccacattactaggatcaacggcaactcctccggctgagatgacgtgaccaaggaacttcacttcagacaaccaaaattcacacttgctaaacttagcatacagttgatgctctcgtagcttctccaatgcaaggcaaagatgttcttcatgctcttctttggttcgagagtagataagaatgtcatctataaagaccactacgaacttgtctaggtattccataaacaccttattcatcaagttcatgaagaaagcaggggcattggtaagtccaaaagacataacagtacattcgaacaacccatacctagtggtaaaagctgtcttaggtatatcttcctctttgattctcaactggtgatatcctgatcgaagatctatcttggagaaaacagtggcacctttaagctgatcaaacaaatcatcaattctgggcagcggatacttattcttgatagtcacatcatttagtgcacgataatccacacacattctctgggtatggtctttcttttccacaaaaataaccggagctccccatggtgatgaactcggtctgatgtatcctttctgttgcaaatcgtccacttgcctcttgacttctgccaactcattggctgccattcgataaggtctcttatggattggagttgttcctggtaccagatctattctgaactctatatcccttttgggcggcattccaggtaaatcatctgggaacacatcggaatactcccgaactataggaatctcttccaaagttatttggttcagtcttgaccttaaagactcagatgacaatgcatgaacagttacaactcgaccatcattgctggtgagagttacttttctgttagcacagtctatcacacctttatgtctggctaaccagtccatccctaggatgacatcaaggtctttggattctaacaagataagattggccagaaatggtactcccttaatttctattctgaccgaggggctacgttgcaaagagagtgcttgatcacttggggtactaaccatcaaaggacgtctaagatcttctacttccatcccattatttcccgcaaaactcatagataagaatgaatgtgtagcgccagaatcgaaaagtactgttgcaggaactgagttaacagggaacgtacccaaaatcacatcgggagcatcttgagcttctgcagcagcgacatgattgacacgggcctttgatgctggtacagcagagttattctgagcagggacaaccttcacgcgacggggcttcggacacttgtcagcataatgtcctgggtctccacagttgaaacataccacgggcttgctgccttgctccctcttggcaggttgttgctgtgttggagctgcaacaggacgtggagcttgattgcggatgttgttgccagcattgttgttgaagaactgacgctgcggacgaacaacagatgaagaacctccctgtggcatagactggggtcctaaagtaaggcgcggcttctgattactcccctgttgtgccttgaagtgagcaatccgacgtttcctctgctccatgcaattgtacttgtcctcctaacgtatagccttatccactaatttctggaaatcaggataatctccaaccatgagtgggtaagaaagctcatcattaagtcctcccaaaaacttctcctgacgctcttcatcattacgcacatcttccggagcataacgagcaagacgattgaactcgtgcagatactccgtaacagagcgagatccctgagtaagcgacctgaactccttcttcttgagagacactactcctgatggtatatgcgtcttccggaaagcagcagtgaattcaagccaagtgataggttcagcagtagtcctattcaggcggaagtgatcccaccattcagaggcagagccatgcaactgatgtgatgcaaaagataccttctcctgatcagtgcactgaagtaaatccaacttcttctctatggcatgcagccaatcaccagcttcaacaggattagtggtactagagaaaataggcggcctcacacgaagaaattctgctaacttattctgaggaggtgcatagttatttccttggttctgctgattctgaaattgctgcatcatcatgttcatgagttgtgtctgttgagcaagaacttgggccagagttgggttctctccattgttattgttattggggttgttggggccattcccattgctgcgagtgttcaccatctggcaggaacagggcacaagaagagaaaccggggaactacttaggatagagaattactttaacttttattgatcttaactgagtttcattattacaaactgaagactctcacaccactaaactcaccaacttcctaacactcaaaagcaaacaaacacatgcaattacatcccaccactgatgtaaatcacatgcgagccacacacaagcaaacttaaagcaaacaaactaacacaacgatctaagacaacgacttaacaagtcactctagttcttccaagcattggaggtcgattgaaggctcgttcggctcgtcttcatcatcttgggttgctacccactcaatcttggaatggttgcgcttggattcttcttcttcatcacttatgatgatgaccggaggatccgcttgggatggggcaacttctttctccaccacacggacctttggcgccaattgatagcgagggacaaataaagctctcttccttgcggtaagacgaatcctggccttctgcggcggtgcttctccctttaacgcggctaattccttttccaaacgatccaccttgtcttctaacttgcaaatcttaccacgattccggtcttcacgatcttgagccgctaacacagtctccgcacgaccttcatccatagcccacagcatctcaaccaaatgccttgtggtagcatcattctcaattccttcagtctcaaggtagctgccacggtcacttccctggggttgacgaggatggtagcgatactcagtgtcggccaactgatcactatagcgatcacggagctctcctatggcaatccttgccacttcctgacatgcatggatgtagtttcttcctccagcttcgaacatcactgaggggatctcttcactattgctgttcaaggtgactttgactcggcacttctcttcatgacgatcatgaggaatctgggcataaaaaggggcagtcccaaatccaatggcaaaggacatcgtacgcaactcctggacaaaaccctcaacaccaaacaggtactcaagcttgtagcgcggcatctaaagacaagtgaaaggagggagttaagacctttatccaattaatagcacaagtttttggattaatttgaataaagtttagaaattcaaagtaaaaggtaagtgaataaagtaaaccaaacttgcaagataatttgaaatagttgaaaacaaggttacaaattttgtactttttaacaacaggtttcaaaagaaagttataaaatcaacatgctaaatttattttattgcagcaagattaaataaaacaacattgtaaaacttttgctgataaatgagccattagtacagtaatggatgtacagtactaataacactggaataaattttgaatgagaaccattaaaagagattatgaagtgcatgtgccattagtttggtttaattaaaagagaaagggaggagaacagttctacttttccaatatttttagagggcttctatgggtaaccatttggcataacctagggtcaagggggctctgataccaacttgtcacgcccggaatttctatccaaaattccaaacgcttacatgtgtgtgaaccctcgtccaggaatcagccgaggcacacaataacaaattgataatagagtacaattattactctaattaataagcgtataaaatgtcattacagaggtagatagttcctctcaaacaataaagatctaagcagcggaaaataaaataaacggcgcagacggctccactccacaggcagcttgaccaaggctactcctaatcctccactccatcagcctcattgtagaactcttcctctgatgaatgattgcaaggtgagtatatgacatactcagcaagccacgtagcaaatatgcaagtgcacaggataacaaaggatggcataatagggtttcatttgcaaaagcagcatttagcaaacatttcagaatttaacaaaacagttaattaatttaacaatattaatccaacgctatacaacataccctgttgtataggcccaaccattctgaacaaccatcccggctgcacagttctatctc

SEQ ID NO: 23012 - DNA, 3906 bp, Oryza sativa
gcacactccccacatcgcgttccaagtccaagaaaacacaccccacgcacagaatgcctagagctcggccatcctccccggctccggcgacttagccgtcgtcgccgtgcatccccggtgagtccctctctcttcccatctatggaacgtgacctacgcttcacgccgagctcacccgtacccattttgccctaggaccaacctgtcgagcacgtggtgggcgtcaccgtccttgccgccggccacccgaaccgccgacgccgctccggccgccgttcctcaccaccgaagcaacaccaagctccggtgagtttccgctggatttctcgcgcatgcaccctctgtggctcatccctaacacccccgtactctaaaagttacagttcgcgccttgagtcgacccggcgacgtcgacgccggagttttgccgccgttggccatcaaccaccgtctccgccgctccctggaccttgctgcctccgtttctctgcttggtgagcaccctggtaccatatgagagcacatgcactaacccttttgcactaaccaagcctctgcatgcacatatatgggcataccgagacacaccaccgctgtagctcatgttctatgggctacagaccaccatttccctcaccaccaccactcatggatgcgcaagaacgttctatatattttctcttttgtgctcaaaccgattcgatccaccgatcaccgccggtgagccgtagaccgagctcagccatggctgctcctgatgtgagctagctggggacttcatttcttgaatttgatctagggtccaatctgaaaactgccatgactcatattactatagcaggatcttgatggaaataaacaaaagaatagggactcttaataaagtttgctgtccaggtggcagaaggagtgcgggatgattcccccaacttctgagggcctctctacaaatctcctttcactgacctgtcgacccggctggaattcaatttcgaaaattgatttctattttggtttaaagcagagaataagcagaacttctaaaatttgtagaacattcattttaacttcaaaaattgtgaaaccagttttgttagatccataaagctgtgaaatattttacgaaaatataaaactgggtactttctctacaaacttttcctttatttttgttttgccataaatgttgcctagaacttgttaaatccataacaaatttaatatagctctaaaaattgtgaaatcacttcttttaactttctaaaatcattctctgtaactttgtaaaaggaattttgttcacttctgtacaaaaatgctgcttaataaaacatagccctttttaaacctttttaattgtaaaatgcatatctctgtaaataaaaagtgataaaataaaaattccttcaccagagaccacctgagaccagcacacactcactgcataaatttcatgcattttcttgcattttggtttttatgcatttttgtatttatcgtatacgcgtattttgtatagaggaagaatacgtcgaagaagaagagggtgagtttgttgacgaccaggttcaggagtttgcagacgaaggcaagtttgcccctcctttgatcacattgatcctatgctttattgggctaaataattctattgcaaacatgcatacgttagctagtattaattttggtaaaaaaaattatataaatgtgggaatggtagatatgacctaattgctgcataattcaccttgaaatattgaatccttgctggttgtaaccataaagtgcttttgaatacaattattgtgttctttgggattatactatgcttatattgccgctatatgcttatattcggttaccgccttgcaaattactcgttttgataaatgttatatgtgaaaatggttattttgatgttgctggacagaaatttaaatgtgtgagtattgtgaactgaaaatggagataacttgtttttaaacttgggcggcgagtggtgtacatatggtggtagttgtacaccgatagggagagcgttcgcccgggtcgattaaggaccccactctatgtcaccaactaatgaaaacagtacaaaccacatgtgctaagtatgggctggtctcgacctattaagttgtttagagtttagccttgcatcttggtagtccaaagggtatgggttaccgggttttggtaacttatcggaacttcctatggtttgtgatatgatgaaattgattaatgacatgtggtatgtgatgatttgagcgggtagtctgtccaatacaacggtgtcgtgcctcgtgagggattccgggctgggatccttacggcgctaggttaaagcgtgggccccctacctagtggcgctagcttgctagtagcgtgggtaaaacacacatcgtgctggtgcaaggctagacaataaacaatgtaaccgtttcgttatgacctctacatcacactcaatgtgtagagtgtggtgataccgaccggtatcggacaaactagagcgattcatatcatgtgggcttaaaagttgtacaaactttgcagagtctaaaactaatcgattagccgtgctcacggtcatgagcggcatggtgaagtgtcatgagtatagtcggtgattttgataaactcttgtgaacttggaaaatggttggaatgttttgctgtgaacttgggtaaagttcggtgaatggtgatgagatgacggtgagtggtgatgatctaccttgaggggtagatgtgtgttatttattcattgacattacaagttttacttactctatactattgttataaaattccgttgcggaaaatgttgtgaactaaaattggcatttatgcaaattaacctatacactgcttatccttgaatatggccaacatgtagtatgctaggattgtttccgaatgccagtacattaatttgattaatgtactgatttcttgccttcttttacttgtttttgctcagaccccgctgcaggtaatgactgtttggatgaggagtttgatgcagcttgtgatgttgcagattttcaggatggttctaactagggatttaccctagtcggtttgcccatgggcttttgggtagcacgcttaccgcatgaaccaatatttatggcttgtcgccaagtactacttagaaccttattaagactatttatgcttattgcttagaaccacttattatttggatatcatgcttgagatgatttatgtgagactatgttgcattcctgggcaactagtcccacatgaggatgggtttgaaatggttgagataaccggggaatatgcctttgttgagatcgagtctctggagtacgcttttggtcgccaacatcgagtggttgacgggcgtatgacgtagatggctggtgtggctattccaacggttgtgtcttctatttcatatccgatggcttagagcctatgtagtgcactcttcaagacatgtcggggtctgcaatgaggttggatggttaccgtatttatttgggctttatttgagaccccatccatccagatatttcgcgccgacatgccttggagcgttgcaccacctaggctttgggacgtcctgacaacgacgagctcatatttaaggatttctgtcacgtcctgataaattcatcccgaattaaaaatcattcgctaaaaggaataatagaattaattaaaattcgaaaagaaattggcaaacactaaaatacgaacaagaaaaattcaaatgtgacccggagaatttttgttaaattctccttggtctaaaaggagccctcaaattttagtggaattttcagagcacaaataataattattaagaaataaacaaagttaaaatgattttataaaaagaaaaaccctaaaaagtctttttttccccccccc

SEQ ID NO: 23013 - DNA, 9576 bp, Oryza sativa
caataataaaccttttgtttagataaaagttaaattaaactatgaaatgttatctaccatatgccaccatatatacatgtgttcatgtaagaaagcaatattactagagtgtactagtagtaacgaaagatattataggagttttactgcacattcactagccacgcgtagtagtacggttgttgggagagattatcgccgagtttagttccaaactatttcttcaaactttaaacttttccatcacatcaaaacttttctacacacacaaacttccaacttttccgtcacatcgttccaatttcaaccaaacttcaaattttgacgtgaactaaacacgtcctatatttgtcacctaacgtgactaaggcatgtaccagcagtatgcagcaactgtacttgcacagtttcaattatgagttggacttgagggtgagcttatgacgagatcagctgacgcgagactaattaaaacttcacgtcgtcaccggatcggctggccggctcacaattttcaacttaactagaaagaaatacgcgctacgctgcgccgtttgaagatgatgtacatgccacaactatgctacaatgtcatgaactgaagtgtataaaatagcacctggtgccaacatacatatgagtatagctttattgagaaaacatattgttttatattgaaaaaaaagtatcactacaatacgtcagcagaacaaaggacatgcatatctgatacaccacctacgcagaagatcataaagattatgcaatgtttgttgtatagtttgtaaagctgataaaccattggagtatgtcaaaggagtaacttacatatgtaccgatgattttaatgacaaaataagagaagtaatatcgtatatagagaggttctcccatgtacagtctcttttatgtaacataaatcatgaccaacagagtaaaaatgtcccaattaccaaaacggcacaaaatacacaccatgatatagtctaaatataggttttgggatacaaatatcaccaaaaaaaagtagaaatagatgtctttttcaacagcagcaatgctggctcggcttttgaaaggtgattttctgatctttttggcagtaactaaggtggtatcgctcttgtatgagtttatctgttgtcacgtcctgataaattcatcccgaaataaaaatcattttctaaaaggaataatagaattaattaaaattcgaaaagaaatggcaaacactaaaatacgtacaagaaaaattcaaatgtggcccggagaatttttgttaaattctccttggtctaaaaggagccctcaaattttagtggaattttcagagcacaaataataattattaagaaataaacaaagttaaaatgattttataaaaagaaaaactctaaaaagtcctttttccctctctctcccccttgggccggctcagcccatctccctccccctccctctcctctccccgcggcccactcggcctctccccgcgcgcgcgccgctgacgggcgggcccgcccgccaccctcgctgacgggtggggcccacccgtcatccccttcctcccgccgctcccgccgcctcgcccgcgccgtagcgccgccgccgccgcgaatcccgccgcccccgtccgccccgcgtgcaatcaataggggggaaatattccccgtgatcccctccccctttccccccatttttccctctctctctccctcggattcgtttggaaactttccccctaacctcgccggcgccatcaatggcggccggatcttccgcgcccgtttccccctcgtccggccgccctctctctctcccaaccctatataaaccttccccgtgcctccctccaccgtttccgccactcgccgctctctctctccaccggaatcgagctcgcgccgtcgctctctctctccgccgtcgccgccgagctccggtccgccgccgtcgtcgccccggaccatctcccgcctcggcgccgcctccttcggcttcgccgcatcctcgctgacctcgtccacccctccgtttcgctcgccgaccgccggagcaccgtcgaccccgtccacccgagccgcgccgccgccttcctccgctccggtcgccgtttccgtcgtcgccgtcgacccaaggtgagccgtggaccgccgattcgtttcccccttccctcccctctctcggccgccgctccgccatacctatggccgccgccggcgaccataggggcgcgggcgcgccgcctcccgccggccgcgccgccgtggccgtcttcgggcgcgccccgcggctgccgcgtggggcccggctgtcagccgctcgcgcccttaggtgcggctgacgcgtgggacccacggcgccggccggtgcgagcccgggtgcgcccggtccaccgtggaccgtggggctgccgcgtgggccccacccccgtggacccggtccgcgcgcccctcccctcggctgacgcaataaatccattttaaattaaaatttaaatgaagaaattcgcaaatattcatttaaagagcatataaacttcaaatggccataacttggccatttgaactcggaattggaccgtttaagtctctaatttttccttaagaagtcaagaacccatttttgtgctttgttcctgcttgttatatggagtttattagagtaaaagccttttcttttccgttggtcgtgtagacgctgcagcttcggaggatccgctcttcgtggaagttgaagccggcgtttgggaaagcgagcaaggcaagtcacatcatccttgaacatattgaatcccagtttataaaattatgttgctttaaattattgcattatcgctttatttaaattgccgcgttatcactgttttatctagccatgcctatctacctttgttatgaccttattattattgttattgttattattaccttgttcaccctagattaaacaaaaccccaactagtggacactctactcatggtaccactagtatgattttaggtagatgcttcgcttttttaattaggtaacattaggtggtttttcaactctagactttgggatattcatatcacctggacactttggaattgttggtttattgtggaattggattcacaccgccccctctattcaaaatccccaaaatggttttaggctgggctcggggtgcatggttttgatagtagcacctcggccatataaggaccggtcttcgggcctctgttgcaaagtactaccgtacttccacatgtctagtgggtaaggcttagtttgtggctcagtctggttataaacaaaagtacacggatggagatggacgaagtcgggggtcgatggacatctctaggacaaatgaaggctacacgagctgcggcccggtagtcgagatgttatggcacagggctggtgtcctgctgctaggggctcaatcctgcctacctgtcccggaggttccggccgtaggtggggttgggtcggtactcttgtctatggctaggatgggttggaaactatgtcacgtcttccgtctgtataccgtggtggtatgtggcacgtggttcacgtgaggaagatgtgtcttgtgggtaaagatgtacacctctgatcagagtataacctattcgaatagccgcgccctcggttatgggcaagccgagcaatgtacccaagttagtgttttaattcttaaaatttgctcaacaactaaaatgtggaatggttggactgggttggcttgggacgagctgggacctagggtcgggttgccagttcggtctgaatcatcgtaggccttgggttaaggcaggttcgtgcgggttcacgaccttgattaataatactgtgtagctctaggatcgtctttttaaaatggctttgggcaactaagtgacttttaaatgctgttttctgcaaaacttaacccctatatcattaccccttgtacccccttgcattaatggtgcatccgccggtgtggcttggtgagtactgtggttgtactcattcttgctctatctttctccccccttcagtaagagaagctttggagaagaagtcttaggtggagtcttggcttataccccagttgagcgcctgtgaagatggagccgtaggcccgctagtccgctgctgtttatttttgattgtcaggccttaagtgcctttgtaataatgtaaatattatcgatataataaagatgtgtcttttatatcatgtttgtatggtgtaccccggcttttcctgggacggggattaatacactagcattcgggaaaatgcaattttctcggtcgcgacatctgttcacctaaaacacattatacgcatcagaaaggaatctcctgaaaaaaaaggagaatagccaaaactgatttgcaaaagatgatgcaatgttattgcaaaaattaatgagaaaaaatgtgggaataatatacacacagcaataagttactgggatttgtacttccagcactagaggctaatttatacaaagagaagaaaagagaaatagggcatctatcaacacatgatggccatggattaagaagtggcacaaatagtaagtataagagaagtattctatcatgaacctaagatagaatcttataattgctggtgaccggcaacatggagaatttatatgcatagaacattcctggtgctgctagcatattctagaggcccgaccaaactattggatcatggcagagacagtggtgcaaagacaaatagttgcctgcagtcttcatcatttgcacattacattataaaaataagagccgctcttttaaaagttttttgtttggcagaatataagtttgtaggatagcatttcataattacctgcttcaatatcctatttatcgaatatggggtaacagagtcatctaaaacaccgccaagcaatgataaagcaatcataggctttatttcctccatgatcttatcaactttctttattgaactcgaccaacacaacaaaccccataaattaatctaacaacgcatcaataatagcatgtacatcatctataatatctgcattctacgcatcattgtcatttctggtagaaagcttggcaatcctaataaaaagtatatccttacagtgcatatcctgttggcagaatgctttcatataagctttctgttgatagccttgtagtgatgcctagcatgattttttttccatcgatgtcattctatcaagctaggtaaagtggcaccaccatatcatataatatataatgtagcagtacaaccaataaacatggaatttctggcaactgaattcatattaaataatctgaagtaaagaaaattctcttaatagaagtgaggcataattgcatatgatcattagaatataattaggcttttgttaaccgtgccgtggtaaagaagatgaatggtgtcctgcaagatgaatctccctgctgaaactgtgagtacccctttcaggatagaggtaggaacaacatgaaacagttagtgtttcctaaaattaaacaatgatgcacatgaacaatatggaaataaataaaaaacaatgcacctgcatattgtttgtgttcttcaaacttgaatccataaaactgcgcatgaatcatgaatatgatcatgccataaaccaaaagaggcaaacattaatttaaggaatatgatatcctttttaatcctagttcaacctagacagcgaacaacctagttgagagagagaaccaacctacataatcataagagaattgtattaacttgtgatagaatgatttcttgccttactgcatgaaagaattaatattattccccacactacatggaagcaattaaaataaaaaaggaatcactgggttgtagttaaaaacaaaaaaagaaaaggaaattgttacggtctagttgcttaatagagaggacagctcgatgggtccctcagcaagatggcacgatagagtggtagcacacaagacatcttctctctatctgtgaacaacacctcaccctaatccatcagtcactcgacggaacctaagggtaagatggtggatcaagtaaaaaaacacagtaaatgcatggaagatgctaaactgaatcaaataattgccttacattgctgtttttgtgtgcaacagcacaaagcagaatgggaagtagaggaccatgatgtgatgggatggctgatggcgtcaatctttggcggctgaaggagtggggaactcggggtggatgggggacgcacaaccaggaactcgaacgccggtggatagagaccacgcaagcagcgtcacggattcagttgccgctgcttcaccagatcaactcccgccggaagcttgtgccattgaatagtgatccaccataagctcgtttcgtggatcaagcacatctaccccctcaccgacaccactggcaaggcacgggatcctcctcaccggcgccactagtgaggcgccggatcaagaaaggggcaacccgagaagcccgaatacctccggttggttgcggcaggggagggccggtggaatcacagagctagagagagggaagggaatacccggatcccaggtaattagcaaaacatgcatatttatttgcaaatggtaaaacatttataaattgggatcaacatgctcaaggggaatgtgtgacttgccttgcttcttcaaaacaatcttccgaactcttttcctcgcgaccgcggacttccgaaacgacggaaactacacgctggcacgcaaaacgaggaaaaactctaataaaaaccaatgaaaaagtacataaaaagtaaacaaacatgtagagctcaattttagatgaattttgcaagttgaacggctcaattcggagttcaaatgaattagatatgaattttagaagttttgagccatttaaatgaatttctagaattattaacgaattattgcgcaattactaattattttccaaaggaaaagatcatcgttgatgtcagcaaggggcggccggcgccaacatgcggcccccacatgtcagcaagcaaggggacaggcgcacggtggacacggtccaccgcggcctcgggcgcgcgtccaccatgtggatggcccaaatggggccgggccgatccgatggaccagaccggccacggcggggaccaaggggaggcggccagccggcggcggagcgggcgcggcgcgcggcagcggcgacctggccggacagccaccggcggcagcggcgcgacgcggcgctggcacgggaggtgggcggcgaaggctaggagggagagggagggagcgctcaccgagcagcacggcaacggagggaggcaagatggcggcggcatcccacgggcgaggacgacgacgaggattgtgcggcgtccggcacaggaggaagggtggccgagggtcgacgatacctggggaagcgatttgaggaattaggaggggaagaggggactcccgacgacgtgaatcgccggccggaggcaagaaaagcgacgggtgctcaccggtgtgcgatggaggtggagttccggcaggattcgggcgacggggagcggtggccgaggaccttctcgtccttgcggagccgagggaggcgacggcaaagcgggggacggacgggagtggcggcgattggcggccggaggcggcaatggcgacggtggctcgggttcaccgtggagagggtagcttgagggtggaatgggggagcggcgtggtgactaggcttgtccgcggggcagcgaagccgactgcggtggtggcagggcgcgggagcggctcaggcggcgacgacaagcggctggaggcggattaaggtggtggcggctcgggtgcacggtggaaggggagtttcggcagaggtttgtgcaaatggagcggtggccggtgtgcagcgaggcatggcgaagccggcggtgcaagcggctcggcgcggcggtggctacggcgacggcggcgtgtagccggagctcaccggaaagcggcggagcgcgggctcgagcggggagcacgggagacggcatgaggagctcggggaggagggggaaacggaagaggagagcacgagggtgctttttataggctcggggaggagaaatcgtggccggacgtggcggatttgaagcggcaacggccggcgacatgggcgacatcgtgggtgaagtgggggctcgatttggcgccaaaaattggggagaagtgggggatttggtggaggaggtggaggggaaccgattttatgcggtttgggggcgagggcgcgagcgggagggcgccagatttggcgggacgtgggcggcaaccgccggccatggcggcttcggcctgggaagccgaaggtaggaggagggcctgacgggtggggtcgccgggtccacctgtcggggagggagagagggaggagaacccagggggttagttagactttgcgcgaggggaaggggaaacgggccgacggcccaagagaggagaggggaggctggccgaggaagggagagaggggcgtgggccgcgggagggaaagggggattgggccgggagcggcccaaaagggagagaggaggtttttaattcatttttcattttatttaattgattcaatgaactttatgtcattaaaattacttcttgagctccgaaaattcacggaaaaatccggaaagtgttttagggcacaaagaatattacaaaatattctcggccaatgatttttaagggaaagttttagttctcccaataattcacttgattaaattgattaacttttatttaatttctagaaaacgcattatttaatgatttttaatcccgaatgaaaatcggggcgttacaggtgatctcgtagttcttggtctgtgaagatgcgttattaggtggtccattttcccattgaggacgaacctcaacctgtgctcgagcgatagctctccatacactgataagggatgtctggattctcgagaagagaggagccgtagtgccccccctccccggaccgcccggatcccacgagtgaatagaaagttagatctacatgtgatctcacctaaatcgcccatctatcctcctgaggagaagtttgtttggtttcaactccgattcaaacgggaggagtacgccatgctaatgtgccttggatgatccacatcttcgggtcaggcgctgatgagcacattgaactatccatgtggctgagagccctcacagcccaggcacaacgacgcaattatcaggggcacgctctaccactgagctaatagcccatcgcgtgggcctccctttgggaggcctgctacgccaaaagcgagaaaaacttcatccctttccttttgacatccccatggcgccacaccacaccgagggggggggaggggggccatggggatgtcaaaaaggggatcctatcactatcaacttatctgttccgacctaggataataagctcatgagcttggtcttacttcaccctaaacgaaagaagacttccatatccaagtttagctcagacgtagctgccttgtttttgggcgtgaagcagtgtcaaaccaaaatacccaataagcataagcattagctctccctgaa

SEQ ID NO: 23014 - DNA, 16237 bp, Oryza sativa
agccttcattatttaactttgacactgttgattctattaaaaaaagaaaatggtatttttccggaaaattgcgatgatttcataaaacctaaaagttttgcatatgattacttagaaattgtaatgatagaaaaagtatatactctaagaaaatctttgtgcggattacaaaatttgattcaattttttgtactctaggacaagattttgactaataattactttattgatatattatctaggtgatagaaaagcataattatgagtatacgtcattatgaatatacatgtagcagcagtaccatatagtaaataacaaatgacacttacttccctttctcacttaggtcaacaatagaaccacctaaatcttttctaaaatgactgccatcctcaatcacaccaaaatttaaactacatttaaatgttctgtctgcctcaaaacatcctcacaagaaagaggggaaggtgctggtctaaattctgttgtgccatcaaatgattttgtatctgatctaaatctatgatcagcatctaaaaacctgcgatgtgccatgtaagaactcttgctgccctttgatagccttgtataaccggtttctatgtggcaatcagtgcaagcaacttcacctgaagttgtgcatccatgaaaatatcataagccgggatagtctgatatggtggttaatactgcagcacgcagttggaaaaattcacccttagaagcatcataagtcctaatgccttcacgccaaagagattccaaatcatctattaatggttccatgtagacatccatatcattaccaggggcagttggaccaggaattaatagtgataggatgaaattaggttgtttcatacacatccagggtggcacattgtatggaattgcaataacaggccaagtactatgggtagaattcaaggatctgaagggattgaagccatcagtagctaacgctaatcttatattacgactttcattaccaaaggtaggatggactgtgtccaagtgtttccaagctggagaatctgctggatgtctaagcaatccatcttttgtacgtccttcgtcatgccacctcatatttttggccatctctgggttaatgtatagtctttgaagtctttccttaattgggaaatacctaagaacttttctaggaactttgtggaaacgttttccatcaagactctttctttccatcttccatcgagaagtattacattttgggcaggaagtataattttcatactgtttccaaaataatatgcaatcattttcacaagcatgaatgttaatgtagccaagacctagagatttaaccgtcttctttgcttcataaaaatttttaggtagtgctgcaccttcaggaaatgcctctctaagtaagtccagtagcatgtcaaagcttttatcactccatcctcctagaaattttgtatgcagcaaacggactaagaaatttagtttagagaaggtcttgcaaccagggtacagctcctgacttgcatcatctactaatctataaaaatcatcggcatcattattggcatcccctgaactgccatcagcagcacccccctcccccatttgatctaaaccatatgccatatctctaagcatttcaggaatttcatcacgatcagctgccctctgttctacttgaacttgttcatgtgtagtgcaatgtgcagaagatgatgcttccccatgaaaaatccacagccggtacccatgcttaaatccatcacatatcaggtgttcaattacaatgtttgcttccaaccatgaacaattaacacacttcttgcaaggacacagtattttatttccttttgctgaatgagtaaaagcaaattctatgaagttattgacaccacgtctgtactcagttgtgctcctgaaatactatattattagagtttggacaaatgaagatagtgaggctaaacaattccatgctagtaattgtgtgtttgtacctaggcagatccatccatcccttatccatgcttgcctcttataatgaaatactaaatgtctgaatataaaatgcaaatattcgttatgatactgcaaaaacacaaatggttaacatagctctcaagctcaacaagcattccagtcatacaatcaaaaggcaaaacatcgtgtaaaaaaaaactaaagtatgtaaaagtagttagtaaatcacatagaagtaagaaaaactgatgtcaaagagcaagggaaacacatatgtaccttttagttgtgcgtttgcttgttaatttgttctggtttgctgccaaccttgttggtgtctccgattactcagcaagaccttctacatttttggataataaatacaaaattttaaatgcaacctctgcgatatattttgctcttgtgcaatgcaaattgaaaaattaaataatctgagtgacaatcctcaggttcagaaaagagcatctgtatttctttttacttaagccactgaacatttgtattttcagatgaaataccataaacaaaatcaagtagtcaccctgtttatatgcagtacaatgggttagttagataccatatcacttaaggtaaattttgttaattgttagcacaaataaaaaggcagctatacacctaaatccagacaaagaatggatgctcgcatttgatggtctgctgctttacttacataattagaggagccccctagtcataaactaataaacagagaaggagttccacttccatacctagctaaatatgtcagggaggtcaagtagacaagaattaagcaaattccaccataactactgaagatagatctgcaatggaaaaggtagaaaattggttatgccagggtgaaataagcacacatgagtagtaacatctcagaagggatgggacaacaaccaattggaaaaatattccttttacaaagacagtaagaaccatcatctatcatttctatcccagtagtcaaattaaaaatcttagcacatgactgaacataaaacagaacaaacaacaatgaactctgctccatcaccacatctgcctggggaataaagttaagataagggggaagagaacataggagggaaggggaagaggaagcagggaatggggggacaagcttgaccttgtgttgttgattgcagtggacaaagaaacgtcgtcttgagcttcaagaagggacgacggtgcccagaacctcaggtgaagcagatctggtgagcacagatgcaggtggctccctaggagcgatgaggtcgtgctcttggtgatgaatcgcagccaaatgcgacctccctgcaggaaccaccttgggggcgtggagatggtggattcatgtgggatgggccacatggatgaaccaccgggggcaatacatcgtggatgatgtgggggagatggaggaggggacaggaggaggtggtggcgctgctggttggagaggaagcggcggcggcgctgctggttgggggaggagatgaggcggaggcggaggcggtgctgctacctgctaggtcttggagtggggattttttcaggtttctgagagagagcgtgtgagagagaagagaggtctgtttgtttggagttttggtgctgaaaattttgttccgcgccattccttttttgtttagcgctcgtttctcccgccgatacatttgggccgcgccttttttttcgcctgggcatctacagatatagcgacagacaattggacgggacagttcaattagtggcagacaacttgccactaatctttaccgacagacagtgcgttaaaaaaattatttttaccaacagactgtgtgacaggatattttccgacagacaaagtgacatctaaatttttttctaccgacagacgactgtcttctttttagtgttgtggtgtagtgaatatggatattatgacatcaatttgtgtcacaacaattatatccgcatagaatagttattgaatatcaaagctttatcccaacaaagaaaattaaatatttgttgtattttttgttggtgggagtacatttagttttctctaactaatattttattatagtaatatacgatatcaatgtggctaggatatttgtttcgatcatagtatatagtatattgaatttgtctgacgatttatgaagatacttttcttcttgcttattttttccttttctccttttattcgtggcccaaacgcctgtaattgggctgtacagcccagcttcgtggcaaacaagagcatctgcaccaaaggtctattttcctttctttctttttctttttgtttttcttttttgcgtgctgttcagaactccggattggtcgagacgccaaaccaggcacgacgattaatgcatgagagccgtgctaaattgatcgtaaacttcgccacgtgtaccactcaatttaaggcggttccgccggctttagaagataagatatgtatgtaaaaatatttttttgagaagagaaaatttctcttattaatctattatggtatatctttgatcaacatgtaattctattaccttgttatatttacatcattcaaaaaaatatataaataggacaatcaaatctaaaatcctagatgtgcaactgactccaagactgaagttctttttgttcatgttaaaatgcctctcgtttggaagaaaatatttaacacgttagttgttgcatgcgggcttaggacgaaatgctcgtaaatatgcttatatttttggtttcttgatgagcgaatgttagaaatgatatgtgatgcaactagaaactcgattatatttatttattagcaaaggtgtcatcactctgcatatcctcacatgcatccttaatagaagatggtagaatgcgattatatatcatggcttataagcttattagaaatacaaagtgtcgtaaacaaacatgagagatggccggcacactggtttggatatcatgatatccaacttatttatgactactccagggcagcatatatagccttgcaggggattcaaagtgcgaattcaagtcccttatgcttgcatgatgcagttgtttaggaaacgatagtgacaatatcagcttccttgttgcagaagtggtagcatgcttcgttgcaacgttccacagcaccgttcccttcttcgttgccagcaactgcaacggaaaaaatgattgtatacattagctacagcaaaccgatgattcttgtcctatatgttgaaaaatggtaatttggtttcatgttctagtttctagcttacaagtgtttatgttgctgcacacggatgaagtacatcccagcatacagaagtcaagtacatccaattcctctgcaaaatcatgcattttcatatatatttcagtaaagtactaatttctaatctcttgcacacaaggttgattgagctgcatatatgaattatgaaaccaacagccaacaaataaagagaaaaggaagttaatatgttttaatttaccagactcagggtgaagggtgtggtgaatgtaaggtggcttgcatttcccatcaacaattttacagccagagagtttagaacatctttcccttgtgccatgcgcaaaacggcatgcattatagatgtttcttgccgtggtggttgggcagcagctctttgctcccaccttgatcgtctcttgctgcaggactaagcctagcaccagcacacacataatcaaactcttcacacctttcatgttttctagcttcttttcatcgagatttagtcgaggagattagcaaagcaagaggctaagagacggtactactttcttccactcgtctatgcagatgttgggagagtgaggtgcctatttataggcgcaaccaggatcacgtcccagctgcatctgcatgatatactgtgattatttatcttcattagattattattgttaatatttcttatgtgtgtattgtttgtttactgggacaaggacaaatgattcatccatgtggattaattgcatggtacttaataagctactagtgtaccatcttatcttcactattgtaactcccggccatttcatgcaatgatgcaaagccttagctacccatgtgctgaatattaaacgttttgtactggcttctagtagtactgggccgtagcttggtgactgtcaaaaagttttacacaagtagtaaattaatcaccatacaaataccacctgttcacaaacctgttgttgcttttaaaactagggcacgttttgtaacatacctgaattctaggattaaggaatttccatcaaaactagttgaaagggaagttcttcaattttgtaaaccaaaaatttccattttaaacctaggtggagttgatccaactcttgcatgataaaattttagaacaaattaaaaacctttgcatctctaacctaggacaaaaatataaatttatgtgtaagcatgcatactctcatagacatgtttgacttgagtccttcatatgcatttggattcggattgcatttggattttcgatttgcatttcataataggtctcatgaatattaactaagatctagataaacaactaaaccattagggcctagtgctagctagaggaagttaaaatagaaaccatacaccttaaaatatatcaacaaggccaatgtcaagccccacaaaactatttcggtcatccatctgaagactagtcatgaacatggaagtgaccaaataaattatatcatatagggtatattctatcttaatcatctctataagcattctcttaatttaatactaatgtaaacttatgcataataggtaaggagcttatgacctgtgtaatgtaaattgtaattctaacatatcaacatcacctcaggttaatgagagtccaaatataacttttataaacatttacatgcatttaggaaagggaagcatttataagatataagtcttgcgaattatctaaaataattcgtgcaagataaaatcatgggaaaattcatgtaggctctaatcaacacatgcaactcactgtaattttggtatgatttaataactaaatttggtacctcaaataaatcagtcaaactaataaaaactagattaactgtagttcttactcggctaaaaccatactttgtctaaaagtgcatttaactgcataaaagtgtataagtaaaataatttattcaaatactaggtcatttataatgaataaaaataatttttccagaatttatcttctctttttatgtctcctaaaaattcgaactattttccaaagaacccatattcctctaatttctgtgagtaatctatccataatttttgagtgcaaccaaagaaaatggaatctaggtatcttcatctaccttcagaaaaatccacactaaattattctacccacaaattaaataattgaaatactaaagtgggagagagaaataatccttaaaatcattaaaatcattcaaaccttttgttcacccacgtttctgcccaaccctctcaccctagcttagtttgccatgacctggacccacttggcagccactctggctcgtcctcaccctgtgcaaatcttccagccgaccagacacagccgagagagagagattggcgccggctgtgtacgacgcgtggcctcgacgtggcagcgccgaaccgaggcttcacctccacccagctgcgtcgccattcttcaccaccatcccagtgccgatccaaccgagggaggaagctccagctctccctctccacctctctttcgtcgccggccgccaagaagagggacatcgccaaccgtcgtcgagccctcttcatctctaactcatactcgttccattctcatctcaccatgacgaacaactttggttttgatcccattccatttcatcttctacagcagcgggaacgccgccatgtcatggtcgctctagagcgcgctctgtgcaccgccgcagcgacatcatcgccgttcccgcttatctggaccaagccgggccaagctgtcgcgccagcgtcttcgcctcgacctcctctccatttcccctcaataatctcgaaggatggtgctacgagtgtggagatcgtccaccgtcttctccacctccggtcaccgtcgccgttgccgaatccaccccctccggtgagtaccaacccaattccatgcatcagtaccatctctggggcctctctaacctcatggacacacatgcatgatagttcttggagctgattgagccatcgccgttcacccggaggttcttgccgccgccgagccgttacacgagccaccgtcataaacctagctaccccagccatgtctaccatctcggtgagcacccttcagcctatagaacatacatgcatgcacccaattaaccaatacatgattgtagaagcacatgcatcaccacccgaaaacatcctcctttcggactcgccgccggcgttactccgatgtccactgaccgagaaaagtagaggaatggaatcgcaatagcatgatcttcattttgtcttttggtcgcaccctcaaacgagccatcgtttgtcgccggtgagctcgagattgagctcagccatggctgttctgcctctctgcgtgagaaaagaagtcagggaccttgtttcgagaatttaaacaactataaggtttaatgtgcaacttttcaactcactgacatatgagcctaggtctgcgggttgattcttagaaacctcagggatctttttgtatattgatctttcactgacagtggaccccttggaaacaaaaatctgaaattataaaaggaaagtacctaaaacttgtaaaatccatataaaattaaatatagctcattttaagatgattcaaatttctgtgaactcaccaaattgggagctttgatgttatggaataaaaacttccactcacagtacaaatttagcctctaaaatttatccaagttaaatcacacataaagcacgcacaaaatttataaaatgcatacagaattcatttcaactcattttggagcaaactcagtttctacagatccaccaacttatgttctcctataaagcaaaatgaaatagcatacatactatacatcaaatgcctctaaaactattacctttaaatgactagttttagataagctgaattttagaagttcatataaaattcatcttagatctttttttagtaaacccaagttctgtagaatcaccaaaacatatacttccaaattataaaataaaattatatacttactgtatgataaaagcctctaaatacttatgtaagtaataaccatcatagagcaaccttaaattgtaaaatttgtagaaaattcatctttagtctaaatgaagtgaaccaaatatctatagaaccagcaaacagtgggcttcaacatagtaaaataaaatatggaaccttctgtacaggttatagctctaaactttaaatttataggataggtgctaatcacatagtatcgattgagcaatatgtatatatataaatgtatatagaaatacactctagctataatgaaactcaaataaaacttgttagaccagtgaatgcatagttccattcccatccaccaaaacttaaggcacttagctcatataataatttctaggttgatataataaattgctaacatggactagagctcccctagtttataaaatatgaaccatgataataaagaccataagcctatgaactaaggttagattagctaactaaaatactcattttatacatcactagctagatgaggcaagttctagacctaaacctctaaagccatgaacctatagaacactatacacctataacacgttataacttgtaaaatacataaagaattcatattaactctaaaaattatgaaaccaaatgtgttagtgttagaaaacacatatcttcaccccagcaaacataaacttaataagaattaccttacaacagcatttcacaacagtaactaagtaaatcctacactataccgacgaaacttctaaaattcataactcccaaataaaatgagataaaatagaaattctttcacctaaattaattttagaccagtacctattcactgtgcacaaatcatccattttagagcattttggatttttcgcatatttcggtgtttaattgcataacgtgtactttgtatagatgattgcttaaacggtgaagaagtgatttaggtgctgacattttcctgattcaaggcaagtcccacctccctctctttgatcactttgaacctatgttttggaggttattgaaaatgtttgcaaatcctgcatgtcgattgtgcattaacaaattaaaattgtgttaaacttgttagacaaactcctattatttgcattatcaccttaaccccacatatatccatatccctcattcctaaccttaggaacaatatgactacaccactttatatatgaattttggagtcactaggttactataatgcttagccatgcttagaatggtcttccttgtcattatgggctcattacaaatatgaaaaattgattttgaaataatctggacagaactttaatacttgtgattttgataaataaaatgatggaaaacatggattttaggtttgggcctcaagtggtgcacatatggtgattagttgtgtaccgatagggggagagtgtgcccaaaccgacctaaggacttcactcaatgtcagttcatttcgtatacagtgcaaccacatgtgctagtatgggatagcccaagcttagtaaattatttatggtttagccttacattctggtaggccggtgtgtatgagttcgtataattcagaggagtttcctatttaccccgaagtggtagtttaggtgactaagcgtgtccaatacaacggtattgtgccacgtggtgggttcccgttgtgtccgccaccacggcgttaagtttaaggcgtgggcccgccacttaacggttctaggtcatataacgtgtatggcttaggatggagtaacacgtatcgtgctggtgtaaggctaaatcatgaattttggaaaagctttgttgcgggtaatcgactgcttcttctaggacttgaacttaatggggtaaacccctagtcggtgtgcttgtggattgggtagacaagcttccactgttctatatatttatttggccaattggccaatgtaactaaagtagatgtagtttataatcgctttcatcttatttgtgtttgctatgtataatcatgcttgagatgaaagtgtgaatctagtgcacatcctgggaactagattcacatgagtatgagttaagaatatttgagatgttgtagatctttagccatttttgtcaagtctcctgaatgtgtaacacatctggtcaccgccttcgagtggtttgacgggcacatctcaggctgaagttgactggcaggctaaaggcccggcaatgtctccaatattcctctctcgaggcgtcggatatttcattatacttgtttgatgacttgaattatacatttcatctctcaattataatggaaggtccggagagcctacgacacgtttaacgaccgattgtgataaataccactgtaggttccttaatacaaataccacctatccacaaaccagttgttgcttttcaaactaaggcacattcaacgaccgatcgagataattactactgtgctagttccttaaagagtaaatttcataatcattcagctactttaattgatcaaattattttaaaaatatagatttaaagtgatgtttaccaaaattacatatttaacaccaaatttactatgcaactacgaatttaaggtgggtaagccaaagctacatatgtaataatagagttatatataacaaaactacaggttttagagtttaaatctctagtgctactattatgtcagagtcataaacgttgtagatttgtgattaaatgggtacataaacagtagttccatgataaatttaatgctaaatctgtagctttgtgatacaccatcttaaatctgttgttttgtattagtttggtgaaaatatccgttgttctgtgaaatttacatagaataaaaaatatagatgatttgcatttcacaaacttgaatacacacttgcatactgatttggggaatgactgcagtaagaaaaaaaaattcacacataagcaagttgatgtttaagaaaatttgatggcaagaacacatcgaggataaatcaatagaaaacaacacaaaaaatcttaaaaacaatatcatacgcatctcggctcaaatccaacccaactgtgctagcatgcctcgccattgccttaaactccagacccatcattgttgtcatgactcgcctcctcagtctccccctgtcacaaccttaagctagatgtggcccgtggaggagttgcccgggtttaggaagatgagaagccactattgccaatgtgagggcctgatccagttgtcctggctttcttgcctgtgtttttgttgtcatacctggttctctgttatcgaaagaggagtatggattgtgtcagacaaggagtagacggtgctggagcaagagtggatggcatcgcttggagccggctttaatttacgtgatgtcttgaggtgatctccacaacagccgagagggctgtaaggtaccatcatcatcagggaattcgtcaggaaagcagtaaacatttctagcgatgaaaatggcaacatcgtcatgaagcgggttatgggtggcgtcttcaggtaccatcatgaaataaatgatctgcctcataccgtcattgggggagatcgatcttggaggtcattgtgggaagccatatatgagtggggatgaaagagagagggggaatggagagatatcgagagaatcgggtgttagtgcaggacttaaccagatcaacggatgtgaggccaacacttaatgtggttctaaaactatgaccgccatctcgcaatttttgccattagttcaccttaagaaccggtattgaatattactgccagttattttaattcgcagtgatttttgtactgccggttccatttggaccaagattgataggccggttggtgtttcggtactctgtatcagttattatgtgttgcgtctaagtttgaaaatttgtaatcctacgtctgtgtaagaatatataccccgctttacactacaaagtttgtagcttgtagcacctctcaaatacactaaagcactaaacaaaatatcatcctagttaggctccactactgcaaaacatctgttaggtgccagttgcaaacccggcatacatgctgaatttacagccggcacatatcatctggcagcaataccctagacttattggtgccagtggtaggaaaaaagaaacgccagctcgatgctttgatcagtttgaacctgtttcccaacattggatcaagaatccacatcaacagatcaagaacatacaggatcaacaatcccccaaatcaacatatcaagatcaaccccacactaattaatcccctgatctgtaacttagaaactaaaaaaaatgaaaagtctggactcctataagtcggtagctacgagggttttgtagtagtgctcaaataccatgacaaaaaaggtttggcaaatatccaagggtgccatgtcgtagttatgttcttcggtgtatgagattcatctctagtgaaaaaaaataggtcatctctcatatggtagcgatcggacaataataaaccttttgtttagataaaagttaaattaaactatgaaatgttatctaccagatgccaccatatatacatgtgttcatgtaagaaagcaatattactagagtgtactagtagtaacgaaagatgttataggagttttactgcacattcgctagccacgcgtagcagtacggttgttgggagagattatatttgtcacctaacgtgactaaggcatgtacctgcagtatactctctccgtctaaaaaaacaaaccctggtttccgtgtccaacgtttgaccggccgttttatttgaaaaaattatgaaaaaaattaaaaagataagtcacgcataaagtattaatcatattttatcatttaacaacaatgaaaatactatttataaaaaaatttataagacggatagtcaaacgttggcacggaaatccagtatttgatttttttaaggacggagggagtatgtacgcagcaactgtacttgcacaatttcaattatgagttggacttgagggtgggcttatgacgagatcagctgacgcgaggctaattaaagcttcacgtcgtcaccggatcggctggccggctcgcaattttcaaattagggtgtgtttaattcacactaaaattaaaagtttggttaaaattaaaacgatgtgacggaaaagttgaaaatttacgtgtataagaaagttttgattgatggaaaagttaaaagttgaagaaaaattttgaaactaaaccagaccttaatacgtgttgtccttgaattattgccactactagtatttattctgaacggcattgatacccgtacgttctagttcaactggaaatagtacacgagttggtactactactaaaccatttgtatagttctcagacattttagactgtgtttagttccatattaaaattagaaatttgaaaaaaatgaaacgaagtgacggaaaagttgaaagtttatgtgtgtagaaaagttcgatgtgacagaaaagttgaaaatttgaagaaaaaaattggaatctaaacatgatcttaattattatatataggcagataagagatataccgatttgccaccaaagtccaaagagtctgtagcccaagagattgtagcatcgtatagaacctctcaaatacataaaaaacgattgggattataacacctctcaacaagaaaagccatttgtctggggacattgtttctagtactccacaagatcgcggctgtgcaagagcaatcacgcgcgccaccgtgcacgatgtaacgagcacatgtatgacagtatgagatgcctttgagcagtttcaattcatgtatcagcccaattaattatatgtttgtcagaactcgatcagaaactaaggtttcccagaaatacaccctccgttaaaaaaaagacaacttctaaagataaatctggataaatgtttgtccagattcatctctagaatttggttttttataagacggatgaatagtttggcagggtatataaaaagacctttataccaagagagtacatgctggattgatcctttctaacccccaaaattatatatataattatatatgtatctggaatgtgtgtgtatatacatacacttcgcggatgctgacaaacattgatatttcgaccacatcaacatgtattaattacctcattccaaaataaatatatatatatatttttaggcgttagcacttaaatgaggatggagagaaaaaaaatactccttactaaaagaaagtagctttggattactgttaatggcactactggataccacacgctttcctgcgggatatgtaaacgaatacatgttatacattacagaaataatataggtatagtatatatttaaataatgtaaaaatgatgcgaaaataatgatttgacattgatttcatattgagttctaaaaatataacaaaattataaatggtatatcatgtttgcatgatatttaaaatattatactacctccgtcccaaaataattgtatttctagaattcaaaatttgtccaaaataattacaattctagagtactaattgccccatcaatcatctctcattcaattttttcctatttttcccttaaccatcttcccgctctcacataaacactatttaatgagggacactatagtctttcctctcaaaccttaatacatgctagaattacaattattttggaacggaggtagtagataataattgctagtgagtgatgatgtatcacacttgcatatggagttttaggagttactgtacataaactgtagatagtatagatttattggatggagaatacgagggaacatatctaatgcactttaattaggacaaatattagcggataggaatgaattcattttgggatatatatggaggaagcatataactagctcctatctcgtttaattttgatggacaattaatataattattcatacaatataaataaaacatcaggctcatatcgataaaaaaaaatactatcgg

SEQ ID NO: 23015 - DNA, 17292 bp, Oryza sativa
ctgcagcctgcttggaacctgtagactctctatatctaccgcagcccggagttatatatggatggtacagttaataatgcttgatggtgattgctgaaaacgtggcaaaattgggcagaccattgataactttgctagctacgtgccagacagcaaccagatccaaaacagtgttaaaatctgtactactgtagcatcatgcatgtttcacgccctttgctctcagcctatgcgtgccagctagcctcttttgccttcgattccacagtgccactgaactgccacacctgcacacaccaccacgtaggcacccaatacttttacatctgtgagtatgtcccttaatttgctatttgttcaacacaggtgattaaatgttaattaattcggtacacctactaaattcatagggatgccgcatatgtaaattatgaacaccataatttaaaccatgttctggagagtactatcttcagttttgtttggcacagctttagctcctggagctgaagctcatccaaacagtttcagctatacctaaaataggagcagagctgggtggagctctctcacaagataaactagagttgtggagctaggtctaggtagctccacatcaggaccggtcctagggttttggggccatagggcaaaaacttatatggaggcccctatgtatacatgtaaactagtatatatatttatatagtcttataaagaggaaaaaagatagagaaatttaccaaataagatgaattggacttgaaggagtgtaggatcttgaaatcagatgaatgaatgaattggaggagtgtagtgcaggcagcgggcgacaggggcagcgagtagtagcgagcagagaaggcgaccggtggacgatcaagacacacgagcatggctactggcgagccgcgatttgctgacttgccgtatccgtttgcgagatgccgagaagtcaccgagagcgcaggagcagcgagcggcgtgatgtgatcgagatggtgcaacgcgagtggcgtgtgtgatgtgatcgagacgaagcgacgggagtcagaggaagatcgcttcgtcttcgctgaaacaagcctggcgatggactaaaattcattttctatattgggctattcagctgtctaacttatataggcccatggcccatggactaaaattatataatacgtagtatatatactatatgtgtataggggcccctagattttggggggctcgggtggcggcacggcctgaccccccccaggaccggccagtccacatctccactccagacccaactcatgtaactaaatttagacgttggagctctaccaaacaggccacccttacacctatattgtttcatgaatctcatcatagaaaacccaatccaaatcaaatgtgacaccccaagtattattcgacatttctggcatccaatatctctccatttgacctaagaaggccatggtagctggtggcacgtggtatagacttcggcaaaacatagtaagtgctccgcgaccaattcattatggaatacacaaaaagtagatggacgcactcctttttctttcacctgtgttcataaccactctctacttagaagccattatcgatcgaaaatacataaaattcaccgctgacccgtgaaacatgaggatatgttttgtgtacagatgacatgaatcttttcggggatatgagcagttctcacagtatttgtaaactataacctacctccatggttgtgcttaaagtggaaatacgttatgttgcgattgttaatccacggaccgaaacaacccgtctcaatgataatgatgtattgttagagccggttatcgatgatctagaaatactctggtaagaactttaatctccgcgtcctattgttttgcaccattaatgactattccatccttggtaatctttcgagacaaactgtgaaaggaaaaaaaggtttgctcaggctgaaaaaatcgcaaaatatattttacatgggtcataggagttagttggctccggttacgtcactcgtacagaaaaaagaagaaactttttcaacggtaagaaagagcttcaacatgctccagtggatttaaccatagatgaggtgcatgacatgattaatatataagtaatgagtttaggaagaaaatgaaatgtcctaaggaaaatgagaagggtttgtggaagaaaatccctatatattggcaactaccttattggaaagatatcgacgtccgtcattacattgatctcatgtatacttcttctatgtattatcttgtagtactatcaaaaaatcaatgttttgaatacacaattatctagtacaatatttttggagaaactatacatactacaatatacaaaggaaagttgttggtatgagctatagcccacctcatctagcaccctcttgcctagctaagcaagctggattaagaaaccaaactcagatcttcagttttttaacaactgggatcctcagaatcctccatttttcgtgtcgtaattaacataaagccgacacatgttgatttgttctctctcactatgcaaatatatatacatagaggtgcatcattctacttacactacttatcagagggaatgctggggtggattgttggatcagaagtcattacacaaattaatcaatcgagcaaccatttgtaggctgtagaatgaaagattgtggtgaattggcctacaggtcatagagattttaatcctattgacaacccactctctcaaacagtagtaacaactagtgttgaattggtgtcatgttacgcatgttggacataatttgcataaaagttattgaagggttgtgtttgatgaagacatggaagccattggtgaccatgtttgcatcaaaaggttacagttctggtagtaaaacaccagtacagatggtcataaggcttgaggcccgatagttgggccgtgcctgggccgatgccttggcacggtgggctggcccgacacggcacaatcaaagaaaaagttgaggaatccaaaatagacttaactcagccatacaagacatggcccatagagaagaaggatacacgatagacttattccaaccatataaaacatagcccaaagagatgagggaggaaaatagacttattctacgaagaagcacaatgtgttgtcatgccttcaggcagcctagcacggcttgagtcttaatgggccgtgcctgggccgtggatgcagcctgtgggtaggcacggcccagcccagcgtgtagatcgggccgtgccggcccaactgaactcatcacaagcccggtcatgcccggaccgggtgacccatttgaccatctataaaaaccagtggtaggtggtgcgatgagggtggcgttggccctccggtctccacttgtacttccctgccacggatgtcacccttcgaactccctcaagcacctctatcagcactggcttaacctttattgggaactaggaaacatctatgtttgtcacctcacacacgagctaggttcctttagtttaatggcgctagtgagtcgggggcatgtcggttgaggtcaactatgtgcactctgatcaatgcacatatatgtctaattaaaaaatacgtaaggtttccgtgactatttttgtccgtcgtcgtcatcatccgtgtacgtgatggaaaactctagtgaaacggactctgagatgagaaactctagggttttgcttatttaggatagggctcgattccgtgcacgatacgatgcagttttgctccgattcatgggaaaacggagagaggatgagataagaatcgaaactcctcaatcaattttgtactatctccaaggatgctaccggatttcacggagaagacgatttcagacagcgtctgcaagctgcgggagtctagccggaggtagatgacgaccgtgcgtgtagcgcgggtacccacgcgacagtgagaggagtaactgagggagcactattagacttgtggatgcctgatgggcttgatgcgcttgcaggccggaggcgaaggggaggagaaggggagaaaatgggtcggctcggctgcgtgttgagggaagaaatgggctgaaaatggcctagggagaaaggagggtttttatttagaattttatttaaataattgctgaatgatgtttgtattatcaaaattagcagtatagctctgaaaattccgaaaaattttaagatagtttaattaattaagaagaatttaatataaattaaatccagccatagtttaattgggaattttttttcccacatttacttcaccggaaaattaattgaactttagtataaattctagaaataatttattaaatgatttataaatcccttaaacaaaaatcatggtggaaaatccatcaagttgtcaatttggattaggacgatacatacatatgtcctatcacccacaaaaatcatgcatcattcaaatttatgttgtcactgcacatcaaaatagaggtctacgagatcaattaaatgaaaatgacttgatgaaaacgcattcccgagatctgtgaactcaatgatgccatcttctttttagagggaatgtgctactaagacgcaacattacatgcaacatgaacgttcatccgtgcgttgccgattcggcacccgtctgtttaccgcgtgctttctgtgttcccatccatggtggtctcacgacagaacgaaccggtcccaacgtcccaaccacgactgttttatcaagccactccaaaactagatagtacagtgatgttatgttaacgttagacctaccatatcaccagacctaacatctttcttttcttcaacatcgtatatatgtgtaattgcaattttcatatgtagcggggatgaaattgcaactacaacagagatacacacatggtttctttatataaagaagataaaattagtattttaattaattacataatgtaaatctttcttaactttttcttaatttttttgaattttcttcctattgcaatcgtacgggcacgttgtcaagtggttagagacgtgtataagtcctggagactcgtcttggtcgggcatgggctcggccggggtggtacgtgtctgttttgcgtcttcctatggcacagttgccatgatatcaaccaacataattatcctatatgaaggcacatggattgcctattatttaattgtaatgacaaactattaacacactatctaaactcatcgattttccaacactattatttttattgccctaattaactagtagttataatactgggagtctgagtctctgagagatactattttttaatgtaaaatttggaacctctaaataattcatgttcctaccaaaatttacactagtaaatttggtatatctcagtgcatctcgaggattgtaaattttccctaattatgaggacgtgatacgtactgacagaaagtgagcagttatgtgctatcagtagcatgattcgaaaaataaatttgcagagtatatttgatgcgcacaaaatacttataaatatatgagtaattttagtaaaagccgatgttttgtagacaaacttcttgtaaaaacccatgtattatggacatgtcataggttttatggattgttgacgattgtcttcgcagtgtccctgtgatattgatcctgataattggttcaggccctctcaatgagaggtaacaccctactcctgtttggggatttgaatccgccgggtgtagtatagatctgatgatcatatgtgctcatgccccctagagagcctcctgcccaccttatataggatggggggcaggattacaagatagaaaccttaaccaatacggtatcggttttctaaatatactttacaatcttatcaaaccaggactttaggccgttccataatatacagggaaacgtaatacccaaatcatgatctgttacatatttcatagatataagttatcccctataactagacggataaccacgccgtgtgggtatggggtacccataatctctacagtagcccctgagactttcacagtcgaaaagataatcttctctcgaactagattactccaaagccgagtgcttcaatcatctttgccatggtctcccgtgtacttttaccaaatctgaagaccgtggagggctgaaaaataattgaatttagacttaggtgcactgactagatgcacctaataggtgtagcccctgactatgtgcttagttgaacaaactaaacatatagtcaaggagtaaataatccaaccaaccgagtggttttgataattgtagtcaaccaagtgacttaatattaagatgtagcatatgcggtgtgaatccccgagtaatcatgatataccgactgctttgtaaaaattgatgcgagcaacctaaagttgagtacatcattgaaaattcacatagtaaaacagctataaagaagcttgaatgctgcgaataaagaaatttccaaagtattgggcatacgccatgcgcacactgctttaacagatgtgcttaagtctctaaaagacacatggtttcaccacacttggaaatatatggcatatgtggtgtaaaatccgagtaaataaactcataaaggatttaccaaccgcctagaaaatgaccacaacgtataatcagcctaagccataatattggtcaacaaaaatgcacacttacgtggcaaaaagcaacgatattgtatccaatcaattgcttgataaacccaaacagtgccttgactatataaaaaagtcagcggggcagctatataaagctttactgtttgacaccttttaagatgcattgtaccaactcctaaaaagttgagtaactgcggtataaaagattttaaggtattgagcatttgatcacgcgcactttggcctaagcaaaaagtgcctaagtcactaaaagaacgtgacaggccacacctgaaaatatgggctgcagacatattaggcctaggccaaaaaatatgcattcgacaccctttaaaggatgatgcatgtaacatgctcccgagtaataaatcttccgagtgatatagaccaagtgtagctcatatgaatagcttctgatctgagtgattatcccttatgggatactccaaaatagatataaaaattgaatcccgactggtgcaagtattagttgataacccttacggggaataatgattggtctggtcttcgagcacagaaaataatctcaggactacaagtacatgttgtctgtatctagaacaaaatccaacttgaaggtatgatctttgtgtttgagttgataagcccctgagcatatatagcttgtccttttatcatagtcaaaattgtccattggcaatagctgatgcagttgatatgaaagcaagatgactaacatggagatgatatcacccatcaaagctgacgacgatgttggtggtggtaaagacaatgacgccaatcaaaggtgatgaagtcgcatagccgtagaggcgaagaaaccagtcggcagcagacaagtcagccaacagtgaagatgaaggcgtccagcaacatcgacaaaattgtgcagccatggtggcgaaataatcaatcggtgacagacgaggtagccggtgaagaagatgaagatgcccattagtggcgacataataagccatccgtgaaggcgaggataccagtcggtggtgacgaaagcaagccgacggtgaagatgtagacacgcatcaaaggcaacaacgaaatccaccaatcatgaagatgaagaaaatagtcggcgacgacaaacgcaactgacatgataaagatgacgatgtcggtgatctagtgaatagcagtgtcgcaacaaatgataatgacgaagacgctcatcagcatttgcatagtaggtcaaccgtgaaggtgaaataataagtcggtgaagacataatcatccattagcaacagcggagatgttagggtcgatgaagcagatgtgctggtgatgatgtcagtgacaataatccatcaaactgttgagaagatattgaagctcaagtattttcttaatgttggcatgtgtgtgacgaagattgatgcaacgcctcttgatttataaagatggcagtagaacttggtgctatagctgttgcagatgcttcacttagaggaaagtatatgctgttgttcaactcattgaatctgatacgagttgattggttgatgactccaaactcccagacatgtaaatttaatcttgacctactgctctgaagcgaagacaaaattgatgactcccagagttgactcgttggctgattaattgattaattcatcttgacataaagcttgtcgaattttgagccatgtatttgtgtagcccccgactatttggttagttgggaaacaactgaacatagagtcgagaattatagcttcttgtcgtcgagtagtcattgcttgattgaagatatgtgttgaagatgtccaagtagaaatcctgaatattggagagccactttttgtagtaaaataacacggcatcgcatgccgagatgtcgaggttcacaaagacgtcgtggttggtgaagtagcaaaacttgcgaagtagcagcaatagagtttgccggtgccgaagataataaagatgaagtcgctccaccatgatgacaaagttgcattgccgtaatggagtgaacacgagtcggcggcaacagaagcaaatcggtagtgaagacgcgcagttgtgaagataaaagcatcagtcggcgacggcataactagtcggcgatggaagacgatgatgtccatcagtagtggtagcggtataaaccagacgtagagacgatggcactagtaagcagcagacgagacgaccggcgatgacgacgataaggccaatcaacactggcagaatcatgcagccatggaagtgaataaactagtcggcagcagacgtagacagcttgcgttgaagatgatgacgtctattagcggtgacggcgacgtagccagctgtgaagaagatagcatcagttggcgtcataacaggccagctgtgcaggcggaaacaccagtcggcgggggacgaggtggccggtcggtgaagacgtagacgcctaacatcggcggcataataggccagccgtgcaggcggaaacaccagtcggcggcggacgaggtggccggtcggtgaagacgtagacgcccaacaacggcggcataataggccagccgtgcaggcgaaaacacgagtcggcggcgacgaaggcaagccggtcggtgaaaacgtagacgcccaacaacggcggcataataggccagccctgcaggcggagacaccagtcggcggcggcgaaggcaagccggtcggtgaagacgtagacgcccaacaatggtggtgtgaccaaacaaccgtataggcgaagacaccagtcggcggcgatgacgacaagccggtggtgatgttctgactgatccattcctggagcgtaagagataagcttaaagccatgaatcccttttgtgcatatctggatctggatcctgcagaacaaacatataggatgagtagtatctgatgtaaatataatcctcgagaaaatttcaagtattttaaaatgtttataaatatgtatttatcctcttgtcaattttgatttccccgagcagatgacttattacgtttaaacgctctgtccgactagtcatagcccccaagcaccgggagtcagcctaggcacttcccaaacatgcatatgagtgacatgagttcgtcattcatggaacaaagtttcacgaatcagaatttactactcgggtacttttgcaattgtgaagagcagaaaataaatttatcttatctctatgcttttgatttattccgaataatacttagcaccttgcgttactcggtccatccaacgagcccccggtgctagcaattggcccaaaggcaactatccattggcgaaccaaacggaaagcataggaagatggaactccataactcgataggtacttttgtactcagattatgtcgcaagcaatcaagataaatattatgaaaaatatgatataacatctgtagcccctgactcactactcaatggaggaccaattggtgtagtgaggcagaggaaaaggaaaatatcatataaagaaaaaaattaatgatgacttagctttttaatattcccttggtgatggcagaagtagccgatgtggaaacaaagccgtccatcaatggcaatgaaaacaccagccatagaagcagcttgaggtgactgacgatgaaagtgaagatgcccatcaacggcggcatgataggccagccgtctaagcagaaacaccagtcggcgacggcgaaggcaggccggcggtgaggtcgtagatgctcgacaacggcggcataataggccagccgtgcaggcggagacaccagtcggcggcggcgaaggccagccgatcggtgaagacgtggacgcccatgaacggtggtgtgaccaaccaaccgtataggcgaggacaccagtcggcggcgacggaggtaggccggcggtgaggacgtagacgcccaacagcggcggcataataggccagccgtgcaggcggaaacaccagtcggcgacagcgaaggccagccggtcggtgaagacgtggatgcccataaacggtggtgtgaccaaccaaccgtataggcgagaacaccaattaacggcgacgaagacagttgacagtgaagatgacgatgcccatcagcaacggccaatggagaggcgcagcccggtcagcgtgagccgtacagggacgatagtcgggctcggcagcgtggaagcagccaatcgcgaacttgttgagacggtcgacagtgtcagcggatgtagccaaccatgcaggcgaagatgcccggcaatagtgagtgcggctaacgcgcggacatatcaagtcgatactctgcggcacggcgacggcctgaccaccacggcatctcagtagcacatgcaaccaaacaaataattaaattgatcagcagcagcaaggaattaattaaagataaatgcacaaatatcacgtgagatgtgattggttgctggcttgatgggcatgcatgttgccgatgcatggtcctgtgcatgctggtgatcacgtgtcatcgtatcatttgtcggccatgttgccattcacagccttgttgaatttggttgttgatgatgtcgccggtggcgaagacgatgcaacccgcccgactagttgacgatgacggcgcggccgcgcgggcacaggcccgtgcacaagtctggcagcagccggtcagtcctcgccgactttgaagcggcggaggaacagatccgcggctccggaaggacggcggggagggaggcgacgtagtcgtcggagcggaggaggcggaggtcgcagcagcgcgcaggcggcgtagctgcgtgcgcggtaccggcgtcgtcggtgtccatcagctgcagccatctcctatgcatgccgattagatcggttttgtcatgccttgtgattgtagatccatcttgcagcatcatggcatcttcgttggggtagattgattggttcattaggcttggtggtggacgaccatctgattcgtcggatcgtcgttgccatcgtgccgatacgaacaggatcaggcggagaacagcaacggcgaccggtcttagggtttggccatgatgctccttagttagattgaatctctcccgactggtttgaatccaagtcagagaacgagagcttgttaaaactgtcggtgataaggaagcaaaactcctgaagcgaagtgaagacgaagccgacgactcatgaagttgattccatcgcactagtcaataggaaactcggcgtcacccctacctggcgcgccaactgtcgaaacatgaattcggcaataataaaagggggtagcgcacgagacctaaaagtggatggatgcggagacaaagatttagacaggttcaggccctctcaatgagaggtaataccctactcctgtttggggatttgaatccgccaggtgtagtatagatctgtcgatcatatgtgctcatgcccccgagagggcctcctgcccaccttatataggatggggggcaggattacaagatagaaaccttaaccaatacggtatcggttttctaaatctactttacaatcctatcaaaccaggactttaggccgttccataatatacagggaaacgtaatacccaaatcacgatacgttacatatttcatagatataagttatcccctataactagtcggataaccacaccgtgtgggtatggggtacccataatctctacaatatgtgatgatgagatgtgtcatgactcgcagattcacaatttttgcagaacatttgctctttttctcttaattaacaatttgctgaacaatctgctattttgcagctgctccaactagtccattatggcagaaagtggagagaaaattttgaaggcccgatgaacatgagtagagcaacacaaataagttcaatgaattcatagtactaactacaccccaaggcctgatgaacatagagcaccccatatgctagtcctctccactcatctgttatcctttttttatgtcctaacagatatagataattacaattatgcgatgctcttttcacaaagagggcagctaccgcacgggattccgttgcaacgtagctgccacgggataagatctccactaccttatctccttcctttcccctccacaaactctctctctctcacaggagaagaaaacgagaggcggagatgaagctggccaggaggaaggggtcgtcgtcgtctccggcggccgtggacgacgacggcacggcgtcggcgaggtcggggcggcgtcgagggtgatctcgccgcacctccacgacgtcgtcctccgcccgctgcggtgccgcctccacgcgctgtggcgctgcttcttccactggcgctctcgttgctgccggcaccggggcctctcccctcctccctcgcgctcctcgccaaggtcgccgtcgtccttgcccgctgctcccgccgcctccttgccagtgagcgcaggtggcaactcctccgccgccacagaagcagaggaagccggtggtctcctcctctccatcctgatacttggtaccttgggtatcaggtacctggtacctctggtaccgtctgatacatttggtacctggtaccaggctagtacctaaaatctagtaatgtgatacctggtacctggtacctggtaccctggtgcctggtacctggtacccgtgatatctggtatttgatacccgtaatacctggtacctagtatcctggtacctggtacccgtgatacatggtacctgatacccgtgatacctggtaccagtagcctggagcaggaggagagagaggaggaggcatccgcgtggtggagcaggagaacgaggcggtgcgcgaatccggtgatcggcgaggcgaagcgtggaggaggcagtggcgaatccggtggtcggcgaggcggggcagccgatgagaagaccgacaagggcggggagccagagcggcgcggcaagggaggcgagcttgagggcgacccttgccgaggccgcgccgtcgtcgtcctcctcggcggccggggtcctgagccagcggcggcttccccggcgccggcagcggcctccacgcccccgctcccgctctccctcttgttcaccgcacctgtcgccattctcctcgtcgtcgccgcctcccccgcagcggtggccgccggctccgacgagcggtggggcgacggcgacagggacgacggcggccaccggctccgacgagcgatggggcgacagcgacggggacggggacgacggtggctgttggctccaatgatttaggggagaagagtgaggtaggaggaggggatcgatccggattactatcccgtctccacgggatgccgtggaatagattttctatttcgcaaaaccaatttttacgtgcgaatattcatgatgtagattgagttacgccctcctcggagatggaataaatgttccggatcaagtgaggaaagcagtgggcgtgaagaccccttggtcgagacttgcaggtgtgacaagatcaacaaaccgctcaaggcaatgaaggcatgaatagcaagcaacaatgtgcctctgctctgtctagggatgcaagccgcgtgggcaagcggtttttttttcccacttattccacttctagttcattttttcttctaaattttgtactaccatgcgggaaatagactagcaagctggtttttatgcgggtagcggaactatccacttgcatccctagctctgtcccctctacatgacggtgtctggatcttgaggtcactaaaattgcagagtcctggaaccacatgaaggacaccttggtcatcctgacttcaacggacataacccatttcagtggttatacaagagcagcaactctcaatctgccatctgtgattccaataggaccaagaaacactcaagaaaacattaagcagcttctcgcaggtacacggagccagagtttagcaatcccggtgcctcctcctctactgaacctccatgctgccatgcatgtacagctgagattgcatttgacagcagagatcgatcctcaatgtgccatttgacagcagagatcgatcctcaatgtgctcaaattatcgtgatgtgatttggtcaaagcaagacacatgagatttgttgttggatcacagtacagatatatagagaggcgcattatactctacagtactacttatcaaggagagattgtagtgctgttttgttggatcattaagtcacaacacaagttaactgatccaagcaaccgtttctagactgaagaataggaggttgggatgattttgcctactgtttctagtcctatttgagagagttaatgtaacaagcacggtggtatcaatttcaataggtgtagttgcatagatattccatataaataggcatatgaaactacaccacaatatgaacttactaagtctaacactgacatttttacttttctgatgagtcatgttgtttacaatatgtatatttttactacttaacttttagagctcactactagaaaaatgatctttgctgggtcgacccaaaaccacaatagtcccggttccaaaaagaaccgggactaaaaaagatctttagccccggttgaaaaccgcacagccattatatgatctttaatcccggttgttgttaccaaccgggactaaagatggtctttagtcccggttttcattccgtgtaagaggcatgtcagggggcgataccaaccgggagtaaagatcgccacattgtatataatccctatcccttatcctctcctccacaatcgcaaccactcagatcctcccctcccctcccctcctcctctcccctggagacggacgccctcctcccctcccctctcctccccttcctcctccctcccctggagacggaggccctccttcctcctccgtttccaggcctccccttcctcctcccctcccctccccttcctcctccctcccctgaagacggaggccgcgcgccgcgcggacgcgtggtggatggacgggcacgtgacgtgcggttgcacggcacgcgcggtagtagtggcgccgtgattggagcttgttttttctcttttttttatatattttgtgattcactaatatgtataattttgtgattgattgtatgggtctgagatgtataatctgtgatgtatttgatttgtgtgtaatttttttaggatttgtgatgtatttgatttgtgtatattagtaactttaagatttgtgatgtggattgggatgttactttgatttggggatttggggtttgatttgggatgtgcatgctacccgattcgggagaaaataaaaaagaaaaaaataagaaaagggaccatctagattgccgctatcccctctttagtcccggttggtgttaccaaccgggactaaagatctttctctttaatcccggtttttgctaccaaccgggactaaagatccatctttagtcccggttacttcaactggaactaaagatgggcatctttagtcccggattcctactcccggttggaaacccgagactaaagggggttatcaaccgggagtaaaaaaggtttctccaccagtggctcttttcccatccttgataaggtaccatgaggtaccaggtactatgaggtacaaatcaaatctagccattgatttggcaggggtacgatcggaataaatttgttaagagattgtatgtgctaattgggccttcaggtaggggtgggcgttcggtctgaccgaaaaattcggtctcggtcttcggtctttcggtcagttcggtctttgaaaacttaggaccgaatttcatccaaataaactctggaccggtaaattcggtctcggttttttcggtctcggtctcggtctaaccgaattcgctggagacttggattgcgcaggtgggcagcgagagctggtggcgactggcgaggccgcggctacggctgccgcaacggcgaaggccacgccgccgctcgccaggcgcaccgcggacggcggcgctcatcggggccgcggcggaggcggcgccgaggcggacggcggcgctcgtcgtggccgcggcggaggctggaggcggacggcgacgctcgtcgtggccacggcggaggctggaggcggacggcaacgctcgtcggggatgcggcagaggcgagaggcggcgccgaggtggacggtggcgctcgtcgggaccgcggcgaaggggggaggcggcgctcgtcggggctgtggcggaggctggaggcggcgccgaggcgggcggcggcgctcgtcgggactcgggacggcggcgggggcgtgaggcggcgctggtagtggttaggtgctgaggtagtgggactgttggagtgggagtggggaattctagggttttgcaatttgttgggcttattgggcctcctaagcttattgggcctcaattcggttttctcggttaattcggttaaccgagcccaataaccgaaatgaccgaaataaattcggtcttttgatggctgggaccgaactactaaccgaatttctcgatttcggtcttttcggtttcggtctcggttttttcggttcggttcttcggttcggtcttattttgcccacccctaccttcaggtcggcaccgcgcaagcaccaatagctagacagattggaaaagagctcgatcggcgcaatctcttccccgcgactcatca

SEQ ID NO: 23016 - DNA, 1434 bp, Oryza sativa
caagaatccagtgactgccataaaaatagatagttcatgcatgaacagcataatggttttaacgggcatccattgacagatagttcatccacataatcaggtcttaactagcacataataagttctaactggtaagaacaagcacataataaggtcttaactagcattacatcatacgaatttggatggcactacaaatattgccagacaaaatggtgatgttcatccatcacactacttgagaacatggatcttcagatcaagaacgtcgtcatcgttgttgaaatggaaaatacaaacatcaccctcattgaatacttcgacatcaatcagttgattccatccggtggtggtcagtaatgccctatcgttctgggacttcttcaacctcatctgatataactgtgttattccagcctcgtcctgttccaagcactgcacgccgggggagcgcgccgtcgccgtcccccagctctaccgcctgcagccgcgcaacgggctgcagcgccgtgtcagcagggggcggctcggagcgcgccgttccaccgctgcccaccgccgaccatcgccgcccgccgccgccgaccaccgttgcctgccgccgccgaccaccgccgcccaacgcctatcgcctcgaaggggaccacgagcggatggagggatgtatggatctgagcgccatccctccatcccctgcgctagttcagccgcccacggcatggctactccctattgtgtgcgccaaagcttcggagagatcggggagaaggaaacagaaccgagagaaggaacaaagagaccccttctccctcgctacgcgaaattacaattttaccccctccccaccagcggtactgcatcaagcagggtgtgcggtaccatccaatctcagccatccgatgagggcatatcaacggtcaggatttggtaccgcccaccctcaaggacagtaaaaaatctctaacttttatgaatagcagaacaattaagaccattcaccctagcacatctagctactgtttagcaaggtaatcaggactacttacagctagtttgttgctcacaagaatgtgagttccctatgcctccctttcctaataggcatcctgtgcgcaattaccttctaagttacctatagtagtcttcaaggtgagaggtgaggaccgaatatttgatcttccagcaatttaacttggtggtgtaaaaagaataggatgattggggtttgttttgtgcgttgctcgacaacgaggacatgaaggtttcgattatatatccatcttgaaacggatcttctgacttgggctgtgtttagttgaggagaaagtttggattttggttgaaattaaagatgatgtgactgaaaagttgtgtgtgtatgacaagttgatgtgatggaaaatgactgaagtttggatccaaattttggatcta

SEQ ID NO: 23017 - DNA, 920 bp, Oryza sativa
cagcattcatgacgcagatgtatccttgcgaaaggtacctggggatccttaagggttatgtacggaaccgttcacaccccgaggggagtatcatcgagagttacaccaccgaagaggccatcgaattttgtgtggactacatgtcagaaacatcttcaattggattaccacgatctcatcacgaagggaggcttgacggtgttggtactgttggaagaaagactattaggttggatcggaaggtgtacgataaagctcatttcacggtactacagcatatgactgaggtggtgccgtacgttgacgaacaccttgcagttatccgacaagagaacccaggccgatcagagagttgggtcaggaataagcacatgtcttctttcaacgagtggctgaagaaccgaattgccaggttgcagaacttgtctagtgaaacacttcagtggttgtcacagggtcctgaatggagtgccaccacctggcaaggatatgacataaatggatacacctttcacacggtaaagcaagacagcaaatgcacagtgcagaacagtgggttacgcatcgagactgctagtgacggtggtcgtcgtgatcaatactatggtaaagttgagcaaatattggagctagattacttgaagttcaaagtcccgttgtttcgttgtcgatgggtcgatcttcgcaatgtaaaagttgacaatgaaggtttcgccactgtcaacttagctaacaacgcgtacaaggatgaaccgttcgttctcgccaaacaagttgttcaagtgttttacatagttgacccgtgtaacaagaaactacatgttgttcgtgaagggaaaaggagaattgttggattggacaacattgcagacgaggatgattacaaccagcacgtccacggcataggtcaagaaatacct

SEQ ID NO: 23018 - DNA, 2983 bp, Oryza sativa
agcataggagtagttgtgcatccacagaggtgccggcccctggtctcccgatcgcaccactagctgcagtggaccacatcgaggtaattgttgttatccgatccatatctaataaaagacatgtacacattccaatattaaattcaaactttcaccttatgcagggcgcagcacagtgtgtcctactagcgagagtccacccaactttcgctcctgaagtcgctgagggcatggctttcaagccctcggttacagacaaggtccacggcgcagacctgctagctgggtatgccaaggtgtccatcgatacagtaaaggacacctggtcaggctatccgctgcccgtgcccccaaatgatgaaatcatgactttgggcgatgcgcgcaagacgttcatacaatggcccaaagaagacatagttgtgaagatgactcctcgtccaagtcgaccgacggagcttacacctcccaagtctaagctatcaattgaggctccccgtggaccggcattgtcagtacctcattctcccggtggagctgatatggacttggcagatatagctcaaagcttggctccaataaagaccacaagaaaggccgatagctccccaccacttgtcaagggccagaagcgtgaacgcggcaaggggaaggtcggggagttggcgccggagccaaaaaggggcaaggctgcgacgtcgatgccggtgagcaaatcggggaaggtcgtgagggcgccagcccaatttgagctaggcatgccattggtggaggacaatgtgttagctgtgatgggtattgcttgccgagagctacataagcaatacatggagctaagcaatgccaagcggaaaatgagggagtcatccatagtaggacatcacgaccaccagccgttcctatcgtcgcctgcctatataactataggttttgatgacctcttcgaccttttcaggatccggaagttggacactggtcttctaaaatgctactccttgtaagtgcataccttctatacttgtgatatgactggactatatctcctaattaaattagttctaatacgtaaatattttaaggttgtgttggatcgagagtcgtcgccatggtaatcaggttgggttccttgatccatccatggtgaatgaggttaatttacgacagagcttcactgaggtggttgactatgtcaaccggtgtttatgggcccatcaagacaaggagtacatcatgtgcgcacacaaccaagagtaagaggacaatacccttcgtgtctattgtttttgaagttaaggttcttagtactaacgctacataaccactgcgcaggcgacattggattctcctagtcatcgtacctaagtggagtagggttacctaccttaactccaataagtccaaagattatgatttcagtgaaatcaccaaggccttaaatatggcttggggcccatatgtggaaaagggtggtaggcacaaggagggcaagaacgaactttatcatgacaccaagtttgcatgcgcacaacagatcggagaccaatgtggtttccacgtgtgccacaacatgtcaacacttctaagagaggtgaaagatttcgaccctgaggttgttgctaatggcgaataagctcatttcaatatctacattactattcaaaacgtgctaattaacctcttatttattaaacagaaaggtagagctggcttcaagatctcacccatcaacccccccactatcagaggcgaagtgtgcgcctttattcttgcagaaataatgaacaagaaaggacgttttcatgccaaatagactcatgaacttggctagataatttattgtgatgtaaaaaagatgtttttataatttctggcgatgtaaaaaattatgtttttatagagtgcaatgtaatttactttcatatgtgcaatatttatggtactttactaaattgtcatcacatttgatcaactacgatttatgttgtactattcatctgtttttgtcacgaccgggaaaattgccttttcccgaacgccagtgtattaatccccgtcccaggaaaagccggggtacaccacacaaacatgatataaaagacacatctttattatatcgataatatttacattattacaaaggcacttcaggcctgacaaacaaaaataaacagcagcggactagcgggcctacggctccatcttcataggcgctcaactggggtataagccaggactccacctaagacttcttctccaaagcttctcttactgaaggggggaaaagattgagcaagaatgagtacaaccacagtactcagcaagccacaccggagatgcataattaatgtaagggggtacaaggggtgataatataagggttaggttttgcagaaaacagcattcaaaagtcacttagttgcccaaagccatttcataaagacgatcctagagctacacagtattattaaacaaggccgtgaaccctcacgaacctgccttaacccaaggcctacgatgattcagaccgaactggcaacccgaccctgggtcccagctcgtcccaagccaacccaggccaaccattccacatttttgttgttgagcaaattttaagaattaaaacactgacttgggtacattgctcggcttgcccataaccgagggcgcggctattcgaatagattatactctgatcagaggtgtacatctttacccacaagacacgtcttcctcacgtgtaaccacgtgccacataccaccacggtatacggacggaagacgtgacatagttcccaacccatcctagccataaacaagagtaccgacccaatcccacctacggccggaacctccgggacaggcaggcaggactgagcccctagcagcagggcaccaaccctctgccatgacatctcgactaccgggccgcagctcgtgtagccttcatttgccctggagaatgtccatcgacccccgacttcat

SEQ ID NO: 23019 - DNA, 2310 bp, Oryza sativa
tagccccaaattttagttggtaaaaagaaacacgaatattagaaaatgacctaatatcaaataataagaaggggtgaggtttcgaacccaggttatctagcctaccatcttgtgaagctagccggagcccgaaaaacctttaggtgtttctcaaattatagttggtactcaactgatttatgcgcccaggtggtcagatgctagccagtcctcaagttttaattgaagtctataacaaatcctaatcctgttatccaaggttcgattaagaagacaccaaagaaagaggcaaacaaattgtggacgagccgacggcggcacatctctgagcttgttcacggcaagggtgtagagattggaggaggccgagcgctgccgaggctgtcggccgggtggcgatggcagtgtctcggaggaggagaggctaggaaacccgctctcgctagtccgggcgccatttctttggcttctcgagggagcatggttgcgcgagacataaggcagcctaatcaacacgttacgtcagctaaaactgtcgtagaaaccattaggacccccaaaaaagaagtaaaaaaaaagtaaattacacccacagtacaacaacttgacatatggatgcgatatagtgcaagaacttgataattgaacgtccgagtgcaacaacttgacaagtggttgcgttctagtacaagaacttgacaatttaatattttggcgaatcaatttggctaagcatatgctaggtaaggtttttcacgatgtcaatatgccaatacacagtaatcctatggatattaccttataatattgagtttaatttttaagaattatattgcacatacaatttacattcagttacctttaagaatttttttgttttcttcaccttatcaaatatcaaccgaaatataatagtttctacatccagtttaattgactttcagttattaattattaggataaaaatataaatatgtttatacaaatccacgctagtatattgtcaagtatttaaaattttgaatttatataaaaaaatgctccaaataattaagttatcacaacttcttaatttattgtatcaaaatcgtacctatcttgcaagttgttgcatttatacgatcacttataaagatcttatactaaattgcacattcttgccaagttgttgcactataacgctcattttttaagttattacaccaaattgcatccatctgccaagttgttgtaccgtgggtgcaatttacttaaaaaaaaagtctctttcataatatctcgcagaatttctacatttctgttccccaaaaggggccatgaaactggcatgcaggaatccttcttttatgccaagcaacacggaacgcgaaaaagtaatcacaactcacaagcgcaaaacaagtgcttcattatttgaggaacaaagatgatttttttttgggacatggctcgttcaaagatgtcgtcatgattggtttcaagtgcagtttggtcgtaggatactttagcctaatctaaatcgtcgttgtccttccagccgcaattatcctaaattcccaatcaaaattcaaagccttttcggaagcgacactgccatccactggaagaagaggggaacaaaacaaaaaacaaaacgcagcaagattcctcgcagtctgcatcatcagcccatgccgagccaggcagctgaacccaaaatcattcgagcccgtacgcatcacgcacagcaattgataggttctcaattccagcgaaaactggtcggatcagttcaataagacaaaccactcaatatcctgttcatcttttttaaaaaaaaattcaaactgtttttcttgttttgacaaaatctatccaactctcaatcttgttttgccggtttaccaatgttttccgaaaaaaaaacccggagatatcggttcggtgaccggactgtcaatcctgaacccagctcaccaccaccacttgtaggcttgtggcagcaacaagctgaaaatgacaaggagaaatggaagaaaaaggcagagtctcgctgtgatcacagctcactgttggggagaatgaaaaacggttgtactcccttcgttccataaaaaaccaacatattaccagatatgatactccctccatccaaaaaaattaaactaacctagaagttggatgagacataatcttatgtcccatcgaactcctaggttaggttttttttttacggaaggagtacctaaacatatatctatattaggatatgtcacattgatactgatacgttttttatgggatggatggagtactaaaccatttgctagg

SEQ ID NO: 23020 - DNA, 4713 bp, Oryza sativa
tccttttatatttgtagttttgaaaaataacactcttgttccagtttctatctccatttggatctgacatgtttggttctgaaacttgggcggtgaaacctgaccattagcgactaactttgcacattgagctctttacctgcgctgcattttgaaattgcttttgtacccgtttattattatcattttatttttctgcattctgaggcacttgccagtttgctacgcaacgagacggcgccagcattttttttaacacgggaaatcatgttgtccaaacgagacctaagcttgagtaaatgtttgccttttactccatctgttttatatgttttgactctttttttaaaaaccttttatactaaaaacataacaatatttttaatataaaataaatatactattaaaatatattggatgtttggtttatgaaactggtttgctattataaatgttgctaagagtctgtttggttggagggactaaaactttagtcccttttagtccctaaagtcccaaataggagggactaaaaaggacttaagtgtattagtccattagtccctatgggaggaggttattgggactatagctcctttttacccactgcccccacgcatgggtatggtgcatctctctttgcatggttttagaggtaacatagtcattgtacagtgcaattaatgacatttagtccctatattcaaacagccatggactaaagtgtttagtcccactaagtttttctataaatttagtcaaacttaaaagaagtttcatattatatgaaacagaatacttttttctaaaaccaataccatttttttcacaaacttacatgaaaaatttgtgaagtttgcatattataagattgataaagtttgcatctcttgacgtcagatttttgtttgctaccctcctgtcatgcgatggttgtcgagtgtcttatttagaaacaaattggatgaaacttcgcgcgttggatgatgttggattggaaatctacaatgttaacaatgttagtgataccaatttgaaacgccgagaagaactattggagttatatgtaatgttggagttatatgtaatgttgtgttgttgttgcagatttggaattggcattccgaccaatatggacaacccgttaaaaacagatgatattattgagttcacaactcgcagaaacatgttttcatcacgtcgtcctcattaaattgatctcatcgatctctattttgatgagcatcggcaatagaattttgaatgtgtcgacgagtgatactcgttgactggataatttgggtattggggtacgttggaacgaggatctacgtaatacgacatcaagcaaatagaagacaaatattatactggttcaggccccttgtcaggtaatagcactagtccagtttatatgagattgatgacagaaaaccacataatacaatggaagtagacgaaactaatgataccgacgagatcatagtcgatgtattcgacgagatctcccggcgacttggcttcgcgtactccgacttcggaaactatggtgggtgtgttggagatgagattcgatgccttgcacccctcctcgggggtcccttttataccgcggatcatcttgatccccaagtaagactcggagacatcggatcttgtacgatataacagaaactctatttcttccgagtaggactttggaaatcacttggctcgtggagatattttccataattcgtaacaaattccaccaatgtatatgggaatagtctgtatacgtgatgatataccatatctgcgtattccgtaagtcataggatatgaggtattccttatccgtaaccttgacagtagcccccgacttcaacttaaatgaattcacgttgtcgcccgcgacttctcctgttagcgccttgtcgtgctcacctggtcgatctcggtgcagaaccgtggagatgtggagccatcgagaacgctaaagggagtcaaacgttcgaatatgaatttaaattgaagtctgaacaaccgcccgcaacgggcctcaagatttttcggcggcaatatctctccttggaatgcgaaccgctaggtagtgcgcctatttaaaggggttttgggatccatttcaagtccgtttgccaaaaaatcctccatcttcttagaagcctcggacccttcgtctcccacaaagccctagatttctttgtcttccttcgacgattccttactaatggcagacctcaacaagtcttcatccgacgcggccagcctgaagaacctttacacagaaggagctctccctcccaatcaaaccatggtgagagaacaaggaggtattgatccttctcctgccctaggccgtatggcagtggtagaggattttgtccgctgtggttttttgcctcccccttcggaattcctcttgttgatcctaaatttttatggcctttcactcttgcacctcaaccctaattccatcacttccctgagcatctacgctcacctttgtgaggcctacattggggtagtgcatttcttggatctttttcgattcttcacgaacttcgttggatggaagccggcaggatctcggggtgttgtgggttccgcttacatgatggcatgaaagcgaggtacataccctttcaatgccatacgtcctggaccaaatgtcgatcaaagtggttctaccttgagcttgaggaacttgactcggttcttgtcgtgcccgaggtccaaccggatcgccaagagagctagacttccaaacctccattgaccccttcgcttgaggccttcgtgaatattgtcggcgacctgcgagaacaagggttgaccgggtataaagtccacggatctcgtcacggggtacttgttctcatgtcgtagtttctgtctttccttaaccgctattccgtgttctcggttttacctgacttcggctttttctcatgtttcagatcttcttgctgatgtcgtgacgcagcgggtgagggatgtgctaatcagccccgcctcaaccgccgatgagctacccaccccccttcgtgacaagccagcggccgacaaggcggctgttatcaacgtgagtgaaccgaacgcctttcgtcttttcattttttagggagacgaagtgacctcaattcccgcaggttctacctttgacggatgtcatcggcccccttgtcgatcatcagacttcctcttctctcagggagaaagtcgtggaggaggttgccgccatcgccgctggacctgctgccgctagaggcagcgggctcaagaggaaaaggttgggctcgtaagagcggcgcccctggatctcgtcagaagtccagtggctccgaggtaggctattccatccctattttgctaccccatttatccttgcaggacaatagggatgagatcttgattctctatcttactcaggatacgggcagtctttctcctcatccgaagaggaggataataaagaaagccgctgacaagtaagtagaatcctggacctccatctgttttcatgttgatgggtcttttgagtgtatttctgatgtcagcaggacggtctcagcgatctctacgcagagtggggatgaggtcgcgaccagcgcgattcccgccgcagcttctcctcgcgcgggtgctgcgcctgtcatcgccgagtccgccccatccgccgccgtgcccgtggctgcgccgccgcctcccactccgatggggccattaacctggtcacaaaagatgaccgagagccgccgctgtcgacgagagatactcgctgaccggatgagtagagtattggggtacgttggaacgagggtttacgtagtacatcaagcagacaaaagacaaggattatactagttcaggccccttatcaggtaataggcctagtccagtttatatgggatttatgatgatgagaacaaattacaaagagagtagtcgaaacaggtagtgatgtgcactagggttcccgatcttttgaaaggttctgataaacaacgatttgggcggagttgcaacacaaattgatccggcttcttgaacacgcacgctcttgagccccgcaatcgcaacaccacgtctcctctggttatcacccgtgtcgaaacgcggatgatgtcgcgtccgggaaaattgcattttcccgaacgctagtgtattaatccccgtcccaggaaaagccggggtacaccatacaaacatgatataaaagacacatctttattaaatcgataatatttacattattacaaaggcacttaaggcctgacaatcaaaaataaacagcagcggactagcgggcctacggctccatcttcacaggcgctcaactggggtataagccaagactccacctaagacttcttctccaaagcttttcttactgaaggggggagaaagatagagcaagaatgagtacaaccacagtactcagcaagccacaccggcggatgcacgattaatgcaagggggtacaaggggtaatgatataggggttaagttttacagaaaacagcatttaaaagtcacttagttgcccaaagccattttaaaaagacgatcctaaagctacacagtattattaatcaaggccgtgaaccctcacgaacctgccttaacccaaggcctacgatgattcagaccgaactggcaacccgaccctgggtcccagctcgtcccaagccaacccaggccaaccattcc

SEQ ID NO: 23021 - DNA, 8022 bp, Oryza sativa
ttcaggtagcggaactctcgttttctcagtgtgatcattcctgcgggaacatgtgatctcttgaatacagatgaaaactcgtcccaggtgatggtatgtccttctggccgtgatgcttcgtagctatcccaccattctgaagccagtccaaccaactgatgagttgcgaagacaacccgctcctggtctatgcactgaatcaaccccagcttcttctcgactgtgcgcaaccaatcactggcttccataggatcgacggcaatggcaaaggttggaggctcagttttgagaaattctgataacttgcactgttgctggactgtaggtacttgaacgttgtttgcccctgctgggttgttccaattctgtaatagttgaaaggctgttgccaacatgttggtttggttaaccacaatttggattagctctggcgaggtttcgttgatgcttttctcattcccattggcttgggttcttcatcttgtacttgatttcttggctgctgtgctggaacatccaaaggtacaatgccgatactggcctctatcttgtcaactggtggctggggctgaaattgagcattgacaccttgtggtaatgcactcgctggagttggagctgttgcaacggggactataggactgcttcgggatgcatggatgacaattcgctgaggagcaagcttctgattgtcgggagttgcttgaactgacgtgctggcagctatgtttctcggttttgggcacttgtcggcgaaatgaccccttccttgacaattgaagcaacagatatcttcccgaactcggcattttcttttctcattttgattcctctgtcctggcactggagttaggctgaaactgtaatcttggcgaggatttgtgttgccttgatgcttctctccgttggaactggcgggttggttggccatcttcttcgtcagcagaaaactgaattgacaatcttttggtacatgatcagttccttcacagaagaaacaggtgatcctgctcgtttgacacctgtcgggtggatggtcttcctcacaatgaacgcatgtagtggcacacgagctggcaacatgaccgatttctccacaacgagagcatgccttacgttccattttattctggttgaaactttggggagacttctcatcttcatcatctggggagacttgatctgaatcttcactatcagacactctacctccattagctaaaagatgctctgtcaactgtggtgcacctcggaaggtatttcttctctgacgtttggtcattcctggtggaggccattctgtgctggtaatgatcatcttacggacttcatcttcggttcgcattggtgtttttcttttctgctgaggacagttccttgcatagtgcccttgctcatcacacataaaacaaatgatacttgcttcttttgagtcaacatgtggcacgccaccatgggtcttttgggatgctggcggcatgctgacttgtggtgtgagtgattggactgcctccaactgcacttgagcttgtatctgactcaggttcagaattggcgtctgatgctgctgtagtatctctataagcaatcggttctggttaatcaggtgttggaccagtgtcacacaactggtgtctggtgcttcattcactagggagcttgaggtaccaatgtcctgacttctgaccttattgcctttctcattgtcagccatctgttgcaaaggtttggagagggagagagggaaaacaaaggggagagacagattagaaactaaggataggaccttaacagatctaagtcttttgctgttatgatgtatgttaggcttattctgcaagttgattaagcaaacaacctagcatggttacatcacaccccactgatgcaaaccacacgctacacacacaagcaaggaaacacacgactaacgaaaccctagagggtggcttaggttctgcggctggttctccaagatcttaacttcggcttcacagctgacttcactgcttcctccacttcgctagcagaccctgcggtcttccggagcttcggcgaacaattggcgacatctttttcttcgcaaaaccaaccatgtagtactagttggaaatccgaagaaggaagaaaggagtaaacattttgcaaatagcattgaggaaaggagaaaaagggactttcgcaaatagtttcatttataaaataagtccttaggttttatctacttggcttatcctacagtcgagatggctctgataccatcttgtcgcgaccgggaaaattgcattttcccgaacgctagtgtattaatccccgtcccaggaaaagccggggtacaccatacaaacatgatataaaagacacatctttattaaatcgataatatttacattattacaaaggcacttaaggcctgacaatcaaaaataaacagcagcggactagcgggcctacggctccatcttcacaggcgctcaactggggtataagccaagactccacctaagacttcttctccaaagcttttcttactgaaggggggagaaagatagagcaagaatgagtacaaccacagtactcagcaagccacaccggcggatgcacgattaatgcaagggggtacaaggggtaatgatataggggttaagttttacagaaaacagcatttaaaagtcacttagttgcccaaagccattttaaaaagacgatcctaaagctacacagtattattaatcaaggccgtgaaccctcacgaacctgccttaacccaaggcctacgatgattcagaccgaactggcaacccgaccctgggtcccagctcgtcccaagccaacccaggccaaccattccacgttttagttattaagcaggttttaagaatttaaaacactaacttgggtacattgctaggcttgcccataaccgagggcgcggctattcgaatagattatactctgatcagaggtgtacatctttacccacaagacacatcttcctcacgtgtaaccacgtgccacataccaccacggtatacggacggaagacgtgacatagtttccaacccatcctagccatagacaagagtaccgacccaaccccacctacggccggaacctccgggacaggtaggcaggattgagcccctagcagcaggacaccagccctgtgccatgacatctcgactaccgggccgcagctcgtgtagccttcatttgtcctagagaatgtccatcgacccccgacttcatccatctccatccgtgtacttttgtttatgaccgggctgagccacaaactaagccttacccactagacatgtggaagtacggtagtgctttgcaacagaggcccgaagaccggtccttatgtggccgaggtgctactatcaaaaccatgcaccccgagcccagcctaaaaccattttggggattttgaatagagggggcggggtgaatccgattccacaataaaccaacaattccaaagtgtccaggtgatatgaatatcccaaagtctagagttgtaaaaccgcctaatgttacctaattaatcagcgaagcatctacctaaaatcatactagtggtaccatgagtagagtgtccactagttggggttttgtttattctagggtgaacaaggaaataataacaataacaataataaggtcataacaaaggtaaataggcatgactagataaaacagtgatatcgcgggaatttaaataaagcgataatgcaataatttaaatcaaaataattttataaactgggattcaatatgttcaaggatgatgtgacttgccttgctcgctttcccaaacgtcggcttcaacttccacgaagagcggatcttccgaagctgcagcgtctacacgaccaacggaaaggaaaaaggcttttactctaataaactccatataacaagcagaaacaaagcacaaaaatgggttcttgacttcttaaggaaaaattagagacttgaacggtccaattccgagttcaaatggtcaagttatggccatttgaagtttatatgctctttaaatggatatttgcgaatttcttcatttaaattttaatttaaaatcggatttattgcgtcagccgaggggaggggcgcgcggaccgggtccacgggagtggggcccacgcggcagcctcacggtccacggtggaccgggtgcacgcggcttacgccggccggcgccgtgggtcccacgcgtcagccgcacccgggggcgcgggcggctgacggccgggccccacatggcagccgcgggacgcgcccgaaggcggccacgccggcacagccgacgggaggcggcgcgcccgcgccccgatggtcgccgccggcgaccaccggcgcggcggagcggcgcccgagagaggggagggaagggggaaatgaagcggcggtccacggctcaccccgggtcgacggcgacgacggaaacggcgaccggagcggaggaaagcggcggcgcggctcgggtcgacggggtcgacggcgttccggcggtcggcgaccgaaatggaggggtggacgaggtcggcgaggatgcggcgaagctgaaggaggcggcgccgaggcgggagaaggtccggggcgacgacggcggcggaccggagctcggcggtgacggcggagagagagagcgacggcgcaagctcgattctggcggagagagagagcggcgagtggcggaaacggtggagggaggcacggggagtgtttatatagggttgggagggggagagagcggccggagggaaaggaaaccggcgtgacgctctcgggctccatcaatggcgccggcgggattgggggagggtttccaaacgaatccgagggagagagggagagaataatggggggaaagagggagggaatcacggggaatatttcccccctcttgattgcacgcgggacggacgggagcggcgggattcgcggcggcggcggcgctagggcacgggcgaggcggcgggagtggcggaaggtaggggatgacgggtgggccccacccgtcagcgagggtggcgggcgggcccgcccgtcagcggcgcgcgcgcggggagaggccggatgggccgcggggaagaggagagagagggaaagggatgggccgagccggcccaagagggagagggggagggaaagggaactttttagggtttttctttttataaaatcattttaactttgtttatttcttaataattattatttgtgctctgaaaattccactaaaatttgagggctcctttttgaccaaggagaatttaacaaaaattctccgggccacatttgaatttttcttgtacgtattttaatgtttgccaatttcttttcgaattttaattaattctattattccttttagaaaatgatttttatttcgggatgaatttatcaggacgtgacagatgacctcgccgagaaggctaatccctgtttgtgaatcgaagaacacaaacaagaacaaggtataatacaacaaaaattgcagatgaataattaagctcacaagttggggtcttacaaaccgatctagtggcgaaactgttctcgatagaataatctaaccaaaacccaaaccctaaaggtgacggtggctactgatatatagagtttagggttgtgcaaccaaccctttgatgcaaccctaatgggttccaacacgatacacggcccaaaggcccaaatacggtgacgcagcaccgggacagattctggacgttaatttgttcggtcgattcctgttgactcagaaataatttggatgtgggaccaaaaccattggaaaggttatcttcttagctttccatccatataaagaagccccaatccaagcacgtatgcgacctgagcgcccgttttagtgcagactggttctggactccgaattgacttggtttgggcctccaccttgatttggacgtcctcgatgatcctacatgactctaagtccttctccaagtgtttacttgtccactccattgttcctaatcacaatataatcattaggtagcaatttattctcaaattcgtacaaagaagaacataggaacgaactcacctctaaatttaattgtcgcacgcgagctcgtgttatcggtccttgaatgaccattggatgattgttgtgtgtatccgtaggagtgatgtccacatcagatgaaaccgacgagatcgtggtcgagaaattcgacgagatctcccggcgacttggctccgcgtactccggcttcgtaaactatggggggtgtgttggcggtagaattggatgccttgtatccctcccaaggtgtcctttttatactttggatcatcttgacccccaaggaaggtttgaggatatcgaacccggtacggtataacagaaactctatcccttccgagtaggactttggaaatcacttgactcgtagagattttttccataattcgggacattaacttagacttttgaaaggaccatcagcgcgaggcatcaactttgactttcccaattctggaaatctatcctttctcaagtgcaaccaaactaaatcacccggttcaagcttaacttcttgcctacctttactaccagcaattctatacttttcagtcatctttttaatgttgtgcttagttgtctcatgcattttcaaaataaattcagcacgtgccttaatatcattataaaccctctcactagtaggtaaaggcaagatatcaataggagcacgagggttgaaaccatacactatctagaaaggacttaccttggtagtagaatgtgttgcccgattgtatgcaaactccacatgaggtaaacattctttcaacatcttcaaacttttcttcaaaatagccttcaacatggtacccaaagtacggttgactacctccatttgtccatctgtttgtgggtgacatgttgtagaaaacaataactttgtacccaacttgtccatagtgtgcgcaaaaaatgacttaaaaattttgcatcacgatatgaaacaatagtagaaggtataccatgcaagcgaacaatctcatggaaaaacagatcagcaatatgaacagattcatcacttttatgacatggtatgaaatgtgccatcttagaaagacaatccaccacaacaaaaatgctatcccttcccctcttagtcctaggaaatctcaagacaaagtccatagaaatatctgcccaccgaatagaaggtataggaaaaggcatatacaaaccatgtggattcaaacgagacttagctttctgacaaatggtgcaacgtgccacaacttctcaacatcttttctcatccttggccaaaagaaatgcaaggccaaaacatcttctgtcgttttagctccaaaatatcccatcaatcctcctccatgcgcttcctgtatcaacaaaagatgaacggaaccaactggaatgcatagacagttagctctataaacaaatccaccattgatcacaaatttgttccaagtacatccctctttgcaatccaacatcacttctttaaaatcaggatcaagcgcatattgtttttaattgattcaagtccaaaaatccgacaatcaagttgggacaagaaaatatagtgcctagacaaagcatcagcaatcacattatctttccctttcttgtgtttgataacataaggaaaagattcaataaattcaacccattagcatgtctacgattcaaattattttgagagcgaagatacttaagcgattcatgatcggaatgaatgacaaattctttagaccactaataatgatgccacgtctctacagaatgtacaagggcatacaattccttatcatacgtggaataattcaaaacaggaccatgcaacttctcactaaagtatgcaacaggcataccatcttacccctaatgccaactccactagcatcacattctaactcagaagttttaccaaagtttggaagttgtagcaatggtgtgtgtgtaagcttgtccttcaaagtatcaaatgacttctcctg

SEQ ID NO: 23022 - DNA, 655 bp, Oryza sativa
ttcttccgtgttttgggttaatatgatgcatttttttgtgttgtggacatgcatgattgttctattgattcaccacacaatggtgtttgggccatctgttctgattgagacattgggtactttagggcatattactgggtaccttggtagtagcttaatgccccggtgaatattgattgctctcttaccttgtccattttacagggaatggtttggatggcattttcctgagttggtcaaaattgtcaatgacaactacatctatgctaagcttgctgattatataaaggacaaatctgagttggcggaaaaagatatttcgaagttagctgatctgattggagatgaagataaggcaaaagaagttgtcgaagcagcaaaggcttcaatgggtaatgagatatgattacatttaacttccgttgtaatataaatctagtagtttctttgtagtagtttttgtggtttattgatccttttgcttttcaggtcaggatctgtcagaagttgatttgatgaatgtgaagcagtttgctcaaagagtcatgaatctgtctgaatatcgtaaaaacctttatgagtatcttgttaccaagatgaatgatattgcaccgaatctaacatcattaattggtgaaggtgttggagcacgcct

SEQ ID NO: 23023 - DNA, 527 bp, Oryza sativa
actgtgcattgtgcagatggcgagaaggtcgatgcatctgccaagaaaagtaagaaaaagaagtctaaagctgaagctgacggcgaagcaatggacctggacaagccttccaatgtggctgatgaagctgagcctggaactgagaagaagaaaaagaagaagaagcacaagctggaggaggagccacaggagcaggagaagagcgtggcgcatgccaatggcgacgccgaggagaacggtactcccaagaagaagaagaagaagaaccgtgaagtctcggaggacgctgagcctaagacggccactgaagggaagaagaaaaagaagaagtccaagacggaggacagcgactgagtgatcggtttgcctacttgcatggctgatctttctgattagtgttgttggaagcagagttaaaaaaaacacctagattcctagttcctgaagacaagagcagtcctgaactatgaaattgccctcccatcctctttccctcattcgatgttatcaattttgtgtgtgataga

SEQ ID NO: 23024 - DNA, 5811 bp, Oryza sativa
gccattaatttttgagggaatttgatgctggtacgcagaaactcgcctgtttaggagcaaaagctttcaacttcgttgttggtaattcaagtccacataatctacaaagagtttccaggtccagctcctaaagaagttccaaaacaagaatcaacatccagctgatgattttagaactgttcactaaagctgcaactaaaatgcacaactgcagtaaaaatatatgtcgaagggtggtgtccgcgtacctcgatcattaggatttctgataaatgtgtcaaagggtggtgttgaagtttgtagccactatgattgaagtacattaatgctctaacacgagcctttggcagcaaagcaggcaaaaaaaattgatatgtcagaacgaaatatatccagcaatattaaagcttgtgaataaagaaatgtgctggtaacaaccactagcataacacaaacttgagataattctcattcatactgaaaggatcagaacacaattttaaaacgggtgaggaaaatttaactaaccattgcagcaattcgtttttttgcacaaacaattaaacacttcagcagtatgtgggcaactgggcacctactttacacttaacaactatgtttgtaaaagctagataacagataccatatggatataacaggctcaaatgtacatacagaaggcaaggatatcaccttatcattaaaagggtcaaaattgctgttcggcttacctcattgagaaaaggttctaacagacgcagctgaagatcggttccttcagctgctatggcgcagaagaaacgcttgaagtttcctaggtggtagaatctgcagaaagaagatcagaacatatatatatcaattaagtttaaaatgatgtgtctcaatagttagcacttctgagttgtcccaaatcatactgctgtgcacaaagaagactcaagaagcatgatggctcttagagcatgacaaaaatgaaggctctatgtatgttgatacaaataatatgcataaagttaccttaatatagatctagcaaataccatttcctttgattgtataattgaagcagatagatggccataccacaaagagagtgaatctacctggagataaacaggaaattaggctactattcactagctggagtaagaagaaagtattgggaacaagagaataacataaattagattatttagaaggcaataaaaattgggggcaaaccattttgggtatcttgcagcccaaatgtagaagcacgtagaaggaataatattcagtctctttactactctgtgaattgttcttgtgaattacatcatacatatcaaacagagaaagaaggcacttcattagctgctccatgtttaggtaacacagggaagaagcatcagaatcctgggaagacctagaaagcttctgatgggatagaatatgaaactttatctgcagaaggcaggggcatgcatcagataaagctgtgaaagaggaataatctaccctatatgcttgcacttgaagcaaatatgttcctccaccttaacaaaatgacatccggcagcataacatcaaaagataacagcatctaacgaacaaaaaggaccacttagtggctaacacagatgccaagtagaaaatgcctgaaagaactaattcatgcataatcggaaaagaaacatactttctcccaaaccaattagagagaaaaggcgagaacctcaacaacattttatgcatatcgagtattactctatctaacaagagtttggatgagtgaattttctggcctcaactacttaaaaaggatggaacataaccttacaaggaaaacaaagagaaagttgttgagtagtagttctgtgatagagtataaggatgctcaattctataatgttaaaagttagattccagacacaacaatctaaaccagacaaataagtaccctaaaattcagaggtctatacaataagataaaaacatggatgatatgagtgtaccacatcctcgtatatttgaattgcttgggcattcactatgttctgaatactgaggtcttgcctcacagaccttgtcctatcaaatataaaatcatgaactatctcaaactgatgctctgaggaatccaataaatgcaaaagataatccattgtttctcgcaggactgggagagggcgtatatctgatgcctgtacactcgtggaagagatagttctgcaaaactagcaggaaaccaagtgttagaaaaggaacggagatacacagaattctcaaatagctacctgattctcttaaaacacacgcggttcatgaaatctttcagaccacatgaaactgtagtgcaaatttgtaattataacagtgttttcaggtggcaaattggctattctatgtggttggtaaagattcattatcttacacaccttttatgatttttcagtggcatttttactcaagtttgcagtggcaagtaaatgaattccgacagtttcacctcaagtgtgcagaacatgatatctcattgtataactattattttcgttgatacaagctctttttacctaataacaatggcatgctaaataaataatgtaaaaaaaatcataatctgcttttgcacattgctttcttttatctgcaaacatgaccacatattcaagataaaaataagtattaaatgaattgataatcctgtcctttcatcatatcttcacccctgcaaaaatactagtacaaggtaagtactaagtagggttatatttcatccaataaactataaaaagaaatcaaacaaaataaatataaatctgacactatcgtacattcaatctcttgaaggctaggctacccgaatagcttccttacactctggcagtgattggacaagacaagcgtagatcagatttagtgctgcattgctgttattgcattattggtggcatatgtaactatatagctacatctaacataaagtgttgattgttccaacacatgcttaacggcaactgatcacccttttaagcaaaaatacatgcacagttgcatgcacaaaaaaaagcttccagctccatatcaaatccaatcaaaacagactaaaccaccacatggaatggaaccaagctatagcctgtccatttgcatggagagaacaatccaagcagatacgcaccaaaaatgaccagcagtgaagcatcaccacgacccaaccgcaagttcaaaaagaaaaaaaaaatcaggaatggcctccacatgagtacggagaaaaatggatggctcaccttcttcacggcgagggaaggggacgtgcgcgcggggtcgccgcccacccgctcgaacaccgccaggtccctcagccgctccctctgcgccctctccctcgctgcagcaggaaaaaaaacagtagcatccatgagctaaaacgcgccaaccaaatccatccaattaggggccaactgatcgcgcaatttcgtcgaacaggtggggggcaattcgccccgccaaacgggggtcaggtcaggtcagccagcgtcggcgtgagcgcacgggaggcttggacgaagcgcgttacctgggcacatgtcggggcagctgcccacgatcggcggggcgtcgccgccggtaccagccgcggtggcgctggccgccgccgggaaggaagaggtggaggaggaaggaggaggtggcggtgaggggccggcgccgcggctgagaccaaggccgcggccttctccccgacctcgccagcctcggccccatccgtggccacgagtggaactccggccgcggtggctcgccatgtcccggcgatccatggcggcccttggcctcgagctccgaggggtagtctggtaatttggtggttagttgaaccgtggagtggaacaatggagcttcaaacgaacatgcttttttagtggagagagagagggggggaggccaagatttttttttaaccttttaaaattttaattttaaagtaatgtcctgttttccaatttttttttcaaatttctaacttttccgtcacatcgaactttcctacacccacaaacttccaattattccgtcatatcgttctaatttttttaaacttccaattttagagtggaactaaacacagcctaaatcataacaaaacttatttttaaactgaatctttcgaccacgtcagcaagagtggtgtcatgaaataccgttgccatgtcatctagaacaatactactccctccgtcctctaatataagggattttgactttttgcttatactgtttgaccactcgtcgtattaaaaattttttggaattattatttattttttacttactttttgcttgcaccgtttgaacattcgtcgtattaaattttttttggaattattaattatttttttgacttactttattatctgaagtactttacgcacaacttttcgcttttttatattttcacaaaatttttgaataagacgagtgatcaaacagtgcaagcaaaatatcaaaatcccttatattatgggacggagagagtatcacactaccctggctagtgtgacggtgttattttgccacacgcactctggctgacgtgggcacgtggcaacgttctcttgccaagccattcatattgacatgacaaagcaaaattttcacatcaataaatcgattattgatggtgtgacaatattatttcgtcacgcacagacgaagtggcgtggcaacaaatattcaggtttagaaataagtaaagagatgatttatgtttagaattaaaagattaagaatcataaaaattcaaaaacctaaaggcaagacggtgtaccggtgtttgaggttcaaactgagatgtgggaactttttttttcaattacacaaaaaaatgtatattcacgttatatagtctacgcacttgtgaatgcatcatctataaaacacttgccgagacgggggcataaataaatacaagaaatataattggaagaatgagcagttctttttgaaagctctgcatttctgtcagggttacgggtaaagtataccctctactttttgatatacgtcacatatcgatatggtatacttgcgcgtatacggatgtttttggcatacgttaaggaaattcattatggagttcacagatggaaggaatcctactcggattgaactgggtcgtcattatatcgtatcgggtccgatgtctccgagtcctacttggagaccagttgacctgcggtataaaagggaccccccggagaggacctagggcatcgaatcttaccgccaacacatccaccacagcctacgaagccggagcctacaggagccaagtcgccgggtgatctagtcgaatcaactcgactacgatctcgtcggtatcgtcgagttccactattccctttgtaatctgtggtttccatcatataatcccatatcaactagattagggctattacctatcaaggggcctgaaccagtataatctttgttttctgcctactcgatgtcgtattacgtagatcctcgtaccagtgtaccctaataccctctatatccggtctacgggtatcccccgtcgacagtggcgcgccaggtaggggcacttggtgctcaaggttctactactatgacatccagcttcgtcgacaacggcgtcaacaccaacctcaaccaaggagttcctacttcaacaacactggtgtggactcaagtcggcgaaatcgtcttcccggtttacaccacagtgccgatctcagctggtccgtcaatggccggaaacgagaacgcagtggctataacccaggacgactacatgttgaa
